United States Patent Application Publication US 2020/0163878 A1 - sequence listing, part 34

SEQ ID NO: 127175 - RNA, 1575 nt, Artificial Sequence
  derived and/or modified CDS sequence (opt2) from glycoprotein__RABV__JN234411.1
auggucccccaggcccuccuccucgucccccuccucggcuucucccucugcuucggcaaguuccccaucuacaccauccccgacacccucggccccuggucccccaucgacauccaccaccucuccugccccaacaaccucgucgucgaggacgagggcugcaccaaccucuccggcuucuccuacauggagcucaaggucggccacaucuccgccaucaaggucaacggcuucaccugcaccggcgucgucaccgaggccgagaccuacaccaacuucgucggcuacgucaccaccaccuucaagcgcaagcacuuccgccccacccccgacgccugccgcgccgccuacaacuggaagauggccggcgacccccgcuacgaggagucccuccacucccccuaccccgacuaccacuggcuccgcaccgucaagaccaccaaggagucccucgucaucaucucccccuccgucgccaaccucgaccccuacgacaacucccuccacucccgcgucuuccccuccggcaagugcuccggcaucaccguccccuccgucuacugcuccaccaaccacgacuacaccgucuggaugcccgagauccuccgccucggcaccuccugcgacaucuucaccaacucccgcggcaagcgcgccuccaagggcuccaagaccugcggcuucgucgacgagcgcggccucuacaagucccucaagggcgccugcaagcucaagcucugcggcguccccggccuccgccucauggacggcaccugggucgccaugcagaccuccaacgagaccaaguggugcccccccggccagcucgucaaccuccacgaccuccacuccgacgagaucgagcaccucgucgucgaggagcucgucaagaagcgcgaggagugccucgacgcccucgaguccgucaucaccaccaaguccgucuccuuccgccgccucucccaccuccgcaagcucguccccggcuucggcaaggccuacaccaucuucaacaagacccucauggaggccgaggcccacuacaaguccguccgcaccuggaacgagaucauccccuccaagggcugccuccgcgucggcggccgcugcuacccccacgucaacggcgucuucuucaacggcaucauccucggccccgacggccacguccucauccccgagaugcaguccucccuccuccagcagcacaucgagcuccucgaguccuccgucaucccccucaugcacccccucgccgaccccuucaccgucuucaaggacggcgacgagaucgaggacuucgucgagguccaccuccccgacguccacgagcaggucuccggcgucgaccucggccuccccaacuggggcgaguacguccuccucuccgccggcacccucaucgcccucaugcucaucaucuuccucaucaccugcugcaagcgcgucgaccgccccgaguccacccagcgcucccuccgcggcaccggccgcaacgucuccgucaccucccaguccggcaaguucauccccuccugggaguccuacaaguccggcggcgagaccggccucuga

SEQ ID NO: 127176 - RNA, 1575 nt, Artificial Sequence
  derived and/or modified CDS sequence (opt2) from glycoprotein__RABV__JN234412.1
auggucccccaggcccuccuccucgucccccuccucggcuucucccucugcuucggcaaguuccccaucuacaccauccccgacacccucggccccuggucccccaucgacauccaccaccucuccugccccaacaaccucgucgucgaggacgagggcugcaccaaccucuccggcuucuccuacauggagcucaaggucggccacaucuccgccaucaaggucaacggcuucaccugcaccggcgucgucaccgaggccgagaccuacaccaacuucgucggcuacgucaccaccaccuucaagcgcaagcacuuccgccccacccccgacgccugccgcgccgccuacaacuggaagauggccggcgacccccgcuacgaggagucccuccacucccccuaccccgacuaccacuggcuccgcaccgucaagaccaccaaggagucccucgucaucaucucccccuccgucgccaaccucgaccccuacgacaacucccuccacucccgcgucuuccccuccggcaagugcuccggcaucaccguccccuccgucuacugcuccaccaaccacgacuacaccgucuggaugcccgagauccuccgccucggcaccuccugcgacaucuucaccaacucccgcggcaagcgcgccuccaagggcuccaagaccugcggcuucgucgacgagcgcggccucuacaagucccucaagggcgccugcaagcucaagcucugcggcguccccggccuccgccucauggacggcaccugggucgccaugcagaccuccaacgagaccaaguggugcccccccggccagcucgucaaccuccacgaccuccacuccgacgagaucgagcaccucgucgucgaggagcucgucaagaagcgcgaggagugccucgacgcccucgaguccaucaucaccaccaaguccgucuccuuccgccgccucucccaccuccgcaagcucguccccggcuucggcaaggccuacaccaucuucaacaagacccucauggaggccgaggcccacuacaaguccguccgcaccuggaacgagaucauccccuccaagggcugccuccgcgucggcggccgcugcuacccccacgucaacggcgucuucuucaacggcaucauccucggccccgacggccacguccucauccccgagaugcaguccucccuccuccagcagcacaucgagcuccucgaguccuccgucaucccccucaugcacccccucgccgaccccuucaccgucuucaaggacggcgacgagaucgaggacuucgucgagguccaccuccccgacguccacgagcaggucuccggcgucgaccucggccuccccaacuggggcgaguacguccuccucuccgccggcacccucaucgcccucaugcucaucaucuuccucaucaccugcugcaagcgcgucgaccgccccgaguccacccagcgcucccuccgcggcaccggccgcaacgucuccgucaccucccaguccggcaaguucauccccuccugggaguccuacaaguccggcggcgagaccggccucuga

SEQ ID NO: 127177 - RNA, 1575 nt, Artificial Sequence; identical to SEQ ID NO: 127066
  derived and/or modified CDS sequence (opt2) from glycoprotein__RABV__JN234413.1

SEQ ID NO: 127178 - RNA, 1575 nt, Artificial Sequence
  derived and/or modified CDS sequence (opt2) from glycoprotein__RABV__JN234420.1
augaucccccaggcccuccucuucgucccccuccucgucuucccccucugcuucggcaaguuccccaucuacaccauccccgacaagcucggccccuggucccccaucgacauccaccaccucuccugccccaacaaccucgucgucgaggacgagggcugcaccaaccucuccggcuucuccuacauggagcucaaggucggcuacaucuccgccaucaaggucaacggcuucaccugcaccggcgucgucaccgaggccgagaccuacaccaacuucgucggcuacgucaccaccaccuucaagcgcaagcacuuccgccccacccccgacgccugccgcuccgccuacaacuggaagauggccggcgacccccgcuacgaggagucccuccacaaccccuaccccgacuaccacuggcuccgcaccgucaagaccaccaaggaguccgucgucaucaucucccccuccgucgccgaccucgaccccuacgacaagucccuccacucccgcgucuucccccgcggcaagugcuccggcaucaccgucuccuccgccuacugcuccaccaaccacgacuacaccaucuggaugcccgagaacccccgccucggcaccuccugcgacaucuucaccaacucccgcggcaagcgcgccuccaagggcuccaagaccugcggcuucgucgacgagcgcggccucuacaagucccucaagggcgccugcaagcucaagcucugcggcguccucggccuccgccucauggacggcaccugggucgccauccagaccuccaacgagaccaaguggugcccccccgaccagcucgucaaccuccacgacuuccacuccgacgagaucgagcaccucgucgucgaggagcucgucaagaagcgcgaggagugccucgacgcccucgaguccaucaugaccaccaaguccgucuccuuccgccgccucucccaccuccgcaagcucguccccggcuucggcaaggccuacaccaucuucaacaagacccucauggaggccgacgcccacuacaaguccguccgcaccuggaacgagaucauccccuccaagggcugccuccgcgucggcggccgcugccacccccacgucaacggcgucuucuucaacggcaucauccucggccccgacggccacguccucauccccgagaugcaguccucccuccuccagcagcacauggagcuccucaaguccuccgucaucccccucaugcacccccucgccgaccccuccaccgucuucaaggacggcgacgaggucgaggacuucgucgagguccaccuccccgacguccacaagcaggucuccggcgucgaccucggccuccccaacuggggcaaggacguccucaugggcgccggcguccucaccgcccucaugcucaugaucuuccucaugaccugcugccgccgcaccaaccgcgccgaguccauccagcacucccucggcgagaccggccgcaaggucuccgucaccucccaguccggccgcgucaucuccuccugggaguccuacaaguccggcggcgagaccaagcucuga

SEQ ID NO: 127179 - RNA, 1575 nt, Artificial Sequence; identical to SEQ ID NO: 127178
  derived and/or modified CDS sequence (opt2) from glycoprotein__RABV__JN234423.1

SEQ ID NO: 127180 - RNA, 1575 nt, Artificial Sequence
  derived and/or modified CDS sequence (opt2) from glycoprotein__RABV__JN234424.1
auggucccccaggcccuccucuucgucccccuccucgucuucccccucugcuucggcaaguuccccaucuacaccauccccgacaagcucggccccuggucccccaucgacauccaccaccucuccugccccaacaaccucgucgucgaggacgagggcugcaccaaccucuccggcuucuccuacauggagcucaaggucggcuacaucuccgccaucaagaccaacggcuucaccugcaccggcgucgucaccgaggccgagaccuacaccaacuucgucggcuacgucaccaccaccuucaagcgcaagcacuuccgccccacccccgacgccugccgcgccgccuacaacuggaagauggccggcgacccccgcuacgaggagucccuccacaaccccuaccccgacuaccacuggcuccgcaccgucaagaccaccaaggagucccucgucaucaucucccccuccgucgccgaccucgaccccuacgaccgcucccuccacucccgcgucuuccccggcggcaacugcuccggcgucgccgucuccuccaccuacugcuccaccaaccacgacuacaccaucuggaugcccgagaacccccgccucggcauguccugcgacaucuucaccaacucccgcggcaagcgcgccuccaagggcuccgagaccugcggcuucgucgacgagcgcggccucuacaagucccucaagggcgccugcaagcucaagcucugcggcguccucggccuccgccucauggacggcaccugggucgccaugcagaccuccaacgagaccaaguggugcccccccggccagcucgucaaccuccacgacuuccgcuccgacgagaucgagcaccucgucgucgaggagcucgucaagaagcgcgaggagugccucgacgcccucgaguccaucaugaccaccaaguccgucuccuuccgccgccucucccaccuccgcaagcucguccccggcuucggcaaggccuacaccaucuucaacaagacccucauggaggccgacgcccacuacaaguccguccgcaccuggaacgagaucauccccuccaagggcugccuccgcgucggcggccgcugccacccccacgucaacggcgucuucuucaacggcaucauccucggccccgacggcaacguccucauccccgagaugcaguccucccuccuccagcagcacauggagcuccucgucuccuccgucaucccccucaugcaccccauggccgaccccuccaccgucuucaagaacggcgacgaggccgaggacuucgucgagguccaccuccccgacguccacgagcgcaucuccggcgucgaccucggccuccccaacuggggcaaguacguccuccucuccgccggcgcccucaccgcccucaugcucaucaucuuccucaugaccugcuggcgccgcgucaaccgcuccgagcccacccagcacaaccuccgcggcaccggccgcgaggucuccgucaccccccaguccggcaagaucaucuccuccugggaguccuacaaguccggcggcgagaccggccucuga

SEQ ID NO: 127181 - RNA, 1575 nt, Artificial Sequence; identical to SEQ ID NO: 127064
  derived and/or modified CDS sequence (opt2) from glycoprotein__RABV__JN786877.1

SEQ ID NO: 127182 - RNA, 1575 nt, Artificial Sequence
  derived and/or modified CDS sequence (opt2) from glycoprotein__RABV__JN786878.1
augaucccccaggcccuccucuucgucccccuccucgucuucuccuccugcuucggcaaguuccccaucuacaccauccccgacaagcucggccccuggucccccaucgacauccaccaccuccgcugccccaacaaccucgucgucgaggacgagggcugcaccaaccucuccggcuucuccuacauggagcucaaggucggcuacaucuccgccaucaaggucaacggcuucaccugcaccggcgucgucaccgaggccgagaccuacaccaacuucgucggcuacgucaccaccaccuucaagcgcaagcacuuccgccccacccccgacgccugccgcgccgccuacaacuggaagauggccggcgacccccgcuacgaggagucccuccacaaccccuaccccgacuaccacuggcuccgcaccgucaagaccaccaaggagucccucgucaucaucucccccuccgucuccgaccucgaccccuacgacaagucccuccacucccgcgucuuccccuccggcaagugcuccggcaucaccgucuccuccaccuacugccccaccaaccacgacuacaccaucuggaugcccgagaacccccgccucggcaccuccugcgacaucuucaccaacucccgcggcaagcgcgccuccaagggcggcaagaccugcggcuucgucgacgagcgcggccucuacaagucccucaagggcgccugcaagcucaagcucugcggcguccucggccuccgccucauggacggcaccugggucgccauccagaccuccgacgaggccaaguggugcccccccgaccagcucgucaacauccacgacuuccgcuccgacgagaucgagcaccucgucgucgaggagcucgucaagaagcgcgaggagugccucgacgcccucgaguccaucaugaccaccaaguccgucuccuuccgccgccucucccaccuccgcaagcucguccccggcuucggcaaggccuacaccaucuucaacaagacccucauggaggccgacgcccacuacaaguccguccgcaccuggaacgagaucauccccuccaagggcugccuccgcgucggcggccgcugccacccccacgucaacggcgucuucuucaacggcaucauccucggccccgacggccacguccucauccccgagaugcaguccucccuccuccagcagcacauggagcuccucgaguccuccgucaucccccucaugcacccccucgccgaccccuccaccgucuucaaggacggcgacgaggccgaggacuucgucgagguccaccuccccgacguccccaagcaggucuccggcgucgaccucggccuccccuccuggggcaaguacguccucauguccgucggcgccaugaucgcccucaugcucaugaucuuccucaugaccugcugccgcaaggccaacggcgccgagaccauccagcaccgccucggcgagaccggccgcaaggucuccgucaccucccaguccggccgcgucaucuccuccugggaguccuacaaguccggcggcgagaccaagcucuga

SEQ ID NO: 127183 - RNA, 1575 nt, Artificial Sequence; identical to SEQ ID NO: 126881
  derived and/or modified CDS sequence (opt2) from glycoprotein__RABV__JN936687.1

SEQ ID NO: 127184 - RNA, 1575 nt, Artificial Sequence
  derived and/or modified CDS sequence (opt2) from glycoprotein__RABV__JN936688.1
auggucccccagguccuccucuucgucccccuccucgccgucccccucugcuucggcaaguuccccaucuacaccauccccgacaagcucggccccuggucccccaucgacauccaccaccucuccugccccaacaaccucgucgucgaggacgagggcugcaccaaccucuccggcuucuccuacauggagcucaaggucggcuacaucuccgccaucaaggucaacggcuucaccugcaccggcgucgucaccgaggccgagaccuacaccaacuucgucggcuacgucaccaccaccuucaagcgcaagcacuuccgccccacccccgacgccugccgcuccgccuacaacuggaagauggccggcgacccccgcuacgaggagucccuccacaaccccuaccccgacuaccacuggcuccgcaccgucaagaccaccaaggaguccuucgucaucaucucccccuccgucgccgaccucgaccccuacgacaagucccuccacucccgcgucuucccccgcggcaagugcuccggcaucaccgucuccuccaccuacugcuccaccaaccacgacuacaccaucuggaugcccgagaacccccgccucggcaccuccugcgacaucuucaccaacucccgcggcaagcgcgccuccaagggcuccaagaccugcggcuucgucgacgagcgcggccucuacaagucccucaagggcgccugcaagcucaagcucugcggcguccucggccuccgccucauggacggcaccugggucgccauccagaccuccgacgagaccaaguggugcccccccgaccagcucgucaaccuccacgacuuccacuccgacgagaucgagcaccucgucgucgaggagcucgucaagaagcgcgaggagugccucgacgcccucgaguccaucaugaccaccaaguccgucuccuuccgccgccucucccaccuccgcaagcucguccccggcuucggcaaggccuacaccaucuucaacaagacccucauggaggccgacgcccacuacaaguccguccgcaccuggaacgagaucauccccuccaagggcugccuccgcgucggcggccgcugccacccccacgucaacggcgucuucuucaacggcaucauccucggccccgacggccacguccucauccccgagaugcaguccucccuccuccagcagcacauggagcuccucgaguccuccgucaucccccucaugcacccccucgccgaccccuccaccgucuucaaggacggcgacgaggccgaggacuucgucgagguccaccuccccgacguccacaagcaggucuccggcgucgaccucggccuccccuccuggggcaaguacguccucauguccgccggcauccucaccgcccucaugcucaugaucuuccucaugaccugcugccgccgcaccaaccgcgccgaguccauccagcacucccucggcgagaccggccgcaaggucuccgucaccucccagaacggccgcgucaucuccuccugggaguccuacaaguccggcggcgagaccaagcucuga

SEQ ID NO: 127185 - RNA, 1575 nt, Artificial Sequence
  derived and/or modified CDS sequence (opt2) from glycoprotein__RABV__JN936689.1
auggucccccagguccuccucuucgucccccuccucgccgucccccucugcuucggcaaguuccccaucuacaccauccccgacaagcucggccccuggucccccaucgacauccaccaccucuccugccccaacaaccucgucgucgaggacgagggcugcaccaaccucuccggcuucuccuacauggagcucaaggucggcuacaucuccgccaucaaggucaacggcuucaccugcaccggcgucgucaccgaggccgagaccuacaccaacuucgucggcuacgucaccaccaccuucaagcgcaagcacuuccgccccacccccgacgccugccgcuccgccuacaacuggaagauggccggcgacccccgcuacgaggagucccuccacaaccccuaccccgacuaccacuggcuccgcaccgucaagaccaccaaggaguccuucgucaucaucucccccuccgucgccgaccucgaccccuacgacaagucccuccacucccgcgucuucccccgcggcaagugcuccggcaucaccgucuccuccaccuacugcuccaccaaccacgacuacaccaucuggaugcccgagaacccccgccucggcaccuccugcgacaucuucaccaacucccgcggcaagcgcgccuccaagggcuccaagaccugcggcuucgucgacgagcgcggccucuacaagucccucaagggcgccugcaagcucaagcucugcggcguccucggccuccgccucauggacggcaccugggucgccauccagaccuccgacgagaccaaguggugcccccccgaccagcucgucaaccuccacgacuuccacuccgacgagaucgagcaccucgucgucgaggagcucgucaagaagcgcgaggagugccucgacgcccucgaguccaucaugaccaccaaguccgucuccuuccgccgccucucccaccuccgcaagcucguccccggcuucggcaaggccuacaccaucuucaacaagacccucauggaggccgacgcccacuacaaguccguccgcaccuggaacgagaucauccccuccaagggcugccuccgcgucggcggccgcugccacccccacgucaacggcgucuucuucaacggcaucauccucggccccgacggccacguccucauccccgagaugcaguccucccuccuccagcagcacauggagcuccucgaguccuccgucaucccccucaugcacccccucgccgaccccuccaccgucuucaaggacggcgacgaggccgaggacuucgucgagguccaccuccccgacguccacaagcaggucuccggcgucgaccucggccuccccuccuggggcaaguacguccucauguccgccggcauccucaccgcccucaugcucaccaucuuccucaugaccugcugccgccgcaccaaccgcgccgaguccauccagcacucccucggcgagaccggccgcaaggucuccgucaccucccaguccggccgcgucaucuccuccugggaguccuacaaguccggcggcgagaccaagcucuga

SEQ ID NO: 127186 - RNA, 1575 nt, Artificial Sequence
  derived and/or modified CDS sequence (opt2) from glycoprotein__RABV__JN936690.1
auggucccccaggccguccucuucgucccccuccucgccgucccccucugcuucggcaaguuccccaucuacaccauccccgacaagcucggccccuggucccccaucgacauccaccaccucuccugccccaacaaccucgucgucgaggacgagggcugcaccaaccucuccggcuucuccuacauggagcucaaggucggcuacaucuccgccaucaaggucaacggcuucaccugcaccggcgucgucaccgaggccgagaccuacaccaacuucgucggcuacgucaccaccaccuucaagcgcaagcacuuccgccccacccccgacgccugccgcuccgccuacaacuggaagauggccggcgacccccgcuacgaggagucccuccacaaccccuaccccgacuaccacuggcuccgcaccgucaagaccaccaaggaguccuucgucaucaucucccccuccgucgccgaccucgaccccuacgacaagucccuccacucccgcgucuucccccgcggcaagugcuccggcaucaccgucuccuccaccuacugcuccaccaaccacgacuacaccaucuggaugcccgagaacccccgccucggcaccuccugcgacaucuucaccaacucccgcggcaagcgcgccuccaagggcuccaagaccugcggcuucgucgacgagcgcggccucuacaagucccucaagggcgccugcaagcucaagcucugcggcguccucggccuccgccucauggacggcaccugggucgccauccagaccuccgacgagaccaaguggugcccccccgaccagcucgucaaccuccacgacuuccacuccgacgagaucgagcaccucgucgucgaggagcucgucaagaagcgcgaggagugccucgacgcccucgaguccaucaugaccaccaaguccgucuccuuccgccgccucucccaccuccgcaagcucguccccggcuucggcaaggccuacaccaucuucaacaagacccucauggaggccgacgcccacuacaaguccguccgcaccuggaacgagaucauccccuccaagggcugccuccgcgucggcggccgcugccacccccacgucaacggcgucuucuucaacggcaucauccucggccccgacggccacguccucauccccgagaugcaguccucccuccuccagcagcacauggagcuccucgaguccuccgucaucccccucaugcacccccucgccgaccccuccaccgucuucaaggacggcgacgaggccgaggacuucgucgagguccaccuccccgacguccacaagcaggucuccggcgucgaccucggccuccccuccuggggcaaguacguccucauguccgccggcauccucaccgcccucaugcucaugaucuuccucaugaccugcugccgccgcaccaaccgcgccgaguccauccagcacucccucggcgagaccggccgcaaggucuccgucaccucccagaacggccgcgucaucuccuccugggaguccuacaaguccggcggcgagaccaagcucuga

SEQ ID NO: 127187 - RNA, 1575 nt, Artificial Sequence
  derived and/or modified CDS sequence (opt2) from glycoprotein__RABV__JN936691.1
augaucccccagguccuccucuucgucccccuccucgucuucuccuccugcuucggcaaguuccccaucuacaccauccccgacaagcucggccccuggucccccaucgacauccaccaccucuccugccccaacaacauggucgucgaggacgagggcugcaccaaccucuccggcuucuccuacauggagcucaaggucggcuacaucuccgccaucaaggucaacggcuucaccugcaccggcgucgucaccgaggccgagaccuacaccaacuucgucggcuacgucaccaccaccuucaagcgcaagcacuuccgccccaugcccgacgccugccgcgccgccuacaacuggaagauggccggcgacccccgcuacgaggagucccuccacaaccccuaccccgacuaccacuggcuccgcaccgucaagaccaccaaggagucccucgucaucaucucccccuccgucgccgaccucgaccccuacgacaagucccuccacucccgcgucuuccccggcggcaagugcuccggcaucaccgucuccuccaccugcugcuccaccaaccacgacuacaccaucuggaugcccgagaacccccgccucggcaccuccugcgacaucuucaccaacucccgcggcaagcgcgccuccaagggcggcaagaccugcggcuucgucgacgagcgcggccucuacaagucccucaagggcgccugcaagcucaagcucugcggcguccucggccuccgccucauggacggcaccugggucgccauccagaccuccgacgagaucaaguggugcucccccgaccagcucgucaaccuccacgacuuccacuccgacgagaucgagcaccucgucgucgaggagcucgucaagaagcgcgaggagugccucgacgcccucgagaccaucaugaccaccaaguccgucuccuuccgccgccucucccaccuccgcaagcucguccccggcuucggcaaggccuacaccaucuucaacaagacccucauggaggccgacgcccacuacaaguccauccgcaccuggaacgagaucauccccuccaagggcugccuccgcgucggcggccgcugccacccccacgucaacggcgucuucuucaacggcaucauccucggccccgacggccacguccucauccccgagaugcaguccucccuccuccaccagcacauggagcuccucgaguccuccgucaucccccucaugcacccccucgccgaccccuccaccgucuucaaggacggcgacgaggccgaggacuucgucgagguccaccuccccgacguccacaagcagaucuccggcgucgaccucggccuccccaacuggggcaaguacguccucaucuccgccggcgcccucaccgcccucaugcucaccaucuuccucaugaccugcugccgcaagaccaaccgcgccgaguccauccagcacucccccggcgagaccggccgcaaggucuccgucaccucccacaacggccgcgucaucuccuccugggaguccuacaaguccggcggcgagaccaagcucuga

SEQ ID NO: 127188 - RNA, 1575 nt, Artificial Sequence; identical to SEQ ID NO: 126881
  derived and/or modified CDS sequence (opt2) from glycoprotein__RABV__JN936692.1

SEQ ID NO: 127189 - RNA, 1575 nt, Artificial Sequence
  derived and/or modified CDS sequence (opt2) from glycoprotein__RABV__JN936693.1
auggucccccaggccuuccucuucgucccccuccucgccaucccccucugcuucggcaaguuccccaucuacaccauccccgacaagcucggccccuggucccccaucgacauccaccaccucuccugccccaacaaccucgucgucgaggacgagggcugcaccaaccucuccggcuucuccuacauggagcucaaggucggcuacaucuccgccaucaaggucaacggcuucaccugcaccggcgucgucaccgaggccgagaccuacaccaacuucgucggcuacgucaccaccaccuucaagcgcaagcacuuccgccccacccccgacgccugccgcuccgccuacaacuggaagauggccggcgacccccgcuacgaggagucccuccacaaccccuaccccgacuaccacuggcuccgcaccgucaagaccaccaaggaguccuucgucaucaucucccccuccgucgccgaccucgaccccuacgacaagucccuccacucccgcgucuucccccgcggcaagugcuccggcaucaccgucuccuccaccuacugcuccaccaaccacgacuacaccaucuggaugcccgagaacccccgccucggcaccuccugcgacaucuucaccaacucccgcggcaagcgcgccuccaagggcuccaagaccugcggcuucgucgacgagcgcggccucuacaagucccucaagggcgccugcaagcucaagcucugcggcguccucggccuccgccucauggacggcaccugggucgccauccagaccuccgacgagaccaaguggugcccccccgaccagcucgucaaccuccacgacuuccacuccgacgagaucgagcaccucgucgucgaggagcucgucaagaagcgcgaggagugccucgacacccucgaguccaucaugaccaccaaguccgucuccuuccgccgccucucccaccuccgcaagcucguccccggcuucggcaaggccuacaccaucuucaacaagacccucauggaggccgacgcccacuacaaguccguccgcaccuggaacgagaucauccccuccaagggcugccuccgcgucggcggccgcugccacccccacgucaacggcgucuucuucaacggcaucauccucggccccgacggccacguccucauccccgagaugcaguccucccuccuccagcagcacauggagcuccucgaguccuccgucaucccccucaugcacccccucgccgaccccuccaccgucuucaaggacggcgacgaggccgaggacuucgucgagguccaccuccccgacguccacaagcaggucuccggcgucgaccucggccuccccuccuggggcaaguacguccucauguccgccggcauccucaccgcccucaugcucaugaucuuccucaugaccugcugccgccgcaccaaccgcgccgaguccauccagcacucccucggcgagaccggccgcaaggucuccgucaccucccaguccggccgcgucaucuccuccugggaguccuacaaguccggcggcgagaccaagcucuga

SEQ ID NO: 127190 - RNA, 1575 nt, Artificial Sequence
  derived and/or modified CDS sequence (opt2) from glycoprotein__RABV__JN936694.1
auggucccccaggcccuccucuucgucccccuccucgucuucuccuccugcuucggcaaguuccccaucuacaccauccccgacaagcucggccccuggucccccaucgacauccaccaccucuccugccccaacaacuucgucgucgaggacgagggcugcaccaaccucuccggcuucuccuacauggagcucaaggucggcuacaucuccgccaucaaggucaacggcuucaccugcaccggcgucgucaccgaggccgagaccuacaccaacuucgucggcuacgucaccaccaccuucaagcgcaagcacuuccgccccaugcccgacgccugccgcgccgccuacaacuggaagauggccggcgacccccgcuacgaggagucccuccacaaccccuaccccgacuaccacuggcuccgcaccgucaagaccaccaaggagucccucgucaucaucucccccuccgucgccgaccucgaccccuacgacaagucccuccacucccgcgucuuccccggcggcaagugcuccggcaucaccgucuccuccaccugcugcuccaccaaccacgacuacaccaucuggaugcccgagaacccccgccucggcaccuccugcgacaucuucaccaacucccgcggcaagcgcgccuccaagggcggcaagaccugcggcuucgucgacgagcgcggccucuacaagucccucaagggcgccugcaagcucaagcucugcggcguccucggccuccgccucauggacggcaccugggucgccauccagaccuccgacgagaucaaguggugcucccccgaccagcucgucaaccuccacgacuuccacuccgacgagaucgagcacuucgucgucgaggagcucgucaagaagcgcgaggagugccucgacgcccucgagaccaucaugaccaccaaguccgucuccuuccgccgccucucccaccuccgcaagcucguccccggcuucggcaaggccuacaccaucuucaacaagacccucauggaggccgacgcccacuacaaguccauccgcaccuggaacgagaucauccccuccaagggcugccuccgcgucggcggccgcugccacccccacgucaacggcgucuucuucaacggcaucauccucggccccgacggccacguccucauccccgagaugcaguccucccuccuccaccagcacauggagcuccucgaguccuccgucaucccccucaugcacccccucgccgaccccuccaccgucuucaaggacggcgacgaggccgaggacuucgucgagguccaccuccccgacguccacaagcagaucuccggcgucgaccucggccuccccaacuggggcaaguacguccucaucuccgccggcgcccucaccgcccucaugcucaugaucuuccucaugaccugcugccgcaaggccaaccgcgccgaguccauccagcacaaccccggcgagaccggccgcaaggucuccgucaccucccacaacggccgcgucaucuccuccugggaguccuacaaguccggcggcgagaccaagcucuga

SEQ ID NO: 127191 - RNA, 1575 nt, Artificial Sequence
  derived and/or modified CDS sequence (opt2) from glycoprotein__RABV__JN936695.1
auggucccccaggccuuccucuucgucccccuccucgccaucccccucugcuucggcaaguuccccaucuacaccauccccgacaagcucggccccuggucccccaucgacauccaccaccucuccugccccaacaaccucgucgucgaggacgagggcugcaccaaccucuccggcuucuccuacauggagcucaaggucggcuacaucuccgccaucaaggucaacggcuucaccugcaccggcgucgucaccgaggccgagaccuacaccaacuucgucggcuacgucaccaccaccuucaagcgcaagcacuuccgccccacccccgacgccugccgcuccgccuacaacuggaagauggccggcgacccccgcuacgaggagucccuccacaaccccuaccccgacuaccacuggcuccgcaccgucaagaccaccaaggaguccuucgucaucaucucccccuccgucgccgaccucgaccccuacgacaagucccuccacucccgcgucuucccccgcggcaagugcuccggcaucaccgucuccuccaccuacugcuccaccaaccacgacuacaccaucuggaugcccgagaacccccgccucggcaccuccugcgacaucuucaccaacucccgcggcaagcgcgccuccaagggcuccaagaccugcggcuucgucgacgagcgcggccucuacaagucccucaagggcgccugcaagcucaagcucugcggcguccucggccuccgccucauggacggcaccugggucgccauccagaccuccgacgagaccaaguggugcccccccgaccagcucgucaaccuccacgacuuccacuccgacgagaucgagcaccucgucgucgaggagcucgucaagaagcgcgaggagugccucgacgcccucgaguccaucaugaccaccaaguccgucuccuuccgccgccucucccaccuccgcaagcucguccccggcuucggcaaggccuacaccaucuucaacaagacccucauggaggccgacgcccacuacaaguccguccgcaccuggaacgagaucauccccuccaagggcugccuccgcgucggcggccgcugccacccccacgucaacggcgucuucuucaacggcaucauccucggccccgacggccacguccucauccccgagaugcaguccucccuccuccagcagcacauggagcuccucgaguccuccgucaucccccucaugcacccccucgccgaccccuccaccgucuucaaggacggcgacgaggccgaggacuucgucgagguccaccuccccgacguccacaagcaggucuccggcgucgaccucggccuccccuccuggggcaaguacguccucauguccgccggcauccucaccgcccucaugcucaugaucuuccucaugaccugcugccgccgcgccaaccgcgccgaguccauccagcacucccucggcgagaccggccgcaaggucuccgucaccucccaguccggccgcgucaucuccuccugggaguccuacaaguccggcggcgagaccaagcucuga

SEQ ID NO: 127192 - RNA, 1575 nt, Artificial Sequence
  derived and/or modified CDS sequence (opt2) from glycoprotein__RABV__JN936696.1
augauccuccagguccuccucuucguccccuuccucgucuucuccuccugcuucggcaaguuccccaucuacaccauccccgacaagcucggccccuggucccccaucgacauccaccaccucuccugccccaacaaccucgucgucgaggacgagggcugcaccaaccucuccggcuucuccuacauggagcucaaggucggcuacaucuccgccaucaaggucaacggcuucaccugcaccggcgucgucaccgaggccgagaccuacaccaacuucgucggcuacgucaccaccaccuucaagcgcaagcacuuccgccccaugcccgacgccugccgcgccgccuacaacuggaagauggccggcgacccccgcuacgaggagucccuccacaaccccuaccccgacuaccacuggcuccgcaccgucaagaccaccaaggagucccucgucaucaucucccccuccgucgccgaccucgaccccuacgacaagucccuccacucccgcgucuuccccggcggcaagugcuccggcaucaccgucuccuccaccugcugcuccaccaaccacgacuacaccaucuggaugcccgagaacccccgccucggcaccuccugcgacaucuucaccaacucccgcggcaagcgcgccuccaagggcggcaagaccugcggcuucgucgacgagcgcggccucuacaagucccucaagggcgccugcaagcucaagcucugcggcguccucggccuccgccucauggacggcaccugggucgccauccagaccuccgacgagaucaaguggugcccccccgaccagcucgucaaccuccacgacuuccacuccgacgagaucgagcaccucgucgucgaggagcucgucaagaagcgcgaggagugccucgacgcccucgagaccaucaugaccaccaaguccgucuccuuccgccgccucucccaccuccgcaagcucguccccggcuucggcaaggccuacaccaucuucaacaagacccucauggaggccgacgcccacuacaaguccauccgcaccuggaacgagaucauccccuccaagggcugccuccgcgucggcggccgcugccacccccacgucaacggcgucuucuucaacggcaucauccucggccccgacggccacguccucauccccgagaugcaguccucccuccuccaccagcacauggagcuccucgaguccuccgucaucccccucaugcacccccucgccgaccccuccaccgucuucaaggacggcgacgaggccgaggacuucgucgagguccaccuccccgacguccacaagcagaucuccggcgucgaccucggccuccccaacuggggcaaguacguccucaucuccgccggcgcccucaccgcccucaugcucaugaucuuccucaugaccugcugccgcaagaacaaccgcgccgaguccauccagcacucccccggcgagaccggccgcaaggucuccgucaccucccacaacggccgcgucaucuccuccugggaguccuacaaguccggcggcgagaccaagcucuga

SEQ ID NO: 127193 - RNA, 1575 nt, Artificial Sequence
  derived and/or modified CDS sequence (opt2) from glycoprotein__RABV__JN936697.1
auggucccccaggccuuccucuucgucccccuccucgccaucccccucugcuucggcaaguuccccaucuacaccauccccgacaagcucggccccuggucccccaucgacauccaccaccucuccugccccaacaaccucgucgucgaggacgagggcugcaccaaccucuccggcuucuccuacauggagcucaaggucggcuacaucuccgccaucaaggucaacggcuucaccugcaccggcgucgucaccgaggccgagaccuacaccaacuucgucggcuacgucaccaccaccuucaagcgcaagcacuuccgccccacccccgacgccugccgcuccgccuacaacuggaagauggccggcgacccccgcuacgaggagucccuccacaaccccuaccccgacuaccacuggcuccgcaccgucaagaccaccaaggaguccuucgucaucaucucccccuccgucgccgaccucgaccccuacgacaagucccuccacucccgcgucuucccccgcggcaagugcuccggcaucaccgucuccuccaccuacugcuccaccaaccacgacuacaccaucuggaugcccgagaacccccgccucggcaccuccugcgacaucuucaccaacucccgcggcaagcgcgccuccaagggcuccaagaccugcggcuucgucgacgagcgcggccucuacaagucccucaagggcgccugcaagcucaagcucugcggcguccucggccuccgccucauggacggcaccugggucgccauccagaccuccgacgagaccaaguggugcccccccgaccagcucgucaaccuccacgacuuccacuccgacgagaucgagcaccucgucgucgaggagcucgucaagaagcgcgaggagugccucgacgcccucgaguccaucaugaccaccaaguccgucuccuuccgccgccucucccaccuccgcaagcucguccccggcuucggcaaggccuacaccaucuucaacaagacccucauggaggccgacgcccacuacaaguccguccgcaccuggaacgagaucauccccuccaagggcugccuccgcgucggcggccgcugccacccccacgucaacggcgucuucuucaacggcaucauccucggccccgacggccacguccucauccccgagaugcaguccucccuccuccagcagcacauggagcuccucgaguccuccgucaucccccucaugcacccccucgccgaccccuccaccgucuucaaggacggcgacgaggccgaggacuucgucgagguccaccuccccgacguccacaagcaggucuccggcgucgaccucggccuccccuccuggggcaaguacguccucauguccgccggcauccucaccgcccucaugcucaugaucuuccucaugaccugcugccgccgcaccaaccgcgccgaguccauccagcacucccucggcgagaccggccgcaaggucuccgucaccucccaguccggccgcgucaucuccuccugggaguccuacaaguccggcggcgagaccaagcucuga

SEQ ID NO: 127194 - RNA, 1575 nt, Artificial Sequence; identical to SEQ ID NO: 126863
  derived and/or modified CDS sequence (opt2) from glycoprotein__RABV__JN936698.1

SEQ ID NO: 127195 - RNA, 1575 nt, Artificial Sequence
  derived and/or modified CDS sequence (opt2) from glycoprotein__RABV__JN936699.1
auggucccccagguccuccucuucguccccuuccucgucuucuccuccugcuucggcaaguuccccaucuacaccauccccgacaagcucggccccuggucccccaucgacauccaccaccucuccugccccaacaaccucgucgucgaggacgagggcugcaccaaccucuccggcuucuccuacauggagcucaaggucggcuacaucuccgccaucaaggucaacggcuucaccugcaccggcgucgucaccgaggccgagaccuacaccaacuucgucggcuacgucaccaccaccuucaagcgcaagcacuuccgccccaugcccgacgccugccgcgccgccuacaacuggaagauggccggcgacccccgcuacgaggagucccuccacaaccccuaccccgacuaccacuggcuccgcaccgucaagaccaccaaggagucccucgucaucaucucccccuccgucgccgaccucgaccccuacgacaagucccuccacucccgcgucuuccccggcggcaagugcuccggcaucaccgucuccuccaccugcugcuccaccaaccacgacuacaccaucuggaugcccgagaacccccgccucggcaccuccugcgacaucuucaccaacucccgcggcaagcgcgccuccaagggcggcaagaccugcggcuucgucgacgagcgcggccucuacaagucccucaagggcgccugcaagcucaagcucugcggcguccucggccuccgccucauggacggcaccugggucgccauccagaccuccgacgagaucaaguggugcucccccgaccagcucgucaaccuccacgacuuccacuccgacgagaucgagcaccucgucgucgaggagcucgucaagaagcgcgaggagugccucgacgcccucgagaccaucaugaccaccaaguccgucuccuuccgccgccucucccaccuccgcaagcucguccccggcuucggcaaggccuacaccaucuucaacaagacccucauggaggccgacgcccacuacaaguccauccgcaccuggaacgagaucauccccuccaagggcugccuccgcgucggcggccgcugccacccccacgucaacggcgucuucuucaacggcaucauccucggccccgacggccacguccucauccccgagaugcaguccucccuccuccaccagcacauggagcuccucgaguccuccgucaucccccucaugcacccccucgccgaccccuccaccgucuucaaggacggcgacgaggccgaggacuucgucgagguccaccuccccgacguccacaagcagaucuccggcgucgaccucggccuccccaacuggggcaaguacguccucaucuccgccggcgcccucaccgcccucaugcucaugaucuuccucaugaccugcugccgcaaggccaaccgcgccgaguccauccagcacaaccccggcgagaccggccgcaaggucuccgucaccucccacaacggccgcgucaucuccuccugggaguccuacaaguccggcggcgagaccaagcucuga

SEQ ID NO: 127196 - RNA, 1575 nt, Artificial Sequence; identical to SEQ ID NO: 126562
  derived and/or modified CDS sequence (opt2) from glycoprotein__RABV__JN936700.1

SEQ ID NO: 127197 - RNA, 1575 nt, Artificial Sequence; identical to SEQ ID NO: 127195
  derived and/or modified CDS sequence (opt2) from glycoprotein__RABV__JN936701.1

SEQ ID NO: 127198 - RNA, 1575 nt, Artificial Sequence; identical to SEQ ID NO: 126562
  derived and/or modified CDS sequence (opt2) from glycoprotein__RABV__JN936702.1

SEQ ID NO: 127199 - RNA, 1575 nt, Artificial Sequence; identical to SEQ ID NO: 126562
  derived and/or modified CDS sequence (opt2) from glycoprotein__RABV__JN936703.1

SEQ ID NO: 127200 - RNA, 1575 nt, Artificial Sequence
  derived and/or modified CDS sequence (opt2) from glycoprotein__RABV__JN936704.1
auggucccccagguccuccucuucgucccccuccucgccuucuccuccugcuucggcaaguuccccaucuacaccauccccgacaagcucggccccuggucccccaucgacauccaccaccucuccugccccaacaaccucgucgucgaggacgagggcugcaccaaccucuccggcuucuccuacauggagcucaaggucggcuacaucuccgccaucaaggucaacggcuucaccugcaccggcgucgucaccgaggccgagaccuacaccaacuucgucggcuacgucaccaccaccuucaagcgcaagcacuuccgccccaugcccgacgccugccgcgccgccuacaacuggaagauggccggcgacccccgcuacgaggagucccuccacaaccccuaccccgacuaccacuggcuccgcaccgucaagaccaccaaggagucccucgucaucaucucccccuccgucgccgaccucgaccccuacgacaagucccuccacucccgcgucuuccccggcggcaagugcuccggcaucaccgucuccuccaccugcugcuccaccaaccacgacuacaccaucuggaugcccgagaacccccgccucggcaccuccugcgacaucuucaccaacucccgcggcaagcgcgccuccaagggcggcaagaccugcggcuucgucgacgagcgcggccucuacaagucccucaagggcgccugcaagcucaagcucugcggcguccucggccuccgccucauggacggcaccugggucgccauccagaccuccgacgagaucaaguggugcucccccgaccagcucgucaaccuccacgacuuccacuccgacgagaucgagcaccucgucgucgaggagcucgucaagaagcgcgaggagugccucgacgcccucgagaccaucaugaccaccaaguccgucuccuuccgccgccucucccaccuccgcaagcucguccccggcuucggcaaggccuacaccaucuucaacaagacccucauggaggccgacgcccacuacaaguccauccgcaccuggaacgagaucauccccuccaagggcugccuccgcgucggcggccgcugccacccccacgucaacggcgucuucuucaacggcaucauccucggccccgacggccacguccucauccccgagaugcaguccucccuccuccaccagcacauggagcuccucgaguccuccgucaucccccucaugcacccccucgccgaccccuccaccgucuucaaggacggcgacgaggccgaggacuucgucgagguccaccuccccgacguccacaagcagaucuccggcgucgaccucggccuccccaacuggggccgcuacguccucaucuccgccggcgcccucaccgcccucaugcucaugaucuuccucaugaccugcugccgcaaggccaaccgcgccgagcucauccagcacaaccccggcgagaccggccgcaaggucuccgucaccucccacaacggccgcgucaucuccuccugggaguccuacaaguccggcggcgagaccaagcucuga

SEQ ID NO: 127201 - RNA, 1575 nt, Artificial Sequence
  derived and/or modified CDS sequence (opt2) from glycoprotein__RABV__JN936705.1
augaucccccagguccuccucuucgucccccuccucgucuucuccuccugcuucggcaaguuccccaucuacaccauccccgacaagcucggccccuggucccccaucgacauccaccaccucuccugccccaacaacauggucgucgaggacgagggcugcaccaaccucuccggcuucuccuacauggagcucaaggucggcuacaucuccgccaucaaggucaacggcuucaccugcaccggcgucgucaccgaggccgagaccuacaccaacuucgucggcuacgucaccaccaccuucaagcgcaagcacuuccgccccaugcccgacgccugccgcgccgccuacaacuggaagauggccggcgacccccgcuacgaggagucccuccacaaccccuaccccgacuaccacuggcuccgcaccgucaagaccaccaaggagucccucgucaucaucucccccuccgucgccgaccucgaccccuacgacaagucccuccacucccgcgucuuccccggcggcaagugcuccggcaucaccgucuccuccaccugcugcuccaccaaccacgacuacaccaucuggaugcccgagaacccccgccucggcaccuccugcgacaucuucaccaacucccgcggcaagcgcgccuccaagggcggcaagaccugcggcuucgucgacgagcgcggccucuacaagucccucaagggcgccugcaagcucaagcucugcggcguccucggccuccgccucauggacggcaccugggucgccauccagaccuccgacgagaucaaguggugcucccccgaccagcucgucaaccuccacgacuuccacuccgacgagaucgagcaccucgucgucgaggagcucgucaagaagcgcgaggagugccucgacgcccucgagaccaucaugaccaccaaguccgucuccuuccgccgccucucccaccuccgcaagcucguccccggcuucggcaaggccuacaccaucuucaacaagacccucauggaggccgacgcccacuacaaguccauccgcaccuggaacgagaucauccccuccaagggcugccuccgcgucggcggccgcugccacccccacgucaacggcgucuucuucaacggcaucauccucggccccgacggccacguccucauccccgagaugcaguccucccuccuccaccagcacauggagcuccucgaguccuccgucaucccccucaugcacccccucgccgaccccuccaccgucuucaaggacggcgacgaggccgaggacuucgucgagguccaccuccccgacguccacaagcagaucuccggcgucgaccucggccuccccaacuggggcaaguacguccucaucuccgccugcgcccucaccgcccucaugcucaccaucuuccucaugaccugcugccgcaagaccucccgcgccgaguccauccagcacucccccggcgagaccggccgcaaggucuccgucaccucccacaacggccgcgucaucuccuccugggaguccuacaaguccggcggcgagaccaagcucuga

SEQ ID NO: 127202 - RNA, 1575 nt, Artificial Sequence
  derived and/or modified CDS sequence (opt2) from glycoprotein__RABV__JN936706.1
augaucccccagguccuccucuucguccccuuccucgucuucuccuccugcuucggcaaguuccccaucuacaccauccccgacaagcucggccccuggucccccaucgacauccaccaccucuccugccccaacaaccucgucgucgaggacgagggcugcaccaaccucuccggcuucuccuacauggagcucaaggucggcuacaucuccgccaucaaggucaacggcuucaccugcaccggcgucgucaccgaggccgagaccuacaccaacuucgucggcuacgucaccaccaccuucaagcgcaagcacuuccgccccaugcccgacgccugccgcgccgccuacaacuggaagauggccggcgacccccgcuacgaggagucccuccacaaccccuaccccgacuaccacuggcuccgcaccgucaagaccaccaaggagucccucgucaucaucucccccuccgucgccgaccucgaccccuacgacaagucccuccacucccgcgucuuccccggcggcaagugcuccggcaucaccgucuccuccaccugcugcuccaccaaccacgacuacaccaucuggaugcccgagaacccccgccucggcaccuccugcgacaucuucaccaacucccgcggcaagcgcgccuccaagggcggcaagaccugcggcuucgucgacgagcgcggccucuacaagucccucaagggcgccugcaagcucaagcucugcggcguccucggccuccgccucauggacggcaccugggucgccauccagaccuccgacgagaucaaguggugcucccccgaccagcucgucaaccuccacgacuuccacuccgacgagaucgagcaccucgucgucgaggagcucgucaagaagcgcgaggagugccucgacgcccucgagaccaucaugaccaccaaguccgucuccuuccgccgccucucccaccuccgcaagcucguccccggcuucggcaaggccuacaccaucuucaacaagacccucauggaggccgacgcccacuacaaguccauccgcaccuggaacgagaucauccccuccaagggcugccuccgcgucggcggccgcugccacccccacgucaacggcgucuucuucaacggcaucauccucggccccgacggccacguccucauccccgagaugcaguccucccuccuccaccagcacauggagcuccucgaguccuccgucaucccccucaugcacccccucgccgaccccuccaccgucuucaaggacggcgacgaggccgaggacuucgucgagguccaccuccccgacguccacaagcagaucuccggcgucgaccucggccuccccaacuggggcaaguacguccucaucuccgccggcgcccucaccgcccucaugcucaugaccuuccucaugaccugcugccgcaagaccaaccgcgccgaguccauccagcacucccccggcgagaccggccgcaaggucuccgucaccucccacaacggccgcgucaucuccuccugggaguccuacaaguccggcggcgagaccaagcucuga

SEQ ID NO: 127203 - RNA, 1575 nt, Artificial Sequence
  derived and/or modified CDS sequence (opt2) from glycoprotein__RABV__JN936707.1
auggucccccaggccuuccucuucgucccccuccucgccgucccccucugcuucggcaaguuccccaucuacaccauccccgacaagcucggccccuggucccccaucgacauccaccaccucuccugccccaacaaccucgucgucgaggacgagggcugcaccaaccucuccggcuucuccuacauggagcucaaggucggcuacaucuccgccaucaaggucaacggcuucaccugcaccggcgucgucaccgaggccgagaccuacaccaacuucgucggcuacgucaccaccaccuucaagcgcaagcacuuccgccccacccccgacgccugccgcuccgccuacaacuggaagauggccggcgacccccgcuacgaggagucccuccacaaccccuaccccgacuaccacuggcuccgcaccgucaagaccaccaaggaguccuucgucaucaucucccccuccgucgccgaccucgaccccuacgacaagucccuccacucccgcgucuucccccgcggcaagugcuccggcaucaccgucuccuccaccuacugcuccaccaaccacgacuacaccaucuggaugcccgagaacccccgccucggcaccuccugcgacaucuucaccaacucccgcggcaagcgcgccuccaagggcuccaagaccugcggcuucgucgacgagcgcggccucuacaagucccucaagggcgccugcaagcucaagcucugcggcguccucggccuccgccucauggacggcaccugggucgccauccagaccuccgacgagaccaaguggugcccccccgaccagcucgucaaccuccacgacuuccacuccgacgagaucgagcaccucgucgucgaggagcucgucaagaagcgcgaggagugccucgacgcccucgaguccaucaugaccaccaaguccgucuccuuccgccgccucucccaccuccgcaagcucguccccggcuucggcaaggccuacaccaucuucaacaagacccucauggaggccgacgcccacuacaaguccguccgcaccuggaacgagaucauccccuccaagggcugccuccgcgucggcggccgcugccacccccacgucaacggcgucuucuucaacggcaucauccucggccccgacggccacguccucauccccgagaugcaguccucccuccuccagcagcacauggagcuccucgaguccuccgucaucccccucaugcacccccucgccgaccccuccaccgucuucaaggacggcgacgaggccgaggacuucgucgagguccaccuccccgacguccacaagcaggucuccggcgucgaccucggccuccccuccuggggcaaguacguccucauguccgccggcauccucaccgcccucaugcucaccaucuuccucaugaccugcugccgccgcaccaaccgcgccgaguccauccagcacucccucggcgagaccggccgcaaggucuccgucaccucccaguccggccgcgucaucuccuccugggaguccuacaaguccggcggcgagaccaagcucuga

SEQ ID NO: 127204 - RNA, 1575 nt, Artificial Sequence; identical to SEQ ID NO: 126863
  derived and/or modified CDS sequence (opt2) from glycoprotein__RABV__JN936708.1

SEQ ID NO: 127205 - RNA, 1575 nt, Artificial Sequence
  derived and/or modified CDS sequence (opt2) from glycoprotein__RABV__JN936709.1
augaucccccagguccuccucuucguccccuuccucgucuucucccucugcuucggcaaguuccccaucuacaccauccccgacaagcucggccccuggucccccaucgacauccaccaccucuccugccccaacaaccucgucgucgaggacgagggcugcaccaaccucuccggcuucuccuacauggagcucaaggucggcuacaucuccgccaucaaggucaacggcuucaccugcaccggcgucgucaccgaggccgagaccuacaccaacuucgucggcuacgucaccaccaccuucaagcgcaagcacuuccgccccaugcccgacgccugccgcgccgccuacaacuggaagauggccggcgacccccgcuacgaggagucccuccacaaccccuaccccgacuaccacuggcuccgcaccgucaagaccaccaaggagucccucgucaucaucucccccuccgucgccgaccucgaccccuacgacaagucccuccacucccgcgucuuccccggcggcaagugcuccggcaucaccgucuccuccaccugcugcuccaccaaccacgacuacaccaucuggaugcccgagaacccccgccucggcaccuccugcgacaucuucaccaacucccgcggcaagcgcgccuccaagggcggcaagaccugcggcuucgucgacgagcgcggccucuacaagucccucaagggcgccugcaagcucaagcucugcggcguccucggccuccgccucauggacggcaccugggucgccauccagaccuccgacgagaucaaguggugcucccccgaccagcucgucaaccuccacgacuuccacuccgacgagaucgagcaccucgucgucgaggagcucgucaagaagcgcgaggagugccucgacgcccucgagaccaucaugaccaccaaguccgucuccuuccgccgccucucccaccuccgcaagcucguccccggcuucggcaaggccuacaccaucuucaacaagacccucauggaggccgacgcccacuacaaguccauccgcaccuggaacgagaucauccccuccaagggcugccuccgcgucggcggccgcugccacccccacgucaacggcgucuucuucaacggcaucauccucggccccgacggccacguccucauccccgagaugcaguccucccuccuccaccagcacauggagcuccucgaguccuccgucaucccccucaugcacccccucgccgaccccuccaccgucuucaaggacggcgacgaggccgaggacuucgucgagguccaccuccccgacguccacaagcagaucuccggcgucgaccucggccuccccaacuggggcaaguacguccucaucuccgccggcgcccucaccgcccucaugcucaugaucuuccucaugaccugcugccgcaagaccaaccgcgccgaguccauccagcacucccccggcgagaccggccgcaaggucuccgucaccucccacaacggccgcgucaucuccuccugggaguccuacaaguccggcggcgagaccaagcucuga

SEQ ID NO: 127206 - RNA, 1575 nt, Artificial Sequence; identical to SEQ ID NO: 126863
  derived and/or modified CDS sequence (opt2) from glycoprotein__RABV__JN936710.1

SEQ ID NO: 127207 - RNA, 1575 nt, Artificial Sequence; identical to SEQ ID NO: 127186
  derived and/or modified CDS sequence (opt2) from glycoprotein__RABV__JN936711.1

SEQ ID NO: 127208 - RNA, 1575 nt, Artificial Sequence
  derived and/or modified CDS sequence (opt2) from glycoprotein__RABV__JN936712.1
augaucccccagguccuccucuucgucccccuccucgucuucucccucugcuucggcaaguuccccaucuacaccauccccgacaagcucggccccuggucccccaucgacauccaccaccucuccugccccaacaaccucgucgucgaggacgagggcugcaccaaccucuccggcuucuccuacauggagcucaaggucggcuacaucuccgccaucaaggucaacggcuucaccugcaccggcgucgucaccgaggccgagaccuacaccaacuucgucggcuacgucaccaccaccuucaagcgcaagcacuuccgccccaugcccgacgccugccgcgccgccuacaacuggaagauggccggcgacccccgcuacgaggagucccuccacaaccccuaccccgacuaccacuggcuccgcaccgucaagaccaccaaggagucccucgucaucaucucccccuccgucgccgaccucgaccccuacgacaagucccuccacucccgcgucuuccccggcggcaagugcuccggcaucaccgucuccuccaccugcugcuccaccaaccacgacuacaccaucuggaugcccgagaacccccgccucggcaccuccugcgacaucuucaccaacucccgcggcaagcgcgccuccaagggcggcaagaccugcggcuucgucgacgagcgcggccucuacaagucccucaagggcgccugcaagcucaagcucugcggcguccucggccuccgccucauggacggcaccugggucgccauccagaccuccgacgagaucaaguggugcucccccgaccagcucgucaaccuccacgacuuccacuccgacgagaucgagcaccucgucgucgaggagcucgucaagaagcgcgaggagugccucgacgcccucgagaccaucaugaccaccaaguccgucuccuuccgccgccucucccaccuccgcaagcucguccccggcuucggcaaggccuacaccaucuucaacaagacccucauggaggccgacgcccacuacaaguccauccgcaccuggaacgagaucauccccuccaagggcugccuccgcgucggcggccgcugccacccccacgucaacggcgucuucuucaacggcaucauccucggccccgacggccacguccucauccccgagaugcaguccucccuccuccaccagcacauggagcuccucgaguccuccgucaucccccucaugcacccccucgccgaccccuccaccgucuucaaggacggcgacgaggccgaggacuucgucgagguccaccuccccgacguccacaagcagaucuccggcgucgaccucggccuccccaacuggggcaaguacguccucaucuccgccggcgcccucaccgcccucaugcucaugaucuuccucaugaccugcugccgcaagaccaaccgcgccgaguccauccagcacucccccggcgagaccggccgcaaggucuccgucaccucccacaacggccgcgucaucuccuccugggaguccuacaaguccggcggcgagaccaagcucuga

SEQ ID NO: 127209 - RNA, 1575 nt, Artificial Sequence
  derived and/or modified CDS sequence (opt2) from glycoprotein__RABV__JN936713.1
auggucccccaggccguccucuucgucccccuccucgccgucccccucugcuucggcaaguuccccaucuacaccauccccgacaagcucggccccuggucccccaucgacauccaccaccucuccugccccaacaaccucgucgucgaggacgagggcugcaccaaccucuccggcuucuccuacauggagcucaaggucggcuacaucuccgccaucaaggucaacggcuucaccugcaccggcgucgucaccgaggccgagaccuacaccaacuucgucggcuacgucaccaccaccuucaagcgcaagcacuuccgccccacccccgacgccugccgcuccgccuacaacuggaagauggccggcgacccccgcuacgaggagucccuccacaaccccuaccccgacuaccacuggcuccgcaccguccgcaccaccaaggaguccuucgucaucaucucccccuccgucgccgaccucgaccccuacgacaagucccuccacucccgcgucuucccccgcggcaagugcuccggcaucaccgucuccuccaccuacugcuccaccaaccacgacuacaccaucuggaugcccgagaacccccgccucggcaccuccugcgacaucuucaccaacucccgcggcaagcgcgccuccaagggcuccaagaccugcggcuucgucgacgagcgcggccucuacaagucccucaagggcgccugcaagcucaagcucugcggcguccucggccuccgccucauggacggcaccugggucgccauccagaccuccgacgagaccaaguggugcccccccgaccagcucgucaaccuccacgacuuccacuccgacgagaucgagcaccucgucgucgaggagcucgucaagaagcgcgaggagugccucgacgcccucgaguccaucaugaccaccaaguccgucuccuuccgccgccucucccaccuccgcaagcucguccccggcuucggcaaggccuacaccaucuucaacaagacccucauggaggccgacgcccacuacaaguccguccgcaccuggaacgagaucauccccuccaagggcugccuccgcgucggcggccgcugccacccccacgucaacggcgucuucuucaacggcaucauccucggccccgacggccacguccucauccccgagaugcaguccucccuccuccagcagcacauggagcuccucgaguccuccgucaucccccucaugcacccccucgccgaccccuccaccgucuucaaggacggcgacgaggccgaggacuucgucgagguccaccuccccgacguccacaagcaggucuccggcgucgaccucggccuccccuccuggggcaaguacguccucauguccgccggcauccucaccgcccucaugcucaugaucuuccucaugaccugcugccgccgcaccaaccgcgccgaguccauccagcacucccucggcgagaccggccgcaaggucuccgucaccucccagaacggccgcgucaucuccuccugggaguccuacaaguccggcggcgagaccaagcucuga

SEQ ID NO: 127210 - RNA, 1575 nt, Artificial Sequence; identical to SEQ ID NO: 126875
  derived and/or modified CDS sequence (opt2) from glycoprotein__RABV__JN936714.1

SEQ ID NO: 127211 - RNA, 1575 nt, Artificial Sequence
  derived and/or modified CDS sequence (opt2) from glycoprotein__RABV__JN936715.1
auggucccccaggcccuccucuucgucccccuccucgccgucccccucugcuucggcaaguuccccaucuacaccauccccgacaagcucggccccuggucccccaucgacauccaccaccucuccugccccaacaaccucgucgucgaggacgagggcugcaccaaccucuccggcuucuccuacauggagcucaaggucggcuacaucuccgccaucaaggucaacggcuucaccugcaccggcgucgucaccgaggccgagaccuacaccaacuucgucggcuacgucaccaccaccuucaagcgcaagcacuuccgccccacccccgacgccugccgcuccgccuacaacuggaagauggccggcgacccccgcuacgaggagucccuccacaaccccuaccccgacuaccacuggcuccgcaccgucaagaccaccaaggaguccuucgucaucaucucccccuccgucgccgaccucgaccccuacgacaagucccuccacucccgcgucuucccccgcggcaagugcuccggcaucaccgucuccuccaccuacugcuccaccaaccacgacuacaccaucuggaugcccgagaacccccgccucggcaccuccugcgacaucuucaccaacucccgcggcaagcgcgccuccaagggcuccaagaccugcggcuucgucgacgagcgcggccucuacaagucccucaagggcgccugcaagcucaagcucugcggcguccucggccuccgccucauggacggcaccugggucgccauccagaccuccgacgagaccaaguggugcccccccgaccagcucgucaaccuccacgacuuccacuccgacgagaucgagcaccucgucgucgaggagcucgucaagaagcgcgaggagugccucgacgcccucgaguccaucaugaccaccaaguccgucuccuuccgccgccucucccaccuccgcaagcucguccccggcuucggcaaggccuacaccaucuucaacaagacccucauggaggccgacgcccacuacaaguccguccgcaccuggaacgagaucauccccuccaagggcugccuccgcgucggcggccgcugccacccccacgucaacggcgucuucuucaacggcaucauccucggccccgacggccacguccucauccccgagaugcaguccucccuccuccagcagcacauggagcuccucgaguccuccgucaucccccucaugcacccccucgccgaccccuccaccgucuucaaggacggcgacgaggccgaggacuucgucgagguccaccuccccgacguccacaagcaggucuccggcgucgaccucggccuccccuccuggggcaaguacguccucauguccgccggcauccucaccgcccucaugcucaugaucuuccucaugaccugcugccgccgcaccaaccgcgccgaguccauccagcacucccucggcgagaccggccgcaaggucuccgucaccucccagaacggccgcgucaucuccuccugggaguccuacaaguccggcggcgagaccaagcucuga

SEQ ID NO: 127212 - RNA, 1575 nt, Artificial Sequence
  derived and/or modified CDS sequence (opt2) from glycoprotein__RABV__JN936716.1
augaucccccagguccuccuccucgucccccuccucgucuucuccuccugcuucggcaaguuccccaucuacaccauccccgacaagcucggccccuggucccccaucgacauccaccaccucuccugccccaacaaccucgucgucgaggacgagggcugcaccaaccucuccggcuucuccuacauggagcucaaggucggcuacaucuccgccaucaaggucaacggcuucaccugcaccggcgucgucaccgaggccgagaccuacaccaacuucgucggcuacgucaccaccaccuucaagcgcaagcacuuccgccccaugcccgacgccugccgcgccgccuacaacuggaagauggccggcgacccccgcuacgaggagucccuccacaaccccuaccccgacuaccacuggcuccgcaccgucaagaccaccaaggagucccucgucaucaucucccccuccgucgccgaccucgaccccuacgacaagucccuccacucccgcgucuuccccggcggcaagugcuccggcaucaccgucuccuccaccugcugcuccaccaaccacgacuacaccaucuggaugcccgagaacccccgccucggcaccuccugcgacaucuucaccaacucccgcggcaagcgcgccuccaagggcggcaagaccugcggcuucgucgacgagcgcggccucuacaagucccucaagggcgccugcaagcucaagcucugcggcguccucggccuccgccucauggacggcaccugggucgccauccagaccuccgacgagaucaaguggugcucccccgaccagcucgucaaccuccacgacuuccacuccgacgagaucgagcaccucgucgucgaggagcucgucaagaagcgcgaggagugccucgacgcccucgagaccaucaugaccaccaaguccgucuccuuccgccgccucucccaccuccgcaagcucguccccggcuucggcaaggccuacaccaucuucaacaagacccucauggaggccgacgcccacuacaaguccauccgcaccuggaacgagaucauccccuccaagggcugccuccgcgucggcggccgcugccacccccacgucaacggcgucuucuucaacggcaucauccucggccccgacggccacguccucauccccgagaugcaguccucccuccuccaccagcacauggagcuccucgaguccuccgucaucccccucaugcacccccucgccgaccccuccaccgucuucaaggacggcgacgaggccgaggacuucgucgagguccaccuccccgacguccacaagcagaucuccggcgucgaccucggccuccccaacuggggcaaguacguccucaucuccgccggcgcccucaccgcccucauguccaugaucuuccucaugaccugcugccgcaagaccaaccgcgccgaguccauccagcacucccccggcgagaccggccgcaaggucuccgucaccucccacaacggccgcgucaucuccuccugggaguccuacaaguccggcggcgagaccaagcucuga

SEQ ID NO: 127213 - RNA, 1575 nt, Artificial Sequence
  derived and/or modified CDS sequence (opt2) from glycoprotein__RABV__JN936717.1
augaucccccaggcccuccuccucgucccccuccucgucuucuccuccugcuucggcaaguuccccaucuacaccauccccgacaagcucggccccuggucccccaucgacauccaccaccucuccugccccaacaaccucgucgucgaggacgagggcugcaccaaccucuccggcuucuccuacauggagcucaaggucggcuacaucuccgccaucaaggucaacggcuucaccugcaccggcgucgucaccgaggccgagaccuacaccaacuucgucggcuacgucaccaccaccuucaagcgcaagcacuuccgccccaugcccgacgccugccgcgccgccuacaacuggaagauggccggcgacccccgcuacgaggagucccuccacaaccccuaccccgacuaccacuggcuccgcaccgucaagaccaccaaggagucccucgucaucaucucccccuccgucgccgaccucgaccccuacgacaagucccuccacucccgcgucuuccccggcggcaagugcuccggcaucaccgucuccuccaccugcugcuccaccaaccacgacuacaccaucuggaugcccgagaacccccgccucggcaccuccugcgacaucuucaccaacucccgcggcaagcgcgccuccaagggcggcaagaccugcggcuucgucgacgagcgcggccucuacaagucccucaagggcgccugcaagcucaagcucugcggcguccucggccuccgccucauggacggcaccugggucgccauccagaccuccgacgagaucaaguggugcucccccgaccagcucgucaaccuccacgacuuccacuccgacgagaucgagcaccucgucgucgaggagcucgucaagaagcgcgaggagugccucgacgcccucgagaccaucaugaccaccaaguccgucuccuuccgccgccucucccaccuccgcaagcucguccccggcuucggcaaggccuacaccaucuucaacaagacccucauggaggccgacgcccacuacaaguccauccgcaccuggaacgagaucauccccuccaagggcugccuccgcgucggcggccgcugccacccccacgucaacggcgucuucuucaacggcaucauccucggccccgacggccacguccucauccccgagaugcaguccucccuccuccaccagcacauggagcuccucgaguccuccgucaucccccucaugcacccccucgccgaccccuccaccgucuucaaggacggcgacgaggccgaggacuucgucgagguccaccuccccgacguccacaagcagaucuccggcgucgaccucggccuccccaacuggggcaaguacguccucaucuccgccggcgcccucaccgcccucauguccaugaucuuccucaugaccugcugccgcaagaccaaccgcgccgaguccauccagcacucccccggcgagaccggccgcaaggucuccgucaccucccacaacggccgcgucaucuccuccugggaguccuacaaguccggcggcgagaccaagcucuga

SEQ ID NO: 127214 - RNA, 1575 nt, Artificial Sequence
  derived and/or modified CDS sequence (opt2) from glycoprotein__RABV__JN936718.1
augaucccccagguccuccuccucgucccccuccucgucuucuccuccugcuucggcaaguuccccaucuacaccauccccgacaagcucggccccuggucccccaucgacauccaccaccucuccugccccaacaaccucgucgucgaggacgagggcugcaccaaccucuccggcuucuccuacauggagcucaaggucggcuacaucuccgccaucaaggucaacggcuucaccugcaccggcgucgucaccgaggccgagaccuacaccaacuucgucggcuacgucaccaccaccuucaagcgcaagcacuuccgccccaugcccgacgccugccgcgccgccuacaacuggaagauggccggcgacccccgcuacgaggagucccuccacaaccccuaccccgacuaccacuggcuccgcaccgucaagaccaccaaggagucccucgucaucaucucccccuccgucgccgaccucgaccccuacgacaagucccuccacucccgcgucuuccccggcggcaagugcuccggcaucaccgucuccuccaccugcugcuccaccaaccacgacuacaccaucuggaugcccgagaacccccgccucggcaccuccugcgacaucuucaccaacucccgcggcaagcgcgccuccaagggcggccagaccugcggcuucgucgacgagcgcggccucuacaagucccucaagggcgccugcaagcucaagcucugcggcguccucggccuccgccucauggacggcaccugggucgccauccagaccuccgacgagaucaaguggugcucccccgaccagcucgucaaccuccacgacuuccacuccgacgagaucgagcaccucgucgucgaggagcucgucaagaagcgcgaggagugccucgacgcccucgagaccaucaugaccaccaaguccgucuccuuccgccgccucucccaccuccgcaagcucguccccggcuucggcaaggccuacaccaucuucaacaagacccucauggaggccgacgcccacuacaaguccauccgcaccuggaacgagaucauccccuccaagggcugccuccgcgucggcggccgcugccacccccacgucaacggcgucuucuucaacggcaucauccucggccccgacggccacguccucauccccgagaugcaguccucccuccuccaccagcacauggagcuccucgaguccuccgucaucccccucaugcacccccucgccgaccccuccaccgucuucaaggacggcgacgaggccgaggacuucgucgagguccaccuccccgacguccacaagcagaucuccggcgucgaccucggccuccccaacuggggcaaguacguccucaucuccgccggcgcccucaccgcccucauguccaugaucuuccucaugaccugcugccgcaagaccaaccgcgccgaguccauccagcacucccccggcgagaccggccgcaaggucuccgucaccucccacaacggccgcgucaucuccuccugggaguccuacaaguccggcggcgagaccaagcucuga

SEQ ID NO: 127215 - RNA, 1575 nt, Artificial Sequence
  derived and/or modified CDS sequence (opt2) from glycoprotein__RABV__JN936719.1
augaucccccaggcccuccucuucgucccccuccucgccgucccccucugcuucggcaaguuccccaucuacaccauccccgacaagcucggccccuggucccccaucgacauccaccaccucuccugccccaacaaccucgucgucgaggacgagggcugcaccaaccucuccggcuucuccuacauggagcucaaggucggcuacaucuccgccaucaaggucaacggcuucaccugcaccggcgucgucaccgaggccgagaccuacaccaacuucgucggcuacgucaccaccaccuucaagcgcaagcacuuccgccccacccccgacgccugccgcuccgccuacaacuggaagauggccggcgacccccgcuacgaggagucccuccacaaccccuaccccgacuaccacuggcuccgcaccgucaagaccaccaaggaguccuucgucaucaucucccccuccgucgccgaccucgaccccuacgacaagucccuccacucccgcgucuucccccgcggcaagugcuccggcaucaccgucuccuccaccuacugcuccaccaaccacgacuacaccaucuggaugcccgagaacccccgccucggcaccuccugcgacaucuucaccaacucccgcggcaagcgcgccuccaagggcuccaagaccugcggcuucgucgacgagcgcggccucuacaagucccucaagggcgccugcaagcucaagcucugcggcguccucggccuccgccucauggacggcaccugggucgccauccagaccuccgacgagaccaaguggugcccccccgaccagcucgucaaccuccacgacuuccacuccgacgagaucgagcaccucgucgucgaggagcucgucaagaagcgcgaggagugccucgacgcccucgaguccaucaugaccaccaaguccgucuccuuccgccgccucucccaccuccgcaagcucguccccggcuucggcaaggccuacaccaucuucaacaagacccucauggaggccgacgcccacuacaaguccauccgcaccuggaacgagaucauccccuccaagggcugccuccgcgucggcggccgcugccacccccacgucaacggcgucuucuucaacggcaucauccucggccccgacggccacguccucauccccgagaugcaguccucccuccuccaccagcacauggagcuccucgaguccuccgucaucccccucaugcacccccucgccgaccccuccaccgucuucaaggacggcgacgaggccgaggacuucgucgagguccaccuccccgacguccacaagcagaucuccggcgucgaccucggccuccccuccuggggcaaguacguccucauguccgccggcgcccucaccgcccucaugcucaugaucuuccucaugaccugcugccgccgcaccaaccgcgccgaguccauccagcacucccucggcgagaccggccgcaaggucuccgucaccucccagaacggccgcgucaucuccuccugggaguccuacaaguccggcggcgagaccaagcucuga

SEQ ID NO: 127216 - RNA, 1575 nt, Artificial Sequence
  derived and/or modified CDS sequence (opt2) from glycoprotein__RABV__JN936720.1
augaucccccaggcccuccucuucgucccccuccucgucuucccccucugcuucggcaaguuccccaucuacaccauccccgacaagcucggccccuggucccccaucgacauccaccaccucuccugccccaacaaccucgucgucgaggacgagggcugcaccaaccucuccggcuucuccuacauggagcucaaggucggcuacaucuccgccaucaaggucaacggcuucaccugcaccggcgucgucaccgaggccgagaccuacaccaacuucgucggcuacgucaccaccaccuucaagcgcaagcacuuccgccccacccccgacgccugccgcuccgccuacaacuggaagauggccggcgacccccgcuacgaggagucccuccacaaccccuaccccgacuaccacuggcuccgcaccgucaagaccaccaaggaguccgucgucaucaucucccccuccgucgccgaccucgaccccuacgacaagucccuccacucccgcgucuucccccgcggcaagugcuccggcaucaccgucuccuccgccuacugcuccaccaaccacgacuacaccaucuggaugcccgagaacccccgccucggcaccuccugcgacaucuucaccaacucccgcggcaagcgcgccuccaagggcuccaagaccugcggcuucgucgacgagcgcggccucuacaagucccucaagggcgccugcaagcucaagcucugcggcguccucggccuccgccucauggacggcaccugggucgccauccagaccuccaacgagaccaaguggugcccccccgaccagcucgucaaccuccacgacuuccacuccgacgagaucgagcaccucgucgucgaggagcucgucgagaagcgcgaggagugccucgacgcccucgaguccaucaugaccaccaaguccgucuccuuccgccgccucucccaccuccgcaagcucguccccggcuucggcaaggccuacaccaucuucaacaagacccucauggaggccgacgcccacuacaaguccguccgcaccuggaacgagaucauccccuccaagggcugccuccgcgucggcggccgcugccacccccacgucaacggcgucuucuucaacggcaucauccucggccccgacggccacguccucauccccgagaugcaguccucccuccuccagcagcacauggagcuccucgaguccuccgucaucccccucaugcacccccucgccgaccccuccaccgucuucaaggacggcgacgaggccgaggacuucgucgagguccaccuccccgacguccacaagcaggucuccggcgucgaccucggccuccccuccuggggcaaguacguccucauguccgccggcauccucaccgcccucaugcucaugaucuuccucaugaccugcugccgccgcaccaaccgcgccgaguccauccagcacucccucggcgagaccggccgcaaggucuccgucaccucccagaacggccgcgucaucuccuccugggaguccuacaaguccggcggcgagaccaagcucuga

SEQ ID NO: 127217 - RNA, 1575 nt, Artificial Sequence
  derived and/or modified CDS sequence (opt2) from glycoprotein__RABV__JN936721.1
augaucccccaggcccuccucuucgucccccuccucgucuucccccucugcuucggcaaguuccccaucuacaccauccccgacaagcucggccccuggucccccaucgacauccaccaccucuccugccccaacaaccucgucgucgaggacgagggcugcaccaaccucuccggcuucuccuacauggagcucaaggucggcuacaucuccgccaucaaggucaacggcuucaccugcaccggcgucgucaccgaggccgagaccuacaccaacuucgucggcuacgucaccaccaccuucaagcgcaagcacuuccgccccacccccgacgccugccgcuccgccuacaacuggaagauggccggcgacccccgcuacgaggagucccuccacaaccccuaccccgacuaccacuggcuccgcaccgucaagaccaccaaggaguccgucgucaucaucucccccuccgucgccgaccucgaccccuacgacaagucccuccacucccgcgucuucccccgcggcaagugcuccggcaucaccgucuccuccgccuacugcuccaccaaccacgacuacaccaucuggaugcccgagaacccccgccucggcaccuccugcgacaucuucaccaacucccgcggcaagcgcgccuccaagggcuccaagaccugcggcuucgucgacgagcgcggccucuacaagucccucaagggcgccugcaagcucaagcucugcggcguccucggccuccgccucauggacggcaccugggucgccauccagaccuccaacgagaccaaguggugcccccccgaccagcucgucaaccuccacgacuuccacuccgacgagaucgagcaccucgucgucgaggagcucgucgagaagcgcgaggagugccucgacgcccucgagaccaucaugaccaccaaguccgucuccuuccgccgccucucccaccuccgcaagcucguccccggcuucggcaaggccuacaccaucuucaacaagacccucauggaggccgacgcccacuacaaguccauccgcaccuggaacgagaucauccccuccaagggcugccuccgcgucggcggccgcugccacccccacgucaacggcgucuucuucaacggcaucauccucggccccgacggccacguccucauccccgagaugcaguccucccuccuccaccagcacauggagcuccucgaguccuccgucaucccccucaugcacccccucgccgaccccuccaccgucuucaaggacggcgacgaggccgaggacuucgucgagguccaccuccccgacguccacaagcagaucuccggcgucgaccucggccuccccaacuggggcaaguacguccucaucuccgccggcgcccucaccgcccucauguccaugaucuuccucaugaccugcugccgcaagaccaaccgcgccgaguccauccagcacucccccggcgagaccggccgcaaggucuccgucaccucccacaacggccgcgucaucuccuccugggaguccuacaaguccggcggcgagaccaagcucuga

SEQ ID NO: 127218 - RNA, 1575 nt, Artificial Sequence
  derived and/or modified CDS sequence (opt2) from glycoprotein__RABV__JN936722.1
augaucccccaggcccuccucuucgucccccuccucgucuucccccucugcuucggcaaguuccccaucuacaccauccccgacaagcucggccccuggucccccaucgacauccaccaccucuccugccccaacaaccucgucgucgaggacgagggcugcaccaaccucuccggcuucuccuacauggagcucaaggucggcuacaucuccgccaucaaggucaacggcuucaccugcaccggcgucgucaccgaggccgagaccuacaccaacuucgucggcuacgucaccaccaccuucaagcgcaagcacuuccgccccacccccgacgccugccgcuccgccuacaacuggaagauggccggcgacccccgcuacgaggagucccuccacaaccccuaccccgacuaccacuggcuccgcaccgucaagaccaccaaggaguccgucgucaucaucucccccuccgucgccgaccucgaccccuacgacaagucccuccacucccgcgucuucccccgcggcaagugcuccggcaucaccgucuccuccgccuacugcuccaccaaccacgacuacaccaucuggaugcccgagaacccccgccucggcaccuccugcgacaucuucaccaacucccgcggcaagcgcgccuccaagggcuccaagaccugcggcuucgucgacgagcgcggccucuacaagucccucaagggcgccugcaagcucaagcucugcggcguccucggccuccgccucauggacggcaccugggucgccauccagaccuccaacgagaccaaguggugcccccccgaccagcucgucaaccuccacgacuuccacuccgacgagaucgagcaccucgucgucgaggagcucgucgagaagcgcgaggagugccucgacgcccucgaguccaucaugaccaccaaguccgucuccuuccgccgccucucccaccuccgcaagcucguccccggcuucggcaaggccuacaccaucuucaacaagacccucauggaggccgacgcccacuacaaguccauccgcaccuggaacgagaucauccccuccaagggcugccuccgcgucggcggccgcugccacccccacgucaacggcgucuucuucaacggcaucauccucggccccgacggccacguccucauccccgagaugcaguccucccuccuccaccagcacauggagcuccucgaguccuccgucaucccccucaugcacccccucgccgaccccuccaccgucuucaaggacggcgacgaggccgaggacuucgucgagguccaccuccccgacguccacaagcagaucuccggcgucgaccucggccuccccaacuggggcaaguacguccucaucuccgccggcgcccucaccgcccucauguccaugaucuuccucaugaccugcugccgcaagaccaaccgcgccgaguccauccagcacucccccggcgagaccggccgcaaggucuccgucaccucccacaacggccgcgucaucuccuccugggaguccuacaaguccggcggcgagaccaagcucuga

SEQ ID NO: 127219 - RNA, 1575 nt, Artificial Sequence
  derived and/or modified CDS sequence (opt2) from glycoprotein__RABV__JN936723.1
augaucccccaggcccuccuccucgucccccuccucgccuucccccucugcuucggcaaguuccccaucuacaccauccccgacaagcucggccccuggucccccaucgacauccaccaccucuccugccccaacaaccucgucgucgaggacgagggcugcaccaaccucuccggcuucuccuacauggagcucaaggucggcuacaucuccgccaucaaggucaacggcuucaccugcaccggcgucgucaccgaggccgagaccuacaccaacuucgucggcuacgucaccaccaccuucaagcgcaagcacuuccgccccacccccgacgccugccgcuccgccuacaacuggaagauggccggcgacccccgcuacgaggagucccuccacaaccccuaccccgacuaccacuggcuccgcaccgucaagaccaccaaggagucccucgucaucaucucccccuccgucgccgaccucgaccccuacgacaagucccuccacucccgcgucuucccccgcggcaagugcuccggcaucaccgucuccuccaccugcugcuccaccaaccacgacuacaccaucuggaugcccgagaacccccgccucggcaccuccugcgacaucuucaccaacucccgcggcaagcgcgccuccaagggcuccaagaccugcggcuucgucgacgagcgcggccucuacaagucccucaagggcgccugcaagcucaagcucugcggcguccucggccuccgccucauggacggcaccugggucgccauccagaccuccgacgagaucaaguggugcccccccgaccagcucgucaaccuccacgacuuccacuccgacgagaucgagcaccucgucgucgaggagcucgucaagaagcgcgaggagugccucgacgcccucgagaccaucaugaccaccaaguccgucuccuuccgccgccucucccaccuccgcaagcucguccccggcuucggcaaggccuacaccaucuucaacaagacccucauggaggccgacgcccacuacaaguccauccgcaccuggaacgagaucauccccuccaagggcugccuccgcgucggcggccgcugccacccccacgucaacggcgucuucuucaacggcaucauccucggccccgacggccacguccucauccccgagaugcaguccucccuccuccaccagcacauggagcuccucgaguccuccgucaucccccucaugcacccccucgccgaccccuccaccgucuucaaggacggcgacgaggccgaggacuucgucgagguccaccuccccgacguccacaagcagaucuccggcgucgaccucggccuccccaacuggggcaaguacguccucaucuccgccggcgcccucaccgcccucauguccaugaucuuccucaugaccugcugccgcaagaccaaccgcgccgaguccauccagcacucccccggcgagaccggccgcaaggucuccgucaccucccacaacggccgcgucaucuccuccugggaguccuacaaguccggcggcgagaccaagcucuga

SEQ ID NO: 127220 - RNA, 1575 nt, Artificial Sequence
  derived and/or modified CDS sequence (opt2) from glycoprotein__RABV__JN936724.1
augaucccccaggcccuccucuucgucccccuccucgucuucccccucugcuucggcaaguuccccaucuacaccauccccgacaagcucggccccuggucccccaucgacauccaccaccucuccugccccaacaaccucgucgucgaggacgagggcugcaccaaccucuccggcuucuccuacauggagcucaaggucggcuacaucuccgccaucaaggucaacggcuucaccugcaccggcgucgucaccgaggccgagaccuacaccaacuucgucggcuacgucaccaccaccuucaagcgcaagcacuuccgccccacccccgacgccugccgcuccgccuacaacuggaagauggccggcgacccccgcuacgaggagucccuccacaaccccuaccccgacuaccacuggcuccgcaccgucaagaccaccaaggaguccgucgucaucaucucccccuccgucgccgaccucgaccccuacgacaagucccuccacucccgcgucuucccccgcggcaagugcuccggcaucaccgucuccuccgccuacugcuccaccaaccacgacuacaccaucuggaugcccgagaacccccgccucggcaccuccugcgacaucuucaccaacucccgcggcaagcgcgccuccaagggcuccaagaccugcggcuucgucgacgagcgcggccucuacaagucccucaagggcgccugcaagcucaagcucugcggcguccucggccuccgccucauggacggcaccugggucgccauccagaccuccaacgagaccaaguggugcccccccgaccagcucgucaaccuccacgacuuccacuccgacgagaucgagcaccucgucgucgaggagcucgucgagaagcgcgaggagugccucgacgcccucgagaccaucaugaccaccaaguccgucuccuuccgccgccucucccaccuccgcaagcucguccccggcuucggcaaggccuacaccaucuucaacaagacccucauggaggccgacgcccacuacaaguccauccgcaccuggaacgagaucauccccuccaagggcugccuccgcgucggcggccgcugccacccccacgucaacggcgucuucuucaacggcaucauccucggccccgacggccacguccucauccccgagaugcaguccucccuccuccaccagcacauggagcuccucgaguccuccgucaucccccucaugcacccccucgccgaccccuccaccgucuucaaggacggcgacgaggccgaggacuucgucgagguccaccuccccgacguccacaagcagaucuccggcgucgaccucggccuccccaacuggggcaaguacguccucaucuccgccggcgcccucaccgcccucaugcucaccaucuuccucaugaccugcugccgcaagaccucccgcgccgaguccauccagcacucccccggcgagaccggccgcaaggucuccgucaccucccacaacggccgcgucaucuccuccugggaguccuacaaguccggcggcgagaccaagcucuga

SEQ ID NO: 127221 - RNA, 1575 nt, Artificial Sequence; identical to SEQ ID NO: 126882
  derived and/or modified CDS sequence (opt2) from glycoprotein__RABV__JN936725.1

SEQ ID NO: 127222 - RNA, 1575 nt, Artificial Sequence; identical to SEQ ID NO: 127103
  derived and/or modified CDS sequence (opt2) from glycoprotein__RABV__JN936726.1

SEQ ID NO: 127223 - RNA, 1575 nt, Artificial Sequence; identical to SEQ ID NO: 126882
  derived and/or modified CDS sequence (opt2) from glycoprotein__RABV__JN936727.1

SEQ ID NO: 127224 - RNA, 1575 nt, Artificial Sequence; identical to SEQ ID NO: 126882
  derived and/or modified CDS sequence (opt2) from glycoprotein__RABV__JN936728.1

SEQ ID NO: 127225 - RNA, 1575 nt, Artificial Sequence; identical to SEQ ID NO: 126882
  derived and/or modified CDS sequence (opt2) from glycoprotein__RABV__JN936729.1

SEQ ID NO: 127226 - RNA, 1575 nt, Artificial Sequence; identical to SEQ ID NO: 126881
  derived and/or modified CDS sequence (opt2) from glycoprotein__RABV__JN936731.1

SEQ ID NO: 127227 - RNA, 1575 nt, Artificial Sequence; identical to SEQ ID NO: 126881
  derived and/or modified CDS sequence (opt2) from glycoprotein__RABV__JN936732.1

SEQ ID NO: 127228 - RNA, 1575 nt, Artificial Sequence
  derived and/or modified CDS sequence (opt2) from glycoprotein__RABV__JN936733.1
augaucccccagguccuccucuucgucccccuccucgucuucuccuccugcuucggcaaguuccccaucuacaccauccccgacaagcucggccccuggucccccaucgacauccaccaccucuccugccccaacaaccucgucgucgaggacgagggcugcaccaaccucuccggcuucuccuacauggagcucaaggucggcuacaucuccgccaucaaggucaacggcuucaccugcaccggcgucgucaccgaggccgagaccuacaccaacuucgucggcuacgucaccaccaccuucaagcgcaagcacuuccgccccaugcccgacgccugccgcgccgccuacaacuggaagauggccggcgacccccgcuacgaggagucccuccacaaccccuaccccgacuaccacuggcuccgcaccgucaagaccaccaaggagucccucgucaucaucucccccuccgucgccgaccucgaccccuacgacaagucccuccacucccgcgucuuccccggcggcaagugcuccggcaucaccgucuccuccaccugcugcuccaccaaccacgacuacaccaucuggaugcccgagaacccccgccucggcaccuccugcgacaucuucaccaacucccgcggcaagcgcgccuccaagggcggcaagaccugcggcuucgucgacgagcgcggccucuacaagucccucaagggcgccugcaagcucaagcucugcggcguccucggccuccgccucauggacggcaccugggucgccauccagaccuccgacgagaucaaguggugcucccccgaccagcucgucaaccuccacgacuuccacuccgacgagaucgagcaccucgucgucgaggagcucgucaagaagcgcgaggagugccucgacgcccucgagaccaucaugaccaccaaguccgucuccuuccgccgccucucccaccuccgcaagcucguccccggcuucggcaaggccuacaccaucuucaacaagacccucauggaggccgacgcccacuacaaguccauccgcaccuggaacgagaucauccccuccaagggcugccuccgcgucggcggccgcugccacccccacgucaacggcgucuucuucaacggcaucauccucggccccgacggccacguccucauccccgagaugcaguccucccuccuccaccagcacauggagcuccucgaguccuccgucaucccccucaugcacccccucgccgaccccuccaccgucuucaaggacggcgacgaggccgaggacuucgucgagguccaccuccccgacguccacaagcagaucuccggcgucgaccucggccuccccaacuggggcaaguacguccucaucuccgccggcgcccucaccgcccucaugcucaccaucuuccucaugaccugcugccgcaagaccaaccgcgccgaguccauccaccacucccccggcgagaccggccgcaaggucuccgucaccucccacaacggccgcgucaucuccuccugggaguccuacaaguccggcuccgagaccaagcucuga

SEQ ID NO: 127229 - RNA, 1575 nt, Artificial Sequence; identical to SEQ ID NO: 127228
  derived and/or modified CDS sequence (opt2) from glycoprotein__RABV__JN936734.1

SEQ ID NO: 127230 - RNA, 1575 nt, Artificial Sequence; identical to SEQ ID NO: 126882
  derived and/or modified CDS sequence (opt2) from glycoprotein__RABV__JN936735.1

SEQ ID NO: 127231 - RNA, 1575 nt, Artificial Sequence; identical to SEQ ID NO: 126882
  derived and/or modified CDS sequence (opt2) from glycoprotein__RABV__JN936736.1

SEQ ID NO: 127232 - RNA, 1575 nt, Artificial Sequence
  derived and/or modified CDS sequence (opt2) from glycoprotein__RABV__JN936737.1
augaucccccagguccuccucuucgucccccuccucgucuucuccuccugcuucggcaaguuccccaucuacaccauccccgacaagcucggccccuggucccccaucgacauccaccaccucuccugccccaacaaccucgucgucgaggacgagggcugcaccaaccucuccggcuucuccuacauggagcucaaggucggcuacaucuccgccaucaaggucaacggcuucaccugcaccggcgucgucaccgaggccgagaccuacaccaacuucgucggcuacgucaccaccaccuucaagcgcaagcacuuccgccccaugcccgacgccugccgcgccgccuacaacuggaagauggccggcgacccccgcuacgaggagucccuccacaaccccuaccccgacuaccacuggcuccgcaccgucaagaccaccaaggagucccucgucaucaucucccccuccgucgccgaccucgaccccuacgacaagucccuccacucccgcgucuuccccggcggcaagugcuccggcaucaccgucuccuccaccugcugcuccaccaaccacgacuacaccaucuggaugcccgagaacccccgccucggcaccuccugcgacaucuucaccaacucccgcggcaagcgcgccuccaagggcggcaagaccugcggcuucgucgacgagcgcggccucuacaagucccucaagggcgccugcaagcucaagcucugcggcguccucggccuccgccucauggacggcaccugggucgcccuccagaccuccgacgagaucaaguggugcucccccgaccagcucgucaaccuccacgacuuccacuccgacgagaucgagcaccucgucgucgaggagcucgucaagaagcgcgaggagugccucgacgcccucgagaccaucaugaccaccaaguccgucuccuuccgccgccucucccaccuccgcaagcucguccccggcuucggcaaggccuacaccaucuucaacaagacccucauggaggccgacgcccacuacaaguccauccgcaccuggaacgagaucauccccuccaagggcugccuccgcgucggcggccgcugccacccccacgucaacggcgucuucuucaacggcaucauccucggccccgacggccacguccucauccccgagaugcaguccucccuccuccaccagcacauggagcuccucgaguccuccgucaucccccucaugcacccccucgccgaccccuccaccgucuucaaggacggcgacgaggccgaggacuucgucgagguccaccuccccgacguccacaagcagaucuccggcgucgaccucggccuccccaacuggggcaaguacguccucaucuccgccggcgcccucaccgcccucaugcucaccaucuuccucaugaccugcugccgcaagaccaaccgcgccggcuccauccagcacucccccggcgagaccggccgcaaggucuccgucaccucccacaacggccgcgucaucuccuccugggaguccuacaaguccggcuccgagaccaagcucuga

SEQ ID NO: 127233 - RNA, 1575 nt, Artificial Sequence; identical to SEQ ID NO: 126881
  derived and/or modified CDS sequence (opt2) from glycoprotein__RABV__JN936738.1

SEQ ID NO: 127234 - RNA, 1575 nt, Artificial Sequence; identical to SEQ ID NO: 126881
  derived and/or modified CDS sequence (opt2) from glycoprotein__RABV__JN936739.1

SEQ ID NO: 127235 - RNA, 1575 nt, Artificial Sequence; identical to SEQ ID NO: 126881
  derived and/or modified CDS sequence (opt2) from glycoprotein__RABV__JN936740.1

SEQ ID NO: 127236 - RNA, 1575 nt, Artificial Sequence; identical to SEQ ID NO: 126881
  derived and/or modified CDS sequence (opt2) from glycoprotein__RABV__JN936741.1

SEQ ID NO: 127237 - RNA, 1575 nt, Artificial Sequence; identical to SEQ ID NO: 126881
  derived and/or modified CDS sequence (opt2) from glycoprotein__RABV__JN936742.1

SEQ ID NO: 127238 - RNA, 1575 nt, Artificial Sequence; identical to SEQ ID NO: 126881
  derived and/or modified CDS sequence (opt2) from glycoprotein__RABV__JN936743.1

SEQ ID NO: 127239 - RNA, 1575 nt, Artificial Sequence
  derived and/or modified CDS sequence (opt2) from glycoprotein__RABV__JN936744.1
augauccuccagguccuccucuucgucccccuccucgucuucuccuccugcuucggcaaguuccccaucuacaccauccccgacaagcucggccccuggucccccaucgacauccaccaccucuccugccccaacaaccucgucgucgaggacgagggcugcaccaaccucuccggcuucuccuacauggagcucaaggucggcuacaucuccgccaucaaggucaacggcuucaccugcaccggcgucgucaccgaggccgagaccuacaccaacuucgucggcuacgucaccaccaccuucaagcgcaagcacuuccgccccaugcccgacgccugccgcgccgccuacaacuggaagauggccggcgacccccgcuacgaggagucccuccacaaccccuaccccgacuaccacuggcuccgcaccgucaagaccaccaaggagucccucgucaucaucucccccuccgucgccgaccucgaccccuacgacaagucccuccacucccgcgucuuccccggcggcaagugcuccggcaucaccgucuccuccaccugcugcuccaccaaccacgacuacaccaucuggaugcccgagaacccccgccucggcaccuccugcgacaucuucaccaacucccgcggcaagcgcgccuccaagggcggcaagaccugcggcuucgucgacgagcgcggccucuacaagucccucaagggcgccugcaagcucaagcucugcggcguccucggccuccgccucauggacggcaccugggucgccauccagaccuccgacgagaucaaguggugcccccccgaccagcucgucaaccuccacgacuuccacuccgacgagaucgagcaccucgucgucgaggagcucgucaagaagcgcgaggagugccucgacgcccucgagaccaucaugaccaccaaguccgucuccuuccgccgccucucccaccuccgcaagcucguccccggcuucggcaaggccuacaccaucuucaacaagacccucauggaggccgacgcccacuacaaguccauccgcaccuggaacgagaucauccccuccaagggcugccuccgcgucggcggccgcugccacccccacgucaacggcgucuucuucaacggcaucauccucggccccgacggccacguccucauccccgagaugcaguccucccuccuccaccagcacauggagcuccucgaguccuccgucaucccccucaugcacccccucgccgaccccuccaccgucuucaaggacggcgacgaggccgaggacuucgucgagguccaccuccccgacguccacaagcagaucuccggcgucgaccucggccuccccaacuggggcaaguacguccucaucuccgccggcgcccucaccgcccucaugcucaugaucuuccucaugaccugcugccgcaagaacaaccgcgccgaguccauccagcacucccccggcgagaccggccgcaaggucuccgucaccucccacaacggccgcgucaucuccuccugggaguccuacaaguccggcggcgagaccaagcucuga

SEQ ID NO: 127240 - RNA, 1575 nt, Artificial Sequence; identical to SEQ ID NO: 127120
  derived and/or modified CDS sequence (opt2) from glycoprotein__RABV__JN936745.1

SEQ ID NO: 127241 - RNA, 1575 nt, Artificial Sequence
  derived and/or modified CDS sequence (opt2) from glycoprotein__RABV__JN936746.1
augaucccccagguccuccucuucgucccccuccucgucuucuccuccugcuucggcaaguuccccaucuacaccauccccgacaagcucggccccuggucccccaucgacauccaccaccucuccugccccaacaaccucgucgucgaggacgagggcugcaccaaccucuccggcuucuccuacauggagcucaaggucggcuacaucuccgccaucaaggucaacggcuucaccugcaccggcgucgucaccgaggccgagaccuacaccaacuucgucggcuacgucaccaccaccuucaagcgcaagcacuuccgccccaugcccgacgccugccgcgccgccuacaacuggaagauggccggcgacccccgcuacgaggagucccuccacaaccccuaccccgacuaccacuggcuccgcaccgucaagaccaccaaggagucccucgucaucaucucccccuccgucgccgaccucgaccccuacgacaagucccuccacucccgcgucuuccccggcggcaagugcuccggcaucaccgucuccuccaccugcugcuccaccaaccacgacuacaccaucuggaugcccgagaacccccgccucggcaccuccugcgacaucuucaccaacucccgcggcaagcgcgccuccaagggcggcaagaccugcggcuucgucgacgagcgcggccucuacaagucccucaagggcgccugcaagcucaagcucugcggcguccucggccuccgccucauggacggcaccugggucgccauccagaccuccgacgagaucaaguggugcucccccgaccagcucgucaaccuccacgacuuccacuccgacgagaucgagcaccucgucgucgaggagcucgucaagaagcgcgaggagugccucgacgcccucgagaccaucaugaccaccaaguccgucuccuuccgccgccucucccaccuccgcaagcucguccccggcuucggcaaggccuacaccaucuucaacaagacccucauggaggccgacgcccacuacaaguccauccgcaccuggaacgagaucauccccuccaagggcugccuccgcgucggcggccgcugccacccccacgucaacggcgucuucuucaacggcaucauccucggccccgacggccacguccucauccccgagaugcaguccucccuccuccaccagcacauggagcuccucgaguccuccgucaucccccucaugcacccccucgccgaccccuccaccgucuucaaggacggcgacgaggccgaggacuucgucgagguccaccuccccgacguccacaagcagaucuccggcgucgaccucggccuccccaacuggggcaaguacguccucaucuccgccggcgcccucaccgcccucaugcucaugaucuuccucaugaccugcugccgcaacaccaaccgcgccgaguccauccagcacucccccggcgagaccggccgcaaggucuccgucaccucccacaacggccgcgucaucuccuccugggaguccuacaaguccggcggcgagaccaagcucuga

SEQ ID NO: 127242 - RNA, 1575 nt, Artificial Sequence
  derived and/or modified CDS sequence (opt2) from glycoprotein__RABV__JN936747.1
augauccuccagguccuccucuucgucccccuccucgucuucuccuccugcuucggcaaguuccccaucuacaccauccccgacaagcucggccccuggucccccaucgacauccaccaccucuccugccccaacaaccucgucgucgaggacgagggcugcaccaaccucuccggcuucuccuacauggagcucaaggucggcuacaucuccgccaucaaggucaacggcuucaccugcaccggcgucgucaccgaggccgagaccuacaccaacuucgucggcuacgucaccaccaccuucaagcgcaagcacuuccgccccaugcccgacgccugccgcgccgccuacaacuggaagauggccggcgacccccgcuacgaggagucccuccacaaccccuaccccgacuaccacuggcuccgcaccgucaagaccaccaaggagucccucgucaucaucucccccuccgucgccgaccucgaccccuacgacaagucccuccacucccgcgucuuccccggcggcaagugcuccggcaucaccgucuccuccaccugcugcuccaccaaccacgacuacaccaucuggaugcccgagaacccccgccucggcaccuccugcgacaucuucaccaacucccgcggcaagcgcgccuccaagggcggcaagaccugcggcuucgucgacgagcgcggccucuacaagucccucaagggcgccugcaagcucaagcucugcggcguccucggccuccgccucauggacggcaccugggucgccauccagaccuccgacgagaucaaguggugcccccccgaccagcucgucaaccuccacgacuuccacuccgacgagaucgagcaccucgucgucgaggagcucgucaagaagcgcgaggagugccucgacgcccucgagaccaucaugaccaccaaguccgucuccuuccgccgccucucccaccuccgcaagcucguccccggcuucggcaaggccuacaccaucuucaacaagacccucauggaggccgacgcccacuacaaguccauccgcaccuggaacgagaucauccccuccaagggcugccuccgcgucggcggccgcugccacccccacgucaacggcgucuucuucaacggcaucauccucggccccgacggccacguccucauccccgagaugcaguccucccuccuccaccagcacauggagcuccucgaguccuccgucaucccccucaugcacccccucgccgaccccuccaccgucuucaaggacggcgacgaggccgaggacuucgucgagguccaccuccccgacguccacaagcagaucuccggcgucgaccucggccuccccaacuggggcaaguacguccucaucuccgccggcgcccucaccgcccucaugcucaugaucuuccucaugaccugcugccgcaagaacaaccgcgccgaguccauccagcacucccccggcgagaccggccgcaaggucuccgucaccucccacaacggccgcgucaccuccuccugggaguccuacaaguccggcggcgagaccaagcucuga

SEQ ID NO: 127243 - RNA, 1575 nt, Artificial Sequence; identical to SEQ ID NO: 127120
  derived and/or modified CDS sequence (opt2) from glycoprotein__RABV__JN936748.1

SEQ ID NO: 127244 - RNA, 1575 nt, Artificial Sequence; identical to SEQ ID NO: 127120
  derived and/or modified CDS sequence (opt2) from glycoprotein__RABV__JN936749.1

SEQ ID NO: 127245 - RNA, 1575 nt, Artificial Sequence; identical to SEQ ID NO: 127120
  derived and/or modified CDS sequence (opt2) from glycoprotein__RABV__JN936750.1

SEQ ID NO: 127246 - RNA, 1575 nt, Artificial Sequence; identical to SEQ ID NO: 127120
  derived and/or modified CDS sequence (opt2) from glycoprotein__RABV__JN936751.1

SEQ ID NO: 127247 - RNA, 1575 nt, Artificial Sequence
  derived and/or modified CDS sequence (opt2) from glycoprotein__RABV__JN936753.1
augaucccccagguccuccucuucgucccccuccucgucuucuccuccugcuucggcaaguuccccaucuacaccauccccgacaagcucggccccuggucccccaucgacauccaccaccucuccugccccaacaaccucgucgucgaggacgagggcugcaccaaccucuccggcuucuccuacauggagcucaaggucggcuacaucuccgccaucaaggucaacggcuucaccugcaccggcgucgucaccgaggccgagaccuacaccaacuucgucggcuacgucaccaccaccuucaagcgcaagcacuuccgccccacccccgacgccugccgcgccgccuacaacuggaagauggccggcgacccccgcuacgaggagucccucaacaaccccuaccccgacuaccacuggcuccgcaccgucaagaccuccaaggagucccucgucaucaucucccccuccgucgccgaccucgaccccuacgacaagucccuccacucccgcgucuuccccggcggcaagugcuccggcaucaccgucuccuccaccugcugcuccaccaaccacgacuacaccaucuggaugcccgagaacccccgccucggcaccuccugcgacaucuucaccaacucccgcggcaagcgcgccuccaagggcggcaagaccugcggcuucgucgacgagcgcggccucuacaagucccucaagggcgccugcaagcucaagcucugcggcguccucggccuccgccucauggacggcaccugggucgccauccagaccuccgacgagaucaaguggugcucccccgaccagcucgucaaccuccacgacuuccacuccgacgagaucgagcaccucgucgucgaggagcucgucaagaagcgcgaggagugccucgacgcccucgagaccaucaugaccaccaaguccgucuccuuccgccgccucucccaccuccgcaagcucguccccggcuucggcaaggccuacaccaucuucaacaagacccucauggaggccgacgcccacuacaaguccauccgcaccuggaacgagaucauccccuccaagggcugccuccgcgucggcggccgcugccacccccacgucaacggcgucuucuucaacggcaucauccucggccccgacggccacguccucauccccgagaugcaguccucccuccuccaccagcacauggagcuccucgaguccuccgucaucccccucaugcacccccucgccgaccccuccaccgucuucaaggacggcgacgaggccgaggacuucgucgagguccaccuccccgacguccacaagcagaucuccggcgucgaccucggccuccccaacuggggcaaguacguccucgucuccgccggcgcccucaccgcccucaugcucaugaucuuccucaugaccugcugccgcaagaccaaccgcgccgaguccauccagcacucccccggcgagaccggccgcaaggucuccgucaccucccacaacggccgcgucaucuccuccugggaguccuacaaguccggcggcgagaccaagcucuga

SEQ ID NO: 127248 - RNA, 1575 nt, Artificial Sequence; identical to SEQ ID NO: 126863
  derived and/or modified CDS sequence (opt2) from glycoprotein__RABV__JN936754.1

SEQ ID NO: 127249 - RNA, 1575 nt, Artificial Sequence
  derived and/or modified CDS sequence (opt2) from glycoprotein__RABV__JN936755.1
augaucccccagguccuccucuucgucccccuccucgucuccuccuccugcuucggcaaguuccccaucuacaccauccccgacaagcucggccccuggucccccaucgacauccaccaccucuccugccccaacaaccucgucgucgaggacgagggcugcaccaaccucuccggcuucuccuacauggagcucaaggucggcuacaucuccgccaucaaggucaacggcuucaccugcaccggcgucgucaccgaggccgagaccuacaccaacuucgucggcuacgucaccaccaccuucaagcgcaagcacuuccgccccacccccgacgccugccgcgccgccuacaacuggaagauggccggcgacccccgcuacgaggagucccuccacaaccccuaccccgacuaccacuggcuccgcaccgucaagaccuccaaggagucccucgucaucaucucccccuccgucgccgaccucgaccccuacgacaagucccuccacucccgcgucuuccccggcggcaagugcuccggcaucaccgucuccuccaccugcugcuccaccaaccacgacuacaccaucuggaugcccgagaacccccgccucggcaccuccugcgacaucuucaccaacucccgcggcaagcgcgccuccaagggcggcaagaccugcggcuucgucgacgagcgcggccucuacaagucccucaagggcgccugcaagcucaagcucugcggcguccucggccuccgccucauggacggcaccugggucgccauccagaccuccgacgagaucaaguggugcucccccgaccagcucgucaaccuccacgacuuccacuccgacgagaucgagcaccucgucgucgaggagcucgucaagaagcgcgaggagugccucgacgcccucgagaccaucaugaccaccaaguccgucuccuuccgccgccucucccaccuccgcaagcucguccccggcuucggcaaggccuacaccaucuucaacaagacccucauggaggccgacgcccacuacaaguccauccgcaccuggaacgagaucauccccuccaagggcugccuccgcgucggcggccgcugccacccccacgucaacggcgucuucuucaacggcaucauccucggccccgacggccacguccucauccccgagaugcaguccucccuccuccaccagcacauggagcuccucgaguccuccgucaucccccucaugcacccccucgccgaccccuccaccgucuucaaggacggcgacgaggccgaggacuucgucgagguccaccuccccgacguccacaagcagaucuccggcgucgaccucggccuccccaacuggggcaaguacguccucgucuccgccggcgcccucaccgcccucaugcucaugaucuuccucaugaccugcugccgcaagaccaaccgcgccgaguccauccagcacucccccggcgagaccggccgcaaggucuccgucaccucccacaacggccgcgucaucuccuccugggaguccuacaaguccggcggcgagaccaagcucuga

SEQ ID NO: 127250 - RNA, 1575 nt, Artificial Sequence; identical to SEQ ID NO: 127120
  derived and/or modified CDS sequence (opt2) from glycoprotein__RABV__JN936756.1

SEQ ID NO: 127251 - RNA, 1575 nt, Artificial Sequence
  derived and/or modified CDS sequence (opt2) from glycoprotein__RABV__JN936757.1
augaucccccagguccuccucuucgucccccuccucgucuucuccuccugcuucggcaaguuccccaucuacaccauccccgacaagcucggccccuggucccccaucgacauccaccaccucuccugccccaacaaccucgucgucgaggacgagggcugcaccaaccucuccggcuucuccuacauggagcucaaggucggcuacaucuccgccaucaaggucaacggcuucaccugcaccggcgucgucaccgaggccgagaccuacaccaacuucgucggcuacgucaccaccaccuucaagcgcaagcacuuccgccccacccccgacgccugccgcgccgccuacaacuggaagauggccggcgacccccgcuacgaggagucccuccacaaccccuaccccgacuaccacuggcuccgcaccgucaagaccuccaaggagucccucgucaucaucucccccuccgucgccgaccucgaccccuacgacaagucccuccacucccgcgucuuccccggcggcaagugcuccggcaucaccgucuccuccaccugcugcuccaccaaccacgacuacaccaucuggaugcccgagaacccccgccucggcaccuccugcgacaucuucaccaacucccgcggcaagcgcgccuccaagggcggcaagaccugcggcuucgucgacgagcgcggccucuacaagucccucaagggcgccugcaagcucaagcucugcggcguccucggccuccgccucauggacggcaccugggucgccauccagaccuccgacgagaucaaguggugcucccccgaccagcucgucaaccuccacgacuuccacuccgacgagaucgagcaccucgucgucgaggagcucgucaagaagcgcgaggagugccucgacgcccucgagaccaucaugaccaccaaguccgucuccuuccgccgccucucccaccuccgcaagcucguccccggcuucggcaaggccuacaccaucuucaacaagacccucauggaggccgacgcccacuacaaguccauccgcaccuggaacgagaucauccccuccaagggcugccuccgcgucggcggccgcugccacccccacgucaacggcgucuucuucaacggcaucauccucggccccgacggccacguccucauccccgagaugcaguccucccuccuccaccagcacauggagcuccucgaguccuccgucaucccccucaugcacccccucgccgaccccuccaccgucuucaaggacggcgacgaggccgaggacuucgucgagguccaccuccccgacguccacaagcagaucuccggcgucgaccucggccuccccaacuggggcaaguacguccucgucuccgccggcgcccucaccgcccucaugcucaugaucuuccucaugaccugcugccgcaagaccgaccgcgccgaguccauccagcacucccccggcgagacccgccgcaaggucuccgucaccucccacaacggccgcgucaucuccuccugggaguccuacaaguccggcggcgagaccaagcucuga

SEQ ID NO: 127252 - RNA, 1575 nt, Artificial Sequence
  derived and/or modified CDS sequence (opt2) from glycoprotein__RABV__JN936758.1
augaucccccagguccuccucuucgucccccuccucgucuucuccuccugcuucggcaaguuccccaucuacaccauccccgacaagcucggccccuggucccccaucgacauccaccaccucuccugccccaacaaccucgucgucgaggacgagggcugcaccaaccucuccggcuucuccuacauggagcucaaggucggcuacaucuccgccaucaaggucaacggcuucaccugcaccggcgucgucaccgaggccgagaccuacaccaacuucgucggcuacgucaccaccaccuucaagcgcaagcacuuccgccccaugcccgacgccugccgcgccgccuacaacuggaagauggccggcgacccccgcuacgaggagucccuccacaaccccuaccccgacuaccacuggcuccgcaccgucaagaccaccaaggagucccucgucaucaucucccccuccgucgccgaccucgaccccuacgacaagucccuccacucccgcgucuuccccggcggcaagugcuccggcaucaccgucuccuccaccugcugcuccaccaaccacgacuacaccaucuggaugcccgagaacccccgccucggcaccuccugcgacaucuucaccaacucccgcggcaagcgcgccuccaagggcggcaagaccugcggcuucgucgacgagcgcggccucuacaagucccucaagggcgccugcaagcucaagcucugcggcguccucggccuccgccucauggacggcaccugggucgccauccagaccuccgacgagaucaaguggugcucccccgaccagcucgucaaccuccacgacuuccacuccgacgagaucgagcaccucgucgucgaggagcucgucaagaagcgcgaggagugccucgacgcccucgagaccaucaugaccaccaaguccgucuccuuccgccgccucucccaccuccgcaagcucguccccggcuucggcaaggccuacaccaucuucaacaagacccucauggaggccgacgcccacuacaaguccauccgcaccuggaacgagaucauccccuccaagggcugccuccgcgucggcggccgcugccacccccacgucaacggcgucuucuucaacggcaucauccucggccccgacggccacguccucauccccgagaugcaguccucccuccuccaccagcacauggagcuccucgaguccuccgucaucccccucaugcacccccucgccgaccccuccaccgucuucaaggacggcgacgaggccgaggacuucgucgagguccaccuccccgacguccacaagcagaucuccggcgucgaccucggccuccccaacuggggcaaguacguccucaucggcgccggcgcccucaccgcccucaugcucaccaucuuccucaugaccugcugccgcaagaccaaccgcgccgaguccauccagcacucccccggcgagaccggccgcaaggucuccgucaccucccacaacggccgcgucaucuccuccugggaguccuacaaguccggcuccgagaccaagcucuga

SEQ ID NO: 127253 - RNA, 1575 nt, Artificial Sequence
  derived and/or modified CDS sequence (opt2) from glycoprotein__RABV__JN936759.1
augaucccccagguccuccucuucgucccccuccucgucuucuccuccugcuucggcaaguuccccaucuacaccauccccgacaagcucggccccuggucccccaucgacauccaccaccucuccugccccaacaaccucgucgucgaggacgagggcugcaccaaccucuccggcuucuccuacauggagcucaaggucggcuacaucuccgccaucaaggucaacggcuucaccugcaccggcgucgucaccgaggccgagaccuacaccaacuucgucggcuacgucaccaccaccuucaagcgcaagcacuuccgccccaugcccgacgccugccgcgccgccuacaacuggaagauggccggcgacccccgcuacgaggagucccuccacaaccccuaccccgacuaccacuggcuccgcaccgucaagaccaccaaggagucccucgucaucaucucccccuccgucgccgaccucgaccccuacgacaagucccuccacucccgcgucuuccccggcggcaagugcuccggcaucaccgucuccuccaccugcugcuccaccaaccacgacuacaccaucuggaugcccgagaacccccgccucggcaccuccugcgacaucuucaccaacucccgcggcaagcgcgccuccaagggcggcaagaccugcggcuucgucgacgagcgcggccucuacaagucccuccgcggcgccugcaagcucaagcucugcggcguccucggccuccgccucauggacggcaccugggucgccauccagaccuccgacgagaucaaguggugcucccccgaccagcucgucaaccuccacgacuuccacuccgacgagaucgagcaccucgucgucgaggagcucgucaagaagcgcgaggagugccucgacgcccucgagaccaucaugaccaccaaguccgucuccuuccgccgccucucccaccuccgcaagcucguccccggcuucggcaaggccuacaccaucuucaacaagacccucauggaggccgacgcccacuacaaguccauccgcaccuggaacgagaucauccccuccaagggcugccuccgcgucggcggccgcugccacccccacgucaacggcgucuucuucaacggcaucauccucggccccgacggccacguccucauccccgagaugcaguccucccuccuccaccagcacaucgagcuccucgaguccuccgucaucccccucaugcacccccucgccgaccccuccaccgucuucaaggacggcgacgaggccgaggacuucgucgagguccaccuccccgacguccacaagcagaucuccggcgucgaccucggccuccccaacuggggcaaguacguccucaucuccgccggcgcccucaccgcccucaugcucaccaucuuccucaugaccugcugccgcaagaccaaccgcgccgaguccauccagcacucccccggcgagaccggccgcaaggucuccgucaccucccacaacggccgcgucaucuccuccugggaguccuacaaguccggcuccgagaccaagcucuga

SEQ ID NO: 127254 - RNA, 1575 nt, Artificial Sequence
  derived and/or modified CDS sequence (opt2) from glycoprotein__RABV__JN936760.1
augaucccccagguccuccucuucgucccccuccucgucuucucccucugcuucggcaaguuccccaucuacaccauccccgacaagcucggccccuggucccccaucgacauccaccaccucuccugccccaacaaccucgucgucgaggacgagggcugcaccaaccucuccggcuucuccuacauggagcucaaggucggcuacaucuccgccaucaaggucaacggcuucaccugcaccggcgucgucaccgaggccgagaccuacaccaacuucgucggcuacgucaccaccaccuucaagcgcaagcacuuccgccccaugcccgacgccugccgcgccgccuacaacuggaagauggccggcgacccccgcuacgaggagucccuccacaaccccuaccccgacuaccacuggcuccgcaccgucaagaccaccaaggagucccucgucaucaucucccccuccgucgccgaccucgaccccuacgacaagucccuccacucccgcgucuuccccggcggcaagugcuccggcaucaccgucuccuccaccugcugcuccaccaaccacgacuacaccgucuggaugcccgagaacccccgccucggcaccuccugcgacaucuucaccaacucccgcggcaagcgcgccuccaagggcggcaagaccugcggcuucgucgacgagcgcggccucuacaagucccucaagggcgccugcaagcucaagcucugcggcguccucggccuccgccucauggacggcaccugggucgccauccagaccuccgacgagaucaaguggugcucccccgaccagcucgucaaccuccacgacuuccacuccgacgagaucgagcaccucgucgucgaggagcucgucaagaagcgcgaggagugccucgacgcccucgagaccaucaugaccaccaaguccgucuccuuccgccgccucucccaccuccgcaagcucguccccggcuucggcaaggccuacaccaucuucaacaagacccucauggaggccgacgcccacuacaaguccauccgcaccuggaacgagaucauccccuccaagggcugccuccgcgucggcggccgcugccacccccacgucaacggcgucuucuucaacggcaucauccucggccccgacggccacguccucauccccgagaugcaguccucccuccuccaccagcacauggagcuccucgaguccuccgucaucccccucaugcacccccucgccgaccccuccaccgucuucaaggacggcgacgaggccgaggacuucgucgagguccaccuccccgacguccacaagcagaucuccggcgucgaccucggccuccccaacuggggcaaguacguccucaucuccgccggcgcccucaccgcccucaugcucaccaucuuccucaugaccugcugccgcaagaccaaccgcgccgaguccauccagcacucccccggcgagaccggccgcaaggucuccgucaccucccacaacggccgcgucaucuccuccugggaguccuacaaguccggcuccgagaccaagcucuga

SEQ ID NO: 127255 - RNA, 1575 nt, Artificial Sequence
  derived and/or modified CDS sequence (opt2) from glycoprotein__RABV__JN936761.1
augaucccccagguccuccucuucgucccccuccucgucuucuccuccugcuucggcaaguuccccaucuacaccauccccgacaagcucggccccuggucccccaucgacauccaccaccucuccugccccaacaaccucgucgucgaggacgagggcugcaccaaccucuccggcuucuccuacauggagcucaaggucggcuacaucuccgccaucaaggucaacggcuucaccugcaccggcgucgucaccgaggccgagaccuacaccaacuucgucggcuacgucaccaccaccuucaagcgcaagcacuuccgccccaugcccgacgccugccgcgccgccuacaacuggaagauggccggcgacccccgcuacgaggagucccuccacaaccccuaccccgacuaccacuggcuccgcaccgucaagaccaccaaggagucccucgucaucaucucccccuccgucgccgaccucgaccccuacgacaagucccuccacucccgcgucuuccccggcggcaagugcuccggcaucaccgucuccuccaccugcugcuccaccaaccacgacuacaccaucuggaugcccgagaacccccgccucggcaccuccugcgacaucuucaccaacucccgcggcaagcgcgccuccaagggcggcaagaccugcggcuucgucgacgagcgcggccucuacaagucccucaagggcgccugcaagcucaagcucugcggcguccucggccuccgccucauggacggcaccugggucgccauccagaccuccgacgagaucaaguggugcucccccgaccagcucgucaaccuccacgacuuccacuccgacgagaucgagcaccucgucgucgaggagcucgucaagaagcgcgaggagugccucgacgcccucgagaccaucaugaccaccaaguccgucuccuuccgccgccucucccaccuccgcaagcucguccccggcuucggcaaggccuacaccaucuucaacaagacccucauggaggccgacgcccacuacaaguccauccgcaccuggaacgagaucauccccuccaagggcugccuccgcgucggcggccgcugccacccccacgucaacggcgucuucuucaacggcaucauccucggccccgacggccacguccucauccccgagaugcaguccucccuccuccaccagcacauggagcuccucgaguccuccgucaucccccucaugcacccccucgccgaccccuccaccgucuucaaggacggcgacgaggccgaggacuucgucgagguccaccuccccgacguccacaagcagaucuccggcgucgaccucggccuccccaacuggggcaaguacguccucaucuccgccggcgcccucaccgcccucaugcucaugaucuuccucaugaccugcugccgcaagaccaaccgcgccgaguccauccagcacucccccggcgagaccggccgcaaggucuccgucaccucccacaacggccgcgucaucuccuccugggaguccuacaaguccggcuccgagaccaagcucuga

SEQ ID NO: 127256 - RNA, 1575 nt, Artificial Sequence; identical to SEQ ID NO: 127120
  derived and/or modified CDS sequence (opt2) from glycoprotein__RABV__JN936762.1

SEQ ID NO: 127257 - RNA, 1575 nt, Artificial Sequence; identical to SEQ ID NO: 126863
  derived and/or modified CDS sequence (opt2) from glycoprotein__RABV__JN936763.1

SEQ ID NO: 127258 - RNA, 1575 nt, Artificial Sequence
  derived and/or modified CDS sequence (opt2) from glycoprotein__RABV__JN936764.1
augaucccccagguccuccucuucguccccuuccucgucuucuccuccugcuucggcaaguuccccaucuacaccauccccgacaagcucggccccuggucccccaucgacauccaccaccucuccugccccaacaaccucgucgucgaggacgagggcugcaccaaccucuccggcuucuccuacauggagcucaaggucggcuacaucuccgccaucaaggucaacggcuucaccugcaccggcgucgucaccgaggccgagaccuacaccaacuucgucggcuacgucaccaccaccuucaagcgcaagcacuuccgccccaugcccgacgccugccgcgccgccuacaacuggaagauggccggcgacccccgcuacgaggagucccuccacaaccccuaccccgacuaccacuggcuccgcaccgucaagaccaccaaggagucccucgucaucaucucccccuccgucgccgaccucgaccccuacgacaagucccuccacucccgcgucuuccccggcggcaagugcuccggcaucaccgucuccuccaccugcugcuccaccaaccacgacuacaccaucuggaugcccgagaacccccgccucggcaccuccugcgacaucuucaccaacucccgcggcaagcgcgccuccaagggcggcaagaccugcggcuucgucgacgagcgcggccucuacaagucccucaagggcgccugcaagcucaagcucugcggcguccucggccuccgccucauggacggcaccugggucgccauccagaccuccgacgagaucaaguggugcucccccgaccagcucgucaaccuccacgacuuccacuccgacgagaucgagcaccucgucgucgaggagcucgucaagaagcgcgaggagugccucgacgcccucgagaccaucaugaccaccaaguccgucuccuuccgccgccucucccaccuccgcaagcucguccccggcuucggcaaggccuacaccaucuucaacaagacccucauggaggccgacgcccacuacaaguccauccgcaccuggaacgagaucauccccuccaagggcugccuccgcgucggcggccgcugccacccccacgucaacggcgucuucuucaacggcaucauccucggccccgacggccacguccucauccccgagaugcaguccucccuccuccaccagcacauggagcuccucgaguccuccgucaucccccucaugcacccccucgccgaccccuccaccgucuucaaggacggcgacgaggccgaggacuucgucgagguccaccuccccgacguccacaagcagaucuccggcgucgaccucggccuccccaacuggggcaaguacguccucaucuccgccggcgcccucaccgcccucaugcucaccaucuuccucaugaccugcugccgcaagaccaaccgcgccgaguccauccagcacucccccggcgagaccggccgcaaggucuccgucaccucccacaacggccgcgucaucuccuccugggaguccuacaaguccggcuccgagaccaagcucuga

SEQ ID NO: 127259 - RNA, 1575 nt, Artificial Sequence; identical to SEQ ID NO: 126881
  derived and/or modified CDS sequence (opt2) from glycoprotein__RABV__JN936765.1

SEQ ID NO: 127260 - RNA, 1575 nt, Artificial Sequence; identical to SEQ ID NO: 126881
  derived and/or modified CDS sequence (opt2) from glycoprotein__RABV__JN936766.1

SEQ ID NO: 127261 - RNA, 1575 nt, Artificial Sequence; identical to SEQ ID NO: 126881
  derived and/or modified CDS sequence (opt2) from glycoprotein__RABV__JN936767.1

SEQ ID NO: 127262 - RNA, 1575 nt, Artificial Sequence; identical to SEQ ID NO: 127103
  derived and/or modified CDS sequence (opt2) from glycoprotein__RABV__JN936768.1

SEQ ID NO: 127263 - RNA, 1575 nt, Artificial Sequence; identical to SEQ ID NO: 126882
  derived and/or modified CDS sequence (opt2) from glycoprotein__RABV__JN936769.1

SEQ ID NO: 127264 - RNA, 1575 nt, Artificial Sequence
  derived and/or modified CDS sequence (opt2) from glycoprotein__RABV__JN936770.1
augaucccccagguccuccucuucgucccccuccucgucuucuccuccugcuucggcaaguuccccaucuacaccauccccgacaagcucggccccuggucccccaucgacauccaccaccucuccugccccaacaaccucgucgucgaggacgagggcugcaccaaccucuccggcuucuccuacauggagcucaaggucggcuacaucuccgccaucaaggucaacggcuucaccugcaccggcgucgucaccgaggccgagaccuacaccaacuucgucggcuacgucaccaccaccuucaagcgcaagcacuuccgccccaugcccgacgccugccgcuccgccuacaacuggaagauggccggcgacccccgcuacgaggagucccuccacaaccccuaccccgacuaccacuggcuccgcaccgucaagaccaccaaggagucccucgucaucaucucccccuccgucgccgaccucgaccccuacgacaagucccuccacucccgcgucuuccccggcggcaagugcuccggcaucaccgucuccuccaccugcugcuccaccaaccacgacuacaccaucuggaugcccgagaacccccgccucggcaccuccugcgacaucuucaccaacucccgcggcaagcgcgccuccaagggcggcaagaccugcggcuucgucgacgagcgcggccucuacaagucccucaagggcgccugcaagcucaagcucugcggcguccucggccuccgccucauggacggcaccugggucgccauccagaccuccgacgagaucaaguggugcucccccgaccagcucgucaaccuccacgacuuccacuccgacgagaucgagcaccucgucgucgaggagcucgucaagaagcgcgaggagugccucgacgcccucgagaccaucaugaccaccaaguccgucuccuuccgccgccucucccaccuccgcaagcucguccccggcuucggcaaggccuacaccaucuucaacaagacccucauggaggccgacgcccacuacaaguccauccgcaccuggaacgagaucauccccuccaagggcugccuccgcgucggcggccgcugccacccccacgucaacggcgucuucuucaacggcaucauccucggccccgacggccacguccucauccccgagaugcaguccucccuccuccaccagcacauggagcuccucgaguccuccgucaucccccucaugcacccccucgccgaccccuccaccgucuucaaggacggcgacgaggccgaggacuucgucgagguccaccuccccgacguccacaagcagaucuccggcgucgaccucggccuccccaacuggggcaaguacguccucaucuccgccggcgcccucaccgcccucaugcucaccaucuuccucaugaccugcugccgcaagaccaaccgcgccgaguccauccagcacucccccggcgagaccggccgcaaggucuccgucaccucccacaacggccgcgucaucuccuccugggaguccuacaaguccggcuccgagaccaagcucuga

SEQ ID NO: 127265 - RNA, 1575 nt, Artificial Sequence; identical to SEQ ID NO: 126863
  derived and/or modified CDS sequence (opt2) from glycoprotein__RABV__JN936771.1

SEQ ID NO: 127266 - RNA, 1575 nt, Artificial Sequence; identical to SEQ ID NO: 127228
  derived and/or modified CDS sequence (opt2) from glycoprotein__RABV__JN936772.1

SEQ ID NO: 127267 - RNA, 1575 nt, Artificial Sequence
  derived and/or modified CDS sequence (opt2) from glycoprotein__RABV__JN936773.1
augaucccccagguccuccucuucgucccccuccucgucuucuccuccugcuucggcaaguuccccaucuacaccauccccgacaagcucggccccuggucccccaucgacauccaccaccucuccugccccaacaaccucaucgucgaggacgagggcugcaccaaccucuccggcuucuccuacauggagcucaaggucggcuacaucuccgccaucaaggucaacggcuucaccugcaccggcgucgucaccgaggccgagaccuacaccaacuucgucggcuacgucaccaccaccuucaagcgcaagcacuuccgccccaugcccgacgccugccgcgccgccuacaacuggaagauggccggcgacccccgcuacgaggagucccuccacaaccccuaccccgacuaccacuggcuccgcaccgucaagaccaccaaggagucccucgucaucaucucccccuccgucgccgaccucgaccccuacgacaagucccuccacucccgcgucuuccccggcggcaagugcuccggcaucaccgucuccuccaccugcugcuccaccaaccacgacuacaccaucuggaugcccgagaacccccgccucggcaccuccugcgacaucuucaccaacucccgcggcaagcgcgccuccaagggcggcaagaccugcggcuucgucgacgagcgcggccucuacaagucccucaagggcgccugcaagcucaagcucugcggcguccucggccuccgccucauggacggcaccugggucgccauccagaccuccgacgagaucaaguggugcucccccgaccagcucgucaaccuccacgacuuccacuccgacgagaucgagcaccucgucgucgaggagcucgucaagaagcgcgaggagugccucgacgcccucgagaccaucaugaccaccaaguccgucuccuuccgccgccucucccaccuccgcaagcucguccccggcuucggcaaggccuacaccaucuucaacaagacccucauggaggccgacgcccacuacaaguccauccgcaccuggaacgagaucauccccuccaagggcugccuccgcgucggcggccgcugccacccccacgucaacggcgucuucuucaacggcaucauccucggccccgacggccacguccucauccccgagaugcaguccucccuccuccaccagcacauggagcuccucgaguccuccgucaucccccucaugcacccccucgccgaccccuccaccgucuucaaggacggcgacgaggccgaggacuucgucgagguccaccuccccgacguccacaagcagaucuccggcgucgaccucggccuccccaacuggggcaaguacguccucaucuccgccggcgcccucaccgcccucaugcucaccaucuuccucaugaccugcugccgcaagaccaaccgcgccggcuccauccagcacucccccggcgagaccggccgcaaggucuccgucaccucccacaacggccgcgucaucuccuccugggaguccuacaaguccggcuccgagaccaagcucuga

SEQ ID NO: 127268 - RNA, 1575 nt, Artificial Sequence; identical to SEQ ID NO: 126881
  derived and/or modified CDS sequence (opt2) from glycoprotein__RABV__JN936774.1

SEQ ID NO: 127269 - RNA, 1575 nt, Artificial Sequence; identical to SEQ ID NO: 126882
  derived and/or modified CDS sequence (opt2) from glycoprotein__RABV__JN936775.1

SEQ ID NO: 127270 - RNA, 1575 nt, Artificial Sequence; identical to SEQ ID NO: 126863
  derived and/or modified CDS sequence (opt2) from glycoprotein__RABV__JN936776.1

SEQ ID NO: 127271 - RNA, 1575 nt, Artificial Sequence; identical to SEQ ID NO: 126882
  derived and/or modified CDS sequence (opt2) from glycoprotein__RABV__JN936777.1

SEQ ID NO: 127272 - RNA, 1575 nt, Artificial Sequence; identical to SEQ ID NO: 126882
  derived and/or modified CDS sequence (opt2) from glycoprotein__RABV__JN936778.1

SEQ ID NO: 127273 - RNA, 1575 nt, Artificial Sequence; identical to SEQ ID NO: 127103
  derived and/or modified CDS sequence (opt2) from glycoprotein__RABV__JN936779.1

SEQ ID NO: 127274 - RNA, 1575 nt, Artificial Sequence
  derived and/or modified CDS sequence (opt2) from glycoprotein__RABV__JN936780.1
augaucccccagguccuccucuucgucccccuccucgucuucuccuccugcuucggcaaguuccccaucuacaccauccccgacaagcucggccccuggucccccaucgacauccaccaccucuccugccccaacaaccucgucgucgaggacgagggcugcaccaaccucuccggcuucuccuacauggagcucaaggucggcuacaucuccgccaucaaggucaacggcuucaccugcaccggcgucgucaccgaggccgagaccuacaccaacuucgucggcuacgucaccaccaccuucaagcgcaagcacuuccgccccaugcccgacgccugccgcgccgccuacaacuggaagauggccggcgacccccgcuacgaggagucccuccacaaccccuaccccgacuaccacuggcuccgcaccgucaagaccaccaaggagucccucgucaucaucucccccuccgucgccgaccucgaccccuacgacaagucccuccacucccgcgucuuccccggcggcaagugcuccggcaucaccgucuccuccaccugcugcuccaccaaccacgacuacaccaucuggaugcccgagaacccccgccucggcaccuccugcgacaucuucaccaacucccgcggcaagcgcgccuccaagggcggcaagaccugcggcuucgucgacgagcgcggccucuacaagucccucaagggcgccugcaagcucaagcucugcggcguccucggccuccgccucauggacggcaccugggucgccauccagaccuccgacgagaucaaguggugcucccccgaccagcucgucaaccuccacgacuuccacuccgacgagaucgagcaccucgucgucgaggagcucgucaagaagcgcgaggagugccucgacgcccucgagaccaucaugaccaccaaguccgucuccuuccgccgccucucccaccuccgcaagcucguccccggcuucggcaaggccuacaccaucuucaacaagacccucauggaggccgacgcccacuacaaguccauccgcaccuggaacgagaucauccccuccaagggcugccuccgcgucggcggccgcugccacccccacgucaacggcgucuucuucaacggcaucauccucggccccgacggccacguccucauccccgagaugcaguccucccuccuccaccagcacauggagcuccucgaguccuccgucaucccccucaugcacccccucgccgacccccucaccgucuucaaggacggcgacgaggccgaggacuucgucgagguccaccuccccgacguccacaagcagaucuccggcgucgaccucggccuccccaacuggggcaaguacguccucaucuccgccggcgcccucaccgcccucaugcucaccaucuuccucaugaccugcugccgcaagaccaaccgcgccgaguccauccagcacucccccggcgagaccggccgcaaggucuccgucaccucccacaacggccgcgucaucuccuccugggaguccuacaaguccggcuccgagaccaagcucuga

SEQ ID NO: 127275 - RNA, 1575 nt, Artificial Sequence; identical to SEQ ID NO: 126881
  derived and/or modified CDS sequence (opt2) from glycoprotein__RABV__JN936781.1

SEQ ID NO: 127276 - RNA, 1575 nt, Artificial Sequence; identical to SEQ ID NO: 126881
  derived and/or modified CDS sequence (opt2) from glycoprotein__RABV__JN936782.1

SEQ ID NO: 127277 - RNA, 1575 nt, Artificial Sequence
  derived and/or modified CDS sequence (opt2) from glycoprotein__RABV__JN936783.1
augaucccccagguccuccucuucgucccccuccucgucuucuccuccugcuucggcaaguuccccaucuacaccauccccgacaagcucggccccuggucccccaucgacauccaccaccucuccugccccaacaaccucgucgucgaggacgagggcugcaccaaccucuccggcuucuccuacauggagcucaaggucggcuacaucuccgccaucaaggucaacggcuucaccugcaccggcgucgucaccgaggccgagaccuacaccaacuucgucggcuacgucaccaccaccuucaagcgcaagcacuuccgccccaugcccgacgccugccgcgccgccuacaacuggaagauggccggcgacccccgcuacgaggagucccuccacaaccccuaccccgacuaccacuggcuccgcaccgucaagaccaccaaggagucccucgucaucaucucccccuccgucgccgaccucgaccccuacgacaagucccuccacucccgcgucuuccccggcggcaagugcuccggcaucaccgucuccuccaccugcugcuccaccaaccacgacuacaccaucuggaugcccgagaacccccgccucggcaccuccugcgacaucuucaccaacucccgcggcaagcgcgccuccaagggcggcaagaccugcggcuucgucgacgagcgcggccucuacaagucccucaagggcgccugcaagcucaagcucugcggcguccucggccuccgccucauggacggcaccugggucgccauccagaccuccgacgagaucaaguggugcucccccgaccagcucgucaaccuccacgacuuccacuccgacgagaucgagcaccucgucgucgaggagcucgucaagaagcgcgaggagugccucgacgcccucgagaccaucaugaccaccaaguccgucuccuuccgccgccucucccaccuccgcaagcucguccccggcuucggcaaggccuacaccaucuucaacaagacccucauggaggccgacgcccacuacaaguccauccgcaccuggaacgagaucauccccuccaagggcugccuccgcgucggcggccgcugccacccccacgucaacggcgucuucuucaacggcaucauccucggccccgacggccacguccucauccccgagaugcaguccucccuccuccaccagcacaucgagcuccucgaguccuccgucaucccccucaugcacccccucgccgaccccuccaccgucuucaaggacggcgacgaggccgaggacuucgucgagguccaccuccccgacguccacaagcagaucuccggcgucgaccucggccuccccaacuggggcaaguacguccucaucuccgccggcgcccucaccgcccucaugcucaccaucuuccucaugaccugcugccgcaagaccaaccgcgccgaguccauccagcacucccccggcgagaccggccgcaaggucuccgucaccucccacaacggccgcgucaucuccuccugggaguccuacaaguccggcuccgagaccaagcucuga

SEQ ID NO: 127278 - RNA, 1575 nt, Artificial Sequence
  derived and/or modified CDS sequence (opt2) from glycoprotein__RABV__JN936784.1
augaucccccagguccuccucuucgucccccuccucgucuucuccuccugcuucggcaaguuccccaucuacaccauccccgacaagcucggccccuggucccccaucgacauccaccaccucuccugccccaacaaccucgucgucgaggacgagggcugcaccaaccucuccggcuucuccuacauggagcucaaggucggcuacaucuccgccaucaaggucaacggcuucaccugcaccggcgucgucaccgaggccgagaccuacaccaacuucgucggcuacgucaccaccaccuucaagcgcaagcacuuccgccccaugcccgacgccugccgcgccgccuacaacuggaagauggccggcgacccccgcuacgaggagucccuccacaaccccuaccccgacuaccacuggcuccgcaccgucaagaccaccaaggagucccucgucaucaucucccccuccgucgccgaccucgaccccuacgacaagucccuccacucccgcgucuuccccggcggcaagugcuccggcaucaccgucuccuccaccugcugcuccaccaaccacgacuacaccaucuggaugcccgagaacccccgccucggcaccuccugcgacaucuucaccaacucccgcggcaagcgcgccuccaagggcggcaagaccugcggcuucgucgacgagcgcggccucuacaagucccucaagggcgccugcaagcucaagcucugcggcguccucggccuccgccucauggacggcaccugcgucgccauccagaccuccgacgagaucaaguggugcucccccgaccagcucgucaaccuccacgacuuccacuccgacgagaucgagcaccucgucgucgaggagcucgucaagaagcgcgaggagugccucgacgcccucgagaccaucaugaccaccaaguccgucuccuuccgccgccucucccaccuccgcaagcucguccccggcuucggcaaggccuacaccaucuucaacaagacccucauggaggccgacgcccacuacaaguccauccgcaccuggaacgagaucauccccuccaagggcugccuccgcgucggcggccgcugccacccccacgucaacggcgucuucuucaacggcaucauccucggccccgacggccacguccucauccccgagaugcaguccucccuccuccaccagcacaucgagcuccucgaguccuccgucaucccccucaugcacccccucgccgaccccuccaccgucuucaaggacggcgacgaggccgaggacuucgucgagguccaccuccccgacguccacaagcagaucuccggcgucgaccucggccuccccaacuggggcaaguacguccucaucuccgccggcgcccucaccgcccucaugcucaccaucuuccucaugaccugcugccgcaagaccaaccgcgccgaguccauccagcacucccccggcgagaccggccgcaaggucuccgucaccucccacaacggccgcgucaucuccuccugggaguccuacaaguccggcuccgagaccaagcucuga

SEQ ID NO: 127279 - RNA, 1575 nt, Artificial Sequence; identical to SEQ ID NO: 127120
  derived and/or modified CDS sequence (opt2) from glycoprotein__RABV__JN936786.1

SEQ ID NO: 127280 - RNA, 1575 nt, Artificial Sequence
  derived and/or modified CDS sequence (opt2) from glycoprotein__RABV__JN936788.1
augaucccccaggcccuccucuucgucccccuccucgucgucucccucugcuucggcaaguuccccaucuacaccauccccgacaagcucggccccuggucccccaucgacauccaccaccucuccugccccaacaaccucgucgucgaggacgagggcugcaccaaccucuccggcuucuccuacauggagcucaaggucggcuacaucuccgccaucaaggucaacggcuucaccugcaccggcgucgucaccgaggccgagaccuacaccaacuucgucggcuacgucaccaccaccuucaagcgcaagcacuuccgccccacccccgacgccugccgcuccgccuacaacuggaagauggccggcgacccccgcuacgaggagucccuccacaaccccuaccccgacuaccacuggcuccgcaccgucaagaccaccaaggaguccuucgucaucaucucccccuccgucgccgaccucgaccccuacgacaagucccuccacucccgcgucuucccccgcggcaagugcuccggcaucaccgucuccuccaccuacugcuccaccaaccacgacuacaccaucuggaugcccgagaacccccgccucggcaccuccugcgacaucuucaccaacucccgcggcaagcgcgccuucaagggcuccaagaccugcggcuucgucgacgagcgcggccucuacaagucccucaagggcgccugcaagcucaagcucugcggcguccucggccuccgccucauggacggcaccugggucgccauccagaccuccgacgagaccaaguggugcccccccgaccagcucgucaaccuccacgacuuccacuccgacgagaucgagcaccucgucgucgaggagcucgucaagaagcgcgaggagugccucgacgcccucgaguccaucaugaccaccaaguccgucuccuuccgccgccucucccaccuccgcaagcucguccccggcuucggcaaggccuacaccaucuucaacaagacccucauggaggccgacgcccacuacaaguccguccgcaccuggaacgagaucauccccuccaagggcugccuccgcgucggcggccgcugccacccccacgucaacggcgucuucuucaacggcaucauccucggccccgacggccacguccucauccccgagaugcaguccucccuccuccagcagcacauggagcuccucgaguccuccgucaucccccucaugcacccccucgccgaccccuccaccgucuucaagaacggcgacgaggccgaggacuucgucgagguccaccuccccgacguccacaagcaggucuccggcgucgaccucggccuccccuccuggggcaaguacguccucauguccgccggcguccucaccgcccucaugcucaugaucuuccucaugaccugcugccgccgcaccaaccgccccgaguccauccagcacucccucggcgagaccggccgcaaggucuccgucaccucccagaacggccgcgucaucuccuccugggaguccuacaaguccggcggcgagaccaagcucuga

SEQ ID NO: 127281 - RNA, 1575 nt, Artificial Sequence; identical to SEQ ID NO: 127258
  derived and/or modified CDS sequence (opt2) from glycoprotein__RABV__JN936790.1

SEQ ID NO: 127282 - RNA, 1575 nt, Artificial Sequence; identical to SEQ ID NO: 127120
  derived and/or modified CDS sequence (opt2) from glycoprotein__RABV__JN936791.1

SEQ ID NO: 127283 - RNA, 1575 nt, Artificial Sequence; identical to SEQ ID NO: 126881
  derived and/or modified CDS sequence (opt2) from glycoprotein__RABV__JN936793.1

SEQ ID NO: 127284 - RNA, 1575 nt, Artificial Sequence
  derived and/or modified CDS sequence (opt2) from glycoprotein__RABV__JQ595307.1
augaucccccaggcccuccucuucgucccccuccucauccccucccucugccucggcgaguuccccaucuacaccauccccgacaagcucggccccuggacccccaucgacauccaccaccucuccugccccaacaaccucgucgccgagaacgacggcugcaccucccucuccggcuucuccuacauggagcucaaggucggcuacaucuccgccaucaaggucaacggcuucaccugcaccggcgucgucaccgaggccgagaccuacaccaacuucgucggcuacgucaccaccaccuucaagcgcaagcacuuccgccccaugcccgacgccugccgcgccgcccacgacuggaagauggccggcgacccccgcuacgaggacucccuccagaaccccuaccccgacuaccacuggcuccgcaccgucaagaccaccaaggagucccucgucaucaucucccccuccgucgccgaccucgaccccuacgacaagucccuccacucccgcgucuuccccuccggcaagugccucggcaucaccgucuccuccaccuacugcuccaccaaccacgacuacaccaucuggaugcccgucgagccccgccucggcaccuccugcgacaucuucaccaacucccgcggcaagcgcgccuccaagggcggccgcgucugcggcuucgucgacgagcgcggccucuacaagucccucaagggcgccugcaagcucaagcucugcggcguccccggcauccgccucauggacggcaccugggucuccauccagaccuccgaggacaucaaguggugcccccccgaccgccucgucaaccuccacgacuuccacuccgacgagcucgagcaccucgucgucgaggagcucaucaagcgccgcgagaacugccucgacgcccucgaguccaucaugaccaccaaguccgucuccuuccgccgccucucccaccuccgcaagcucguccccggcuucggcaaggccuacaccaucuucaacaagacccucauggaggccgacgcccacuacaaguccgucaagaccuggaacgaggucauccccuccaagggcugccucgaggucggcggcaagugccacccccccgucaacggcgucuucuucaacggcaucauccucggccccgacggcaacguccucauccccgagaugcaguccucccuccuccagcagcacauggagcuccucgaguccuccgucaucccccucaugcacccccucgccgaccccuccaccgucuucaaggagggcgacgaggccgaggacuucgucgagguccaccuccccgacguccacaagcaggucuccgacgucgaccucggccuccccuccuggggcaaguaccuccucauguccgccggcgcccucgccauccucauccucgccaucguccucaucaucugcugccgccgcgucaacaagaccggcuccacccagcgcggccaccgcgagucccgcggcaagauguccgucgccccccagaacggcaagaucaucuccuccugggagcucuacaaguccgaguccgagaccggccucuga

SEQ ID NO: 127285 - RNA, 1575 nt, Artificial Sequence
  derived and/or modified CDS sequence (opt2) from glycoprotein__RABV__JQ595308.1
augaucccccaggcccuccucuucgucccccuccucauccccucccucugccucggcgaguuccccaucuacaccauccccgacaagcucggccccuggucccccaucgacauccaccaccucuccugccccaacaaccucgucgccgagaacgacggcugcaccucccucuccggcuucuccuacauggagcucaaggucggcuacaucuccgccaucaaggucaacggcuucaccugcaccggcgucgucaccgaggccgagaccuacaccaacuucgucggcuacgucaccaccaccuucaagcgcaagcacuuccgccccacccccgacgccugccgcgccgcccacgacuggaagauggccggcgacccccgcuacgaggccucccuccagaaccccuaccccgacuaccacuggcuccgcaccgucaagaccaccaaggagucccucgucaucaucucccccuccgucgccgaccucgaccccuacgacaagucccuccacucccgcgucuuccccuccggcaagugccucggcaucaccgucuccuccaccuacugcuccaccaaccacgacuacaccaucuggaugcccgucgagccccgccucggcaccuccugcgacaucuucaccaacucccgcggcaagcgcgccuccaagggcggccgcgucugcggcuucgucgacgagcgcggccucuacaagucccucaagggcgccugccgccucaagcucugcggcguccccggcauccgccuccucgacggcaccugggucuccauccagaccuccgaggacaucaaguggugcccccccgaccgccucgucaaccuccacgacuuccacuccgacgagaucgagcaccucgucgucgccgagcucaucaagcgccgcgagaacugccucgacgcccucgaguccaucaugaccaccaaguccgucuccuuccgccgccucucccaccuccgcaagcucguccccggcuucggcaaggccuacaccaucuucaacaagacccucauggaggccgacgcccacuacaaguccgucaagaccuggaacgaggucauccccuccaagggcugccucgaggucggcggccgcugccacccccacgucaacggcgucuucuucaacggcaucauccucggccccgacggcaacguccucauccccgagaugcaguccucccuccuccagcagcacauggagcuccucgaguccuccgucaucccccucaugcacccccucgccgaccccuccaccgucuucaaggagggcgacgaggccgaggacuucgucgagguccaccuccccgacguccacaagcaggucuccgacgucgaccucggccuccccuccuggggcaaguaccuccucaucuccgccggcgcccucgccauccucauccucgccaucguccucaucaucugcugccgccgcgucaacaagaccggcuccacccagcgcggccaccgcgaguccggcggcaagauguccgucgucccccagaacggcaagaucaucuccuccugggagcucuacaaguccgaguccgagaccggccucuga

SEQ ID NO: 127286 - RNA, 1575 nt, Artificial Sequence
  derived and/or modified CDS sequence (opt2) from glycoprotein__RABV__JQ595309.1
augaucccccaggcccuccucuucgucccccuccucauccccucccucugccucggcgaguuccccaucuacaccauccccgacaagcucggccccuggucccccaucgacauccaccaccucuccugccccaacaaccucgucgccgagaacgacggcugcaccucccucuccggcuucuccuacauggagcucaaggucggcuacaucuccgccaucaaggucaacggcuucaccugcaccggcgucgucaccgaggccgagaccuacaccaacuucgucggcuacgucaccaccaccuucaagcgcaagcacuuccgccccacccccgacgccugccgcgccgcccacgacuggaagauggccggcgacccccgcuacgaggccucccuccagaaccccuaccccgacuaccacuggcuccgcaccgucaagaccaccaaggagucccucgucaucaucucccccuccgucgccgaccucgaccccuacgacaagucccuccacucccgcgucuuccccuccggcaagugccucggcaucaccgucuccuccaccuacugcuccaccaaccacgacuacaccaucuggaugcccgucgagccccgccucggcaccuccugcgacaucuucaccaacucccgcggcaagcgcgccuccaagggcggccgcgucugcggcuucgucgacgagcgcggccucuacaagucccucaagggcgccugccgccucaagcucugcggcguccccggcauccgccuccucgacggcaccugggucuccauccagaccuccgaggacaucaaguggugcccccccgaccgccucgucaaccuccacgacuuccacuccgacgagaucgagcaccucgucgucgccgagcucaucaagcgccgcgagaacugccucgacgcccucgaguccaucaugaccaccaaguccgucuccuuccgccgccucucccaccuccgcaagcucguccccggcuucggcaaggccuacaccaucuucaacaagacccucauggaggccgacgcccacuacaaguccgucaagaccuggaacgaggucauccccuccaagggcugccucgaggucggcggccgcugccacccccacgucaacggcgucuucuucaacggcaucauccucggccccgacggcaacguccucauccccgagaugcaguccucccuccuccagcagcacauggagcuccucgaguccuccgucaucccccucaugcacccccucgccgaccccuccaccgucuucaaggagggcgacgaggccgaggacuucgucgagguccaccuccccgacguccacaagcaggucuccgacgucgaccucggccuccccuccuggggcaaguaccuccucaucuccgccggcgcccucgccauccucauccucgccaucguccucaucaucugcugccgccgcgucaagaagaccggcuccacccagcgcggccaccgcgaguccggcggcaagauguccgucgucccccagaacggcaagaucaucuccuccugggagcucuacaaguccgaguccgagaccggccucuga

SEQ ID NO: 127287 - RNA, 1575 nt, Artificial Sequence
  derived and/or modified CDS sequence (opt2) from glycoprotein__RABV__JQ595310.1
augaucccccaggcccuccucuucgucccccuccucaucccccuccucugccgcggcgaguuccccaucuacaccauccccgacaagcucggccccuggucccccaucgacauccaccaccucuccugccccaacaaccucgucgccgagaacgacggcugcaccucccucuccggcuucuccuacauggagcucaaggucggcuacaucuccgccaucaaggucaacggcuucaccugcaccggcgucgucaccgaggccgagaccuacaccaacuucgucggcuacgucaccaccaccuucaagcgcaagcacuuccgccccacccccgacgccugccgcgccgcccacgacuggaagauggccggcgacccccgcuacgaggacucccuccagaaccccuaccccgacuaccacuggcuccgcaccgucaagaccaccaaggagucccucgucaucaucucccccuccgucgccgaccucgaccccuacgacaagucccuccacucccgcgucuuccccuccggcaagugccucggcaucaccgucuccuccaccuacugcuccaccaaccacgacuacaccaucuggaugcccgucgagccccgccucggcaccuccugcgacaucuucaccaacucccgcggcaagcgcgccuccaagggcggccgcgucugcggcuucgucgacgagcgcggccucuacaagucccucaagggcgccugcaagcucaagcucugcggcguccccggcauccgccuccucgacggcaccugggucuccauccagaccuccgaggacaucaaguggugcccccccgaccgccucgucaaccuccacgacuuccacuccgacgagaucgagcaccucgucgucgaggagcucaucaagcgccgcgagaacugccucgacgcccucgaguccaucaugaccaccaaguccgucuccuuccgccgccucucccaccuccgcaagcucguccccggcuucggcaaggccuacaccaucuucaacaacacccucauggaggccgacgcccacuacaaguccgucaagaccuggaacgaggucauccccuccaagggcugccucgaggucggcggccgcugccacccccccgucaacggcgucuucuucaacggcaucauccucggccccgacggcaacguccucauccccgagaugcaguccucccuccuccagcagcacauggagcuccucgaguccuccgucaucccccucaugcacccccucgccgaccccuccaccgucuucaaggagggcgacgaggccgaggacuucgucgagguccaccuccccgacguccacaagcaggucuccgacgucgaccucggccuccccuccuggggcaaguaccuccucauguccgccggcgcccucgccauccucauccucgccaucguccucaucaucugcugccgccgcgucaacaagacccgcuccucccagcgcggccaccgcgaguccggcggcaagauguccgucgccccccagaacggcaagaucaucuccuccugggagcucuacaaguccgaguccgagaccggccucuga

SEQ ID NO: 127288 - RNA, 1575 nt, Artificial Sequence
  derived and/or modified CDS sequence (opt2) from glycoprotein__RABV__JQ595312.1
augaucccccaggcccuccucuucgucccccuccucauccccucccucugccucggcgaguuccccuucuacaccauccccgacaagcucggccccuggucccccaugcacauccaccaccucuccugccccaacaaccucgucgccgaggacgacggcugcaccucccucuccggcuucuccuacauggagcucaaggucggcuacaucuccgccaucaaggucaacggcuucaccugcaccggcgucgucaccgaggccgagaccuacaccaacuucgucggcuacgucaccaccaccuucaagcgcaagcacuuccgccccaugcccgacgccugccgcgccgcccacgacuggaagauggccggcgacccccgcuacgaggacucccuccagaaccccuaccccgacucccacuggcuccgcaccgucaagaccaccaaggagucccucgucaucaucucccccuccgucgccgaccucgaccccuacgacaagucccuccacucccgcgucuuccccuccggcaagugccucggcaucaccgucuccuccaccuacugcuccaccaaccacgacuacaccaucuggaugcccgucgagccccgccucggcaccuccugcgacaucuucaccaacucccgcggcaagcgcgccuccaagggcggccgcgucugcggcuucgucgacgagcgcggccucuacaagucccucaagggcgccugcaagcucaagcucugcggcguccccggcauccgccucauggacggcaccugggucuccauccagaccuccgaggacaucaaguggugcccccccgaccgccucgucaaccuccacgacuuccacuccgacgagaucgagcaccucgucgucgaggagcucaucaagcgccgcgagaacugccucgacgcccucgaguccaucaugaccaccaaguccgucuccuuccgccgccucucccaccuccgcaagcucguccccggcuucggcaaggccuacaccaucuucaacaagacccucauggaggccgacgcccacuacaaguccgucaagaacuggaacgaggucauccccuccaagggcugccucgaggucggcggccgcugccacccccccgucaacggcgucuucuucaacggcaucauccucggccccgacggcaacguccucauccccgagaugcaguccucccuccuccagcagcacauggagcuccucgaguccuccgucaucccccucaugcacccccucgccgaccccuccaccgucuucaaggagggcgacgaggccgaggacuucgucgagguccaccuccccgacguccacaagcaggucuccgacgucgaccucggccuccccuccuggggcaaguaccuccucauguccgccggcgcccucgccauccuccuccucgccaucgucuccaucaucugcugccgccgcgucuccaagacccgcuccacccagcgcggccaccgcgaguccggcggccgcauguccgucgccccccagaacggcaagaucaucuccuccugggagcucuacaaguccgaguccgagaccggccucuga

SEQ ID NO: 127289 - RNA, 1575 nt, Artificial Sequence
  derived and/or modified CDS sequence (opt2) from glycoprotein__RABV__JQ595313.1
augaucccccaggcccuccucuucgucccccuccucauccccucccucggccucggcaaguuccccaucuacaccauccccgacaagcucggccccuggucccccaucgacauccaccaccucuccugccccaacaaccucgucgucgaggacgagggcugcaccucccucuccggcuucuccuacauggagcucaaggucggcuacaucuccuccaucaaggucaacggcuucaccugcaccggcgucgucaccgaggccgagaccuacaccaacuucgucggcuacgucaccaccaccuucaagcgcaagcacuuccgccccaugcccgacgccugccgcgccgcccacgacuggaagaucgccggcgacccccgcuacgaggacucccuccagaaccccuaccccgacuaccacuggcuccgcaccgucaagaccaccaaggagucccucgucaucaucucccccuccgucgccgagcucgaccccuacgacaagucccuccacucccgcgucuuccccuccggcaagugccucggcaucaccgucuccuccaccuacugcuccaccaaccacgacuacaccaucuggaugcccgucgaggcccgccucggcaccuccugcgacaucuucaccaacucccgcggcaagaaggccuccaagggcggccgcaccugcggcuucgucgacgagcgcggccucuacaagucccucaagggcgccugcaagcucaagcucugcggcguccccggccuccgccucauggacggcaccugggucuccauccagaccuccgacgacaucaaguggugcccccccgaccagcucgucaaccuccacgacuuccacuccgacgagaucgagcaccucgucgucgaggagcucaucaagaagcgcgagggcugccucgacgcccucgaguccaucaugaccaccaaguccgucuccuuccgccgccucucccaccuccgcaagcucguccccggcuucggcaaggccuacaccaucuucaacaacacccucauggaggccgacgcccacuacaaguccguccgcaccuggaacgaggucauccccuccaagggcugccucaaggucggcggccgcugccacccccccgucaacggcgucuucuucaacggcaucauccucggccccgacggcaacguccucauccccgagaugcaguccucccuccuccagcagcacauggagcuccucgaguccuccgucaucccccucaugcacccccucgccgaccccuccaccgucuucaaggacggcgacgaggccgaggacuucgucgagguccaccuccccgacguccacaagcaggucuccgacgucgaccucggccuccccuccuggggcaaguaccuccucauguccgccggcgcccucgccacccucauccucgccaucuuccucaucaccugcugccgccgcgccaaccgcaccgaguccacccagcgcggccaccgcgaguccggcggcaaggucuccgucgccccccagaacggcaagaucaucuccuccugggagcucuacaaguccgaguccgagaccggcauguga

SEQ ID NO: 127290 - RNA, 1575 nt, Artificial Sequence
  derived and/or modified CDS sequence (opt2) from glycoprotein__RABV__JQ595315.1
augaucccccaggcccuccucuucgucccccuccucauccccucccucugccucggcaaguuccccaucuacaccauccccgacaagcucggccccuggucccccaucgacauccaccaccucuccugccccaacaaccucgucgccgaggacgagggcugcaccucccucuccggcuucuccuacauggagcucaaggucggcuacaucuccgccaucaaggucaacggcuucaccugcaccggcgucgucaccgaggccgagaccuacaccaacuucgucggcuacgucaccaccaccuucaagcgcaagcacuuccgccccaugcccgacgccugccgcgccgcccacgacuggaagauggccggcgacccccgcuacgaggacucccuccagaaccccuaccccgacuaccacuggcuccgcaccgucaagaccaccaaggagucccucgucaucaucucccccuccgucgccgaccucgaccccuacgacaagucccuccacucccgcgucuuccccuccggcaagugccucggcaucaccgucuccuccaccuacugcuccaccaaccacgacuacaccaucuggaugcccgucgaggcccgccucggcaccuccugcgacaucuucaccaacuccaagggcaagaaggccuccaagggcggccgcaccugcggcuucgucgacgagcgcggccucuacaagucccucaagggcgccugcaagcucaagcucugcggcguccccggccuccgccucauggacggcaccugggucuccauccagaccuccgacgacaucaaguggugcccccccgaccagcucgucaaccuccacgacuuccacuccgacgagaucgagcaccucgucgucgaggagcucaucaagaagcgcgagggcugccucgacgcccucgaguccaucaugaccaccaaguccgucuccuuccgccgccucucccaccuccgcaagcucguccccggcuucggcaaggccuacaccaucuucaacaacacccucauggaggccgacgcccacuacaaguccguccgcaccuggaacgaggucauccccuccaagggcugccucaaggucggcggccgcugccacccccccgucaacggcgucuucuucaacggcaucauccucggccccgacggcaacguccucauccccgagaugcaguccucccuccuccagcagcacauggagcuccucgaguccuccgucaucccccucaugcacccccucgccgaccccuccaccgucuucaaggacggcgacgaggccgaggacuucgucgagguccaccuccccgacguccacaagcaggucuccgagaucgaccucggccuccccuccuggggcaaguaccuccucauguccgccggcguccucgccacccucauccucgccaucuuccucaucaccugcugccgccgcgccaaccgcaccgaguccacccagcgcggccgccgcgaguccggcggcaaggucuccgucgccccccagaacgucaagaucaucuccuccugggagcucuacaaguccgaguccgagaccggccucuga

SEQ ID NO: 127291 - RNA, 1575 nt, Artificial Sequence
  derived and/or modified CDS sequence (opt2) from glycoprotein__RABV__JQ595316.1
augaucccccaggcccuccucuucgucccccuccucauccccucccucugccucggcaacuuccccaucuacaccauccccgacaagcucggccccuggucccccaucgacauccaccaccucuccugccccaacaaccucgucgccgaggacgagggcugcaccucccucuccggcuucuccuacauggagcucaaggucggcuacaucuccgccaucaaggucaacggcuucaccugcaccggcgucgucaccgaggccgagaccuacaccaacuucgucggcuacgucaccaccaccuucaagcgcaagcacuuccgccccaugcccgacgccugccgcgccgcccacgacuggaagauggccggcgacccccgcuacgaggacucccuccagaaccccuaccccgacuaccacuggcuccgcaccgucaagaccaccaaggagucccucgucaucaucucccccuccgucgccgaccucgaccccuacgacaagucccuccacucccgcgucuuccccuccggcaagugccucggcaucaccgucuccuccaccuacugcuccaccaaccacgacuacaccaucuggaugcccgucgaggcccgccucggcaccuccugcgacaucuucaccaacuccaagggcaagaaggccuccaagggcggccgcaccugcggcuucgucgacgagcgcggccucuacaagucccucaagggcgccugcaagcucaagcucugcggcguccccggccuccgccucauggacggcaccugggucuccauccagaccuccgacgacaucaaguggugcccccccgaccagcucgucaaccuccacgacuuccacuccgacgagaucgagcaccucgucgucgaggagcucaucaagaagcgcgagggcugccucgacgcccucgaguccaucaugaccaccaaguccgucuccuuccgccgccucucccaccuccgcaagcucguccccggcuucggcaaggccuacaccaucuucaacaacacccucauggaggccgacgcccacuacaaguccguccgcaccuggaacgaggucauccccuccaagggcugccucaaggucggcggccgcugccacccccccgucaacggcgucuucuucaacggcaucauccucggccccgacggcaacguccucauccccgagaugcaguccucccuccuccagcagcacauggagcuccucgaguccuccgucaucccccucaugcacccccucgccgaccccuccaccgucuucaaggacggcgacgaggccgaggacuucgucgagguccaccuccccgacguccacaagcaggucuccgagaucgaccucggccuccccuccuggggcaaguaccuccucauguccgccggcguccucgccacccucauccucgccaucuuccucaucaccugcugccgccgcgccaaccgcaccgaguccacccagcgcggccgccgcgaguccggcggcaaggucuccgucgccccccagaacggcaagaucaucuccuccugggagcucuacaaguccgaguccgagaccggccucuga

SEQ ID NO: 127292 - RNA, 1575 nt, Artificial Sequence
  derived and/or modified CDS sequence (opt2) from glycoprotein__RABV__JQ595317.1
augaucccccaggcccuccucuucgucccccuccucaucuccucccucugcuucggcaaguuccccaucuacaccauccccgacaagcucggccccuggucccccaucgacauccaccaccucugcugccccaacaaccucgucgccgaggaggagggcugcaccucccucuccggcuucuccuacauggagcucaaggucggcuacaucuccgccaucaaggucaacggcuucaccugcaccggcgucgucaccgaggccgagaccuacaccaacuucgucggcuacgucaccaccaccuucaagcgcaagcacuuccgccccaugcccgacgccugccgcgccgccuacgacuggaagauggccggcgacccccgcuacgaggacucccuccagaaccccuaccccgacuaccacuggcuccgcaccgucaagaccaccaaggagucccucaucaucaucucccccuccgucgccgaccucgaccccuacgacaagucccuccacucccgcgucuuccccggcggcaagugccucggcaucaccaucuccuccaccuacugcuccaccaaccacgacuacaccaucuggaugcccgaggaggcccgccucggcaccuccugcaacaucuucaccaacucccgcggcaagaaggccuccaagggcggccgcaccugcggcuucgucgacgagcgcggccucuacaagucccucaagggcgccugcaagcucaagcucugcggcguccccggccuccgccucauggacggcaccugggucuccauccagaccuccaacgagaccaaguggugcccccccgaccagcucgucaaccuccacgacuuccacuccgacgagaucgagcaccucgucgucgaggagcucgucaagaagcgcgaggagugccucgacgcccucgaguccaucaugaccaccaaguccgucuccuuccgccgccucucccaccuccgcaagcucguccccggcuucggcaaggccuacaccaucuucaacaagacccucauggaggccgacgcccacuacaaguccguccgcaccuggaacgagaucauccccuccaagggcugccucaaggucggcggccgcugccacccccacgucgacggcgucuucuucaacggcaucauccucggccccgacggccacguccucauccccgagaugcaguccucccuccuccagcagcacauggagcuccucgaguccuccgucaucccccucauccacccccucgccgaccccuccaccgucuucaaggacggcgacgaggccgacgacuucgucgagguccaccuccccgacguccacaagcaggucuccggcgucgaccucggccuccccggcuggggcaaguaccuccucauguccgccggcgcccucgccacccucauccucaccaucuuccucaucaagugcugccgcggcgucaaccgcaccgaguccguccagcgcucccuccgcgacuccggcggcaaggucuccguccccccccagaacggcaaggucaucuccuccugggagcucuacaaguccggcggcgagaccggccucuga

SEQ ID NO: 127293 - RNA, 1575 nt, Artificial Sequence
  derived and/or modified CDS sequence (opt2) from glycoprotein__RABV__JQ595319.1
augaucccccaggcccuccucuccgucccccuccucaucuccucccucugccucggcaaguuccccaucuacaccauccccgacaagcucggccccuggucccccaucgacauccaccaccucuccugccccaacaaccucgucgucgaggacgagggcugcaccucccucuccggcuucuccuacauggagcucaaggucggcuacaucuccgccaucaaggucaacggcuucaccugcaccggcgucgucaccgaggccgagaccuacaccaacuucgucggcuacgucaccaccaccuucaagcgcaagcacuuccgccccaugcccgacgccugccgcgccgcccacgaguggaagauggccggcgacccccgcuacgaggacucccuccagaaccccuaccccgacuaccacuggcuccgcaccgucaagaccaccaaggagucccucaucaucaucucccccuccgucgccgaccucgaccccuacgacaagucccuccacucccgcgucuuccccggcggcaacugccucggcaucaccaucuccuccaccuacugcuccaccaaccacgacuacaccaucuggaugcccgaggaggcccgccucggcaccuccugcgacaucuucaccaacucccgcggcaagcgcgccuccaagggcggcaagaucugcggcuucgucgacgagcgcggccucuacaagucccucaagggcgccugcaagcucaagcucugcggcguccccggccuccgccucauggacggcaccugggucuccauccagaccuccgacgagaccaaguggugcccccccgaccagcucgucaacguccacgacuuccacuccgacgagaucgagcaccucaucgucgaggagcucgucaagaagcgcgaggagugccucgacgcccucgaguccaucaugaccaccaaguccgucuccuuccgccgccucucccaccuccgcaagcucguccccggcuucggcaaggccuacaccaucuucaacaacacccucauggaggccgacgcccacuacaaguccguccgcaccuggaacgagaucauccccuccaagggcugccucaaggucggcggcaugugccacccccacgucggcggcgucuucuucaacggcaucauccucggccccgacggcaccguccucauccccgagaugcaguccucccuccuccagcagcacauggagcuccucgaguccuccgucaucccccucaugcacccccucgccgaccccuccaccgucuucaaggagggcgacgaggccgaggacuucgucgagauccaccuccccgacguccacaagcagaucuccggcgucgaccucggccuccccuccuggggcaaguaccuccucaucuccgccggcgcccucgccacccucauccucaccaucuuccucaucaccugcugccgcaaggucaaccgcaccgaguccauccagcgcggccacggcgaguccgagcgcaaggucuccgucuccccccagaacggccgcgucaucuccuccugggagcucuacaaguccggcggcgagaccaaccucuga

SEQ ID NO: 127294 - RNA, 1575 nt, Artificial Sequence
  derived and/or modified CDS sequence (opt2) from glycoprotein__RABV__JQ595320.1
augaucuuccaggcccuccucuucgucccccuccucaucuccucccucugccucggcaaguuccccaucuacaccauccccgacaagcucggccccuggucccccaucgacauccaccaccucuccugccccaacaaccucgucgucgaggacgagggcugcaccucccucuccggcuucuccuacauggagcucaaggucggcuacaucuccgccaucaaggucaacggcuucaccugcaccggcgucgucaccgaggccgagaccuacaccaacuucgucggcuacgucaccaccaccuucaagcgcaagcacuuccgccccauccccgacgccugccgcgccgccuacaacuggaagaucgccggcgacccccgcuacgaggagucccuccagaaccccuaccccgacuaccacuggcuccgcaccgucaagaccaccaaggagucccucaucaucaucucccccuccgucgccgaccucgaccccuacgacaagucccuccacucccgccucuuccccggcggcaagugccucggcaucaccaucuccuccaccuacugcuccaccaaccacgacuacaccaucuggaugcccgaggagccccgccucggcaccuccugcgacaucuucaccaacuccaagggcaagaaggccuccaagggcggcaaggucugcggcuucgucgacgagcgcggccucuacaagucccucaagggcgccugcaagcucaagcucugcggcgucuccggccuccgccucauggacggcaccugggucaccauccagaccuccgacgagaccaaguggugcccccccgaccagcucgucaaccuccacgacuuccacuccgacgagaucgagcaccucgucgucgaggagcucgucaagaagcgcgaggagugccucgacgcccucgaguccaucaugaccaccaaguccgucuccuuccgccgccucuccuaccuccgcaagcucguccccggcuucggcaaggccuacaccaucuucaacaagacccucauggaggccgacgcccacuacaaguccguccgcaccuggaacgagaucauccccuccaagggcugccucaaggucuccgaccgcugccacccccacgucgacggcgucuucuucaacggcaucauccucggccccgacggcaacguccucauccccgagaugcaguccucccuccuccagcagcacauggagcuccucgaguccuccgucaucccccucaugcacccccucgccgaccccuccaccgucuucaaggacggcgacgaggccgaggacuucgucgagguccaccuccccgacguccacaagcagaucuccggcgucgaccucggccuccccuccuggggcaaguaccuccucaugaucgccggcggccucgccacccucguccucaucaucuuccucauggccugcugccgccgcaccaagcgcaccgagucccgcccccgcggcuccggcgaguccggcgagaagguccucgccaccccccagcccaagaaggucgucuccuccugggagcucuacaagcgcgagggcgacgcccgccucuga

SEQ ID NO: 127295 - RNA, 1575 nt, Artificial Sequence
  derived and/or modified CDS sequence (opt2) from glycoprotein__RABV__JQ595321.1
augaucuuccaggcccuccucuucgucccccuccucaucuccucccucugccucggcaaguuccccaucuacaccauccccgacaagcucggccccuggucccccaucgacauccaccaccucuccugccccaacaaccucgucgucgaggacgagggcugcaccucccucuccggcuucuccuacauggagcucaaggucggcuacaucuccgccaucaaggucaacggcuucaccugcaccggcgucgucaccgaggccgagaccuacaccaacuucgucggcuacgucaccaccaccuucaagcgcaagcacuuccgccccauccccgacgccugccgcgccgccuacaacuggaagaucgccggcgacccccgcuacgaggagucccuccagaaccccuaccccgacuaccacuggcuccgcaccgucaagaccaccaaggagucccucaucaucaucucccccuccgucgccgaccucgaccccuacgacaagucccuccacucccgccucuuccccggcggcaagugccucggcaucaccaucuccuccaccuacugcuccaccaaccacgacuacaccaucuggaugcccgaggagccccgccucggcaccuccugcgacaucuucaccaacuccaagggcaagaaggccuccaagggcggcaaggucugcggcuucgucgacgagcgcggccucuacaagucccucaagggcgccugcaagcucaagcucugcggcgucuccggccuccgccucauggacggcaccugggucaccauccagaccuccgacgagaccaaguggugcccccccgaccagcucgucaaccuccacgacuuccacuccgacgagaucgagcaccucgucgucgaggagcucgucaagaagcgcgaggagugccucgacgcccucgaguccaucaugaccaccaaguccgucuccuuccgccgccucuccuaccuccgcaagcucguccccggcuucggcaaggccuacaccaucuucaacaagacccucauggaggccgacgcccacuacaaguccguccgcaccuggaacgagaucauccccuccaagggcugccucaaggucuccgaccgcugccacccccacgucgacggcgucuucuucaacggcaucauccucggccccgacggcaacguccucauccccgagaugcaguccucccuccuccagcagcacauggagcuccucgaguccuccgucaucccccucaugcacccccucgccgaccccuccaccgucuucaaggacggcgacgaggccgaggacuucgucgagguccaccuccccgacguccacaagcagaucuccggcgucgaccucggccuccccuccuggggcaaguaccuccucaugaucgccggcggccucgccacccucguccucaucaucuuccucauggccugcugccgccgcaccaagcgcaccgagucccgccgccgcgcccucggcgaguccggcgagaagguccucgccaccccccagcccaagaaggucgucuccuccugggagcucuacaagcgcgagggcgacgcccgccucuga

SEQ ID NO: 127296 - RNA, 1575 nt, Artificial Sequence
  derived and/or modified CDS sequence (opt2) from glycoprotein__RABV__JQ595322.1
augaucccccaggcccuccucuccgucccccuccucaucuccucccucugcuucggcaaguuccccaucuacaccauccccgagaagcucggccccuggucccccaucgacauccaccaccucuccugccccaacaaccucgucgucgaggacgagggcugcaacucccucuccggcuucuccuacauggagcucaaggucggcuacaucuccgccaucaaggucaacggcuucaccugcaccggcgucgucaccgaggccgagaccuacaccaacuucgucggcuacgucaccaccaccuucaagcgcaagcacuuccgccccaugcccgacgccugccgcgccgccuacaacuggaagaccgccggcgacccccgcuacgaggagucccuccacaaccccuaccccgacuaccacuggcuccgcaccgucaagaccaccaaggagucccucaucaucaucucccccuccgucgccgaccucgaccccuacgacaagucccuccacucccgcaucuuccccggcggcaagugccucggcaucaccaucuccuccaccuacugcuccaccaaccacgacuacaccaucuggaugcccgaggaggcccgccucggcaccuccugcgacaucuucaccaacuccaagggcaagcgcgccuccaagggcggccgcaccugcggcuucgucgacgagcgcggccucuacaagucccucaagggcgccugcaagcucaagcucugcggcguccccggccuccgccucauggacggcaccugggucgccauccagacccccaacgagaccaaguggugcucccccgaccagcucgucaacguccacgacuuccgcuccgacgagaucgagcaccucgucgucgaggagcucauccgcaagcgcgaggagugccucgacgcccucgaguccaucaugaccaccaaguccgucuccuuccgccgccucuccaaccuccgcaagcucguccccggcuucggcaaggccuacaccaucuucaacaagacccucauggaggccgacgcccacuacaaguccguccgcaccuggaacgagaucauccccucccgcggcugccucaaggucggcggccgcugccacccccacgucaacggcgucuucuucaacggcaucauccucggccccgacggccacauccucauccccgagaugcaguccucccuccuccagcagcacauggagcuccucgaguccuccgucaucccccucauccacccccucgccgaccccuccaccgucuucaaggacggcgacgaggccgaggacuucgucgagguccaccuccccgacguccaccagcaggucuccggcgucgaccucggccuccccgacuggggcaaguacguccucauguccgccggcgcccucgccaccgucaugcucaccaucuuccucaucaccugcugccgccgcgucaagcgcaccgaguccauccaccagggccucggcgaguccggccgcaaggucuccgucaccccccagaacggcaaggucauguccuccugggaguacuacaaguccgagggcggcacccgccucuga

SEQ ID NO: 127297 - RNA, 1575 nt, Artificial Sequence
  derived and/or modified CDS sequence (opt2) from glycoprotein__RABV__JQ595323.1
augaucucccaggccguccucuacgucccccuccucauccccucccucugcaucggcgaguuccccaucuacaccauccccgacaagaucggccccuggucccccaucgacauccaccaccucuccugccccaacaaccucgucgucgaggacgagggcugcaccucccucuccggcuucuccuacauggagcucaaggucggcuacaucuccgccaucaaggucaacggcuucaccugcaccggcgucgucaccgaggccgagaccuacaccaacuucgucggcuacgucaccaccaccuucaagcgcaagcacuuccgccccaugcccgacgccugccgcgccgccuacaacuggaagauggccggcgacccccgcuacgaggagucccuccagaaccccuaccccgacuacaacuggcuccgcaccgucaagaccaccaaggagucccucaucaucaucucccccuccgucgccgaccucgaccccuacgacaagucccuccacucccgcgucuuccccaacggcaagugccucggcgucaccaucuccuccaccuacugcuccaccaaccacgacuacaccaucuggaugcccgaggaggcccgccucggcaccuccugcgacaucuucaccaacuccaagggcaagcgcgccuccaagggcggccgcaccugcggcuucgucgacgagcgcggccucuacaagucccuccgcggcgccugcaagcucaagcucugcggcguccccggccuccgccucauggacggcaccugggucuccauccagaccuccgacgacaccaaguggugcccccccgaccagcucgucaacguccacgacuuccacuccgacgagaucgagcaccucgucgucgaggagcucgucaagaagcgcgaggagugccucgacgcccucgaguccaucaugaccaccaaguccgucuccuuccgccgccucucccaccuccgcaagcucguccccggcuucggcaaggccuacaccaucuucaacaagacccucauggaggccgacgcccacuacaaguccauccagaccuggaacgagaucauccccuccaagggcugccucaaggucggcggcaugugccacccccacgucgacggcgucuucuucaacggcaucauccucggccccgacggcaacguccucauccccgagaugcaguccucccuccuccagcagcacauggagcuccucgaguccuccgucaucccccucaugcacccccucgccgaccccuccaccgucuucaaggacggcgacgaggccgaggacuucgucgagguccaccuccccgacauccacaagcaggucuccggcaucgaccucggccuccccgacuggggcaaguaccuccucauguccgccggcgcccucgccauccuccuccucaccaucuuccucaugaccugcugccgccgcgucaaccgcaccaaguccgcccagcgcgaccccggcgagcucggccgcaaggucuccgccaccccccagaaccgcaaggucaucuccuccugggagcucuacaaguccggcggcgacacccgccucuga

SEQ ID NO: 127298 - RNA, 1575 nt, Artificial Sequence
  derived and/or modified CDS sequence (opt2) from glycoprotein__RABV__JQ595324.1
augaucccccaggcccuccucuccgucccccuccucaucuccucccucugcuucggcaaguuccccaucuacaccauccccgagaagcucggccccuggucccccaucgacauccaccaccucuccugccccaacaaccucgucgucgaggacgagggcugcaacucccucuccggcuucuccuacauggagcucaaggucggcuacaucuccgccaucaaggucaacggcuucaccugcaccggcgucgucaccgaggccgagaccuacaccaacuucgucggcuacgucaccaccaccuucaagcgcaagcacuuccgccccaugcccgacgccugccgcgccgccuacaacuggaagaccgccggcgacccccgcuacgaggagucccuccacaaccccuaccccgacuaccacuggcuccgcaccgucaagaccaccaaggagucccucaucaucaucucccccuccgucgccgaccucgaccccuacgacaagucccuccacucccgcaucuuccccggcggcaagugccucggcaucaccaucuccuccaccuacugcuccaccaaccacgacuacaccaucuggaugcccgaggaggcccgccucggcaccuccugcgacaucuucaccaacuccaagggcaagcgcgccuccaagggcggccgcaccugcggcuucgucgacgagcgcggccucuacaagucccucaagggcgccugcaagcucaagcucugcggcguccccggccuccgccucauggacggcaccugggucgccauccagacccccaacgagaccaaguggugcucccccgaccagcucgucaacguccacgacuuccgcuccgacgagaucgagcaccucgucgucgaggagcucauccgcaagcgcgaggagugccucgacgcccucgaguccaucaugaccaccaaguccgucuccuuccgccgccucuccaaccuccgcaagcucguccccggcuucggcaaggccuacaccaucuucaacaagacccucauggaggccgacgcccacuacaaguccguccgcaccuggaacgagaucauccccucccgcggcugccucaaggucggcggccgcugccacccccacgucaacggcgucuucuucaacggcaucauccucggccccgacggccacauccucauccccgagaugcaguccucccuccuccagcagcacauggagcuccucgaguccuccgucaucccccucauccacccccucgccgaccccuccaccgucuucaaggacggcgacgaggccgaggacuucgucgagguccaccuccccgacguccaccagcaggucuccggcgucgaccucggccuccccgacuggggcaaguacguccucauguccgccggcgcccucgccaccgucaugcucaccaucuuccucaucaccugcugccgccgcgucaagcgcaccgaguccguccaccagggccucggcgaguccggccgcaaggucuccgucgccccccagaacggcaaggucauguccuccugggaguacuacaaguccggcggcggcacccgccucuga

SEQ ID NO: 127299 - RNA, 1575 nt, Artificial Sequence
  derived and/or modified CDS sequence (opt2) from glycoprotein__RABV__JQ595325.1
augaucccccaggcccuccucuccgucccccuccucaucuccucccucugcuucggcaaguuccccaucuacaccauccccgagaagcucggccccuggucccccaucgacauccaccaccucuccugccccaacaaccucgucgucgaggacgagggcugcaacucccucuccggcuucuccuacauggagcucaaggucggcuacaucuccgccaucaaggucaacggcuucaccugcaccggcgucgucaccgaggccgagaccuacaccaacuucgucggcuacgucaccaccaccuucaagcgcaagcacuuccgccccauggccgacgccugccgcgccgccuacaacuggaagaccgccggcgacccccgcuacgaggagucccuccacaaccccuaccccgacuaccacuggcuccgcaccgucaagaccaccaaggagucccucaucaucaucucccccuccgucgccgaccucgaccccuacgacaagucccuccacucccgcaucuuccccggcggcaagugccucggcaucaccaucuccuccaccuacugcuccaccaaccacgacuacaccaucuggaugcccgaggaggcccgccucggcaccuccugcgacaucuucaccaacuccaagggcaagcgcgccuccaagggcggccgcaccugcggcuucgucgacgagcgcggccucuacaagucccucaagggcgccugcaagcucaagcucugcggcguccccggccuccgccucauggacggcaccugggucgccauccagacccccaacgagaccaaguggugcucccccgaccagcucgucaacguccacgacuuccgcuccgacgagaucgagcaccucgucgucgaggagcucauccgcaagcgcgaggagugccucgacgcccucgaguccaucaugaccaccaaguccgucuccuuccgccgccucuccaaccuccgcaagcucguccccggcuucggcaaggccuacaccaucuucaacaagacccucauggaggccgacgcccacuacaaguccguccgcaccuggaacgagaucauccccucccgcggcugccucaaggucggcggccgcugccacccccacgucaacggcgucuucuucaacggcaucauccucggccccgacggccacauccucauccccgagaugcaguccucccuccuccagcagcacauggagcuccucgaguccuccgucaucccccucauccacccccucgccgaccccuccaccgucuucaaggacggcgacgaggccgaggacuucgucgagguccaccuccccgacguccaccagcaggucuccggcgucgaccucggccuccccgacuggggcaaguacguccucauguccgccggcgcccucgccaccgucaugcucaccaucuuccucaucaccugcugccgccgcgucaagaagaccgaguccauccaccagggccccggcgaguccggccgcaaggucuccgucaccccccagaacggcaaggucauguccuccugggaguacuacaaguccggcggcggcacccgccucuga

SEQ ID NO: 127300 - RNA, 1575 nt, Artificial Sequence
  derived and/or modified CDS sequence (opt2) from glycoprotein__RABV__JQ595326.1
augaucccccaggcccuccucuucgucccccuccucuuccccucccucugccucggcaaguuccccaucuacaccauccccgagaagcucggccccuggucccccaucgacauccaccaccucuccugccccaacaaccucgucgucgaggacgagggcugcgacucccucuccggcuucuccuacaucgagcucaaggucggcuacaucuccgccaucaaggucaacggcuucaccugcaccggcgucgucaccgaggccgagaccuacaccaacuucgucggcuacgucaccaccaccuucaagcgcaagcacuuccgccccaugcccgacgccugccgcgccgccuacaacuggaagaccgccggcgacccccgcuacgaggagucccuccacaaccccuaccccgacuaccacuggcuccgcaccgucaagaccaccaaggagucccucaucaucaucucccccuccgucgccgaccucgaccccuacgacaagucccuccacucccgcgucuuccccggcggcaagugccucggcaucaccgucuccuccaccuacugcuccaccaaccacgacuacaccaucuggaugcccgaggaggcccgccucggcaccuccugcgacaucuucaccaacuccaagggcaagcgcgccuccaagggcggccgcaccugcggcuucgucgacgagcgcggccucuacaagucccucaagggcgccugcaagcucaagcucugcggcguccccggccuccgccucauggacggcaccugggucgccauccagacccccggcgagaccaaguggugcucccccgaccagcucgucaaccuccacgacuuccgcuccgacgagaucgagcaccucgucgucgaggagcucaucaagaagcgcgaggagugccucgacgcccucgaguccaucaugaccaccaaguccgucuccuuccgccgccucuccaaccuccgcaagcucguccccggcuucggcaaggccuacaccaucuucaacaagacccucauggaggccgacgcccacuacaaguccguccgcaccugggacgagaucauccccuccaagggcugccuccgcgucggcggccgcugccacccccacgucaacggcgucuucuucaacggcaucauccucggccccgacggccacguccucauccccgagaugcaguccucccuccuccagcagcacauggagcuccucgaguccuccgucaucccccucauccacccccucgccgaccccuccaccgucuucaaggacggcgacgaggccgaggacuucgucgagguccaccuccccgacguccacaagcaggucuccggcgucgaccucggccuccccaacuggggcaaguacguccucauguccgccggcguccucgccaccgucauccucaccaucuuccuccucaccugcugccgccgcgucaaccgcaccaagcccaagcagcagucccucgaggaguccggccgcaaggucuccgucaccccccagaacggcaaggucauguccuccugggaguacuacaaguccgagggccgcaccucccucuga

SEQ ID NO: 127301 - RNA, 1575 nt, Artificial Sequence
  derived and/or modified CDS sequence (opt2) from glycoprotein__RABV__JQ595327.1
augauccuccaggcccuccucuucgucccccuccucaucuccucccucugcuucggcgacuuccccaucuacaccauccccgagaagcucggccccuggucccccaucgacauccaccaccucuccugccccaacaaccucgucgucgaggacgagggcugcuccucccucuccggcuucuccuacauggagcucaaggucggcuacaucuccgccaucaaggucaacggcuucaccugcaccggcgucgucaccgaggccgagaccuacaccaacuucgucggcuacgucaccaccaccuucaagcgcaagcacuuccgccccaugcccgacgccugccgcgccgccuacaacuggaagaccgccggcgacccccgcuacgaggagucccuccagaaccccuaccccgacuaccacuggcuccgcaccgucaagaccaccaaggagucccucgucaucaucucccccuccgucgccgaccucgaccccuacgacaagucccuccacucccgcgucuucuccgacggcaagugccucggcaucaccaucuccuccaccuacugcuccaccaaccacgacuacaccaucuggaugcccgaggaggcccgccucggcaccuccugcgacaucuucaccaccucccgcggcaagcgcgccuccaagggcggcaagaccugcggcuucgucgacgagcgcggccucuacaagucccucaagggcgccugcaagcucaagcucugcggcgucuccggccuccgccucauggacggcaccugggucuccauccaggcccccgacgaggccaaguggugcuccaccgaccagcucgucaacauccacgacauccgcuccgacgagaucgagcaccucgucgucgaggagcucgucaagaagcgcgaggagugccucgacgcccucgaguccaucaugaccaccaaguccgucuccuuccgccgccucucccaccuccgcaagcucguccccggcuucggcaaggccuacaccaucuucaacaagacccucauggaggccgacgcccacuacaaguccguccgcaccugguccgaggucauccccuccaagggcugccucuccgucggcggccgcugccacccccacgagaacggcgucuucuucaacggcaucauccucggccccgacggcuccguccucauccccgagaugcaguccucccuccuccagcagcacauggagcuccucgaguccuccgucaucccccucaugcacccccucgccaaccccuccaccgucuucaaggacggcgacgaggccgaggacuucgucgagguccaccuccccgacguccaggagcagaucuccggcgucgaccucggccuccccaacuggggcaaguacgucaugauguccgccggcgcccucgccauccucaugcucaccaucuuccucaugaccugcugccgccgcgccaaccgcacccgcuccacccagcgcgaccucggcggccucgagcgcaaggucuccgucccccccaaggacggccgcgucauguccuccugggaguccuacaaguccggcggcgagaccucccucuga

SEQ ID NO: 127302 - RNA, 1575 nt, Artificial Sequence
  derived and/or modified CDS sequence (opt2) from glycoprotein__RABV__JQ595328.1
augaucacccaggcccuccucuucgucccccuccucaucuccucccucugccucggccaguuccccaucuacaccauccccgacaagcucggccccuggucccccaucgacauccaccaccucuccugccccaacaaccucgucgucgaggacgagggcugcaacucccucuccggcuucuccuacauggagcucaaggucggcuacaucuccuccaucaaggucaacggcuucaccugcaccggcgucgucaccgaggccgagaccuacaccaacuucgucggcuacgucaccaccaccuucaagcgcaagcacuuccgccccaugcccgacgccugccgcgccgccuacuccuggaagauggccggcgacccccgcuacgaggagucccuccacacccccuaccccgacuaccacuggcuccgcaccgucaagaccaccaaggagucccucgucaucaucucccccuccgucgccgaccucgaccccuacgacaagucccuccacucccgcgucuucuccggcggcaagugccucggcaucaccaucuccuccaccuacugcuccaccaaccacgacuacaccaucuggaugcccgaggaggcccgccucggcaccuccugcgacaucuucaccaacuccaagggcaagcgcgccuccaagggcggccgcaccugcggcuucgucgacgagcgcggccucuacaagucccucaagggcgccugcaagcucaagcucugcggcguccccggccuccgccucauggacggcaccugggucuccauccagaccuccgacgagaccaaguggugcccccccgaccagcucgucaacauccacgacuuccgcuccgacgagaucgagcaccucgucgucgaggagcucgucaagaagcgcgaggagugccucgacgcccucgaguccaucaugaccaccaaguccgucuccuuccgccgccucucccaccuccgcaagcucguccccggcuucggcaaggccuacaccaucuucaacaagacccucauggaggccgacgcccacuacaaguccguccgcaccuggaacgagaucauccccuccaagggcugccucuccgucggcggccgcugccacccccacgucaacggcgucuucuucaacggcaucauccucggccccgacggcuccguccucauccccgagaugcaguccucccuccuccagcagcacauggagcuccucgaguccuccgucaucccccucaugcacccccucgccaaccccuccaccgucuucaaggacggcgacgaggccgaggacuucgucgagguccaccuccccgacguccaggagcaggucuccggcgucgaccucggccuccccaacuggggcaaguacguccucauguccgccggcguccucgccauccucauccucaccaucuuccucaugaucugcugccgccgcgccaaccgcaccaaguccauccagcagggccccggcgaguccggccgcaaggucuccguccccccccagaacggcaaggucaucuccuccugggaguccuucaaguccggcggcgagacccgccucuga

SEQ ID NO: 127303 - RNA, 1575 nt, Artificial Sequence
  derived and/or modified CDS sequence (opt2) from glycoprotein__RABV__JQ647510.1
augaucccccagguccuccucuucgucccccuccucgucuucuccuccugcuucggcaaguuccccaucuacaccauccccgacaagcucggccccuggucccccaucgacauccaccaccucuccugccccaacaaccucgucgucgaggacgagggcugcaccaaccucuccggcuucuccuacauggagcucaaggucggcuacaucuccgccaucaaggucaacggcuucaccugcaccggcgucgucaccgaggccgagaccuacaccaacuucgucggcuacgucaccaccaccuucaagcgcaagcacuuccgccccaugcccgacgccugccgcaccgccuacaacuggaagauggccggcgacccccgcuacgaggagucccuccacaaccccuaccccgacuaccacuggcuccgcaccgucaagaccaccaaggagucccucgucaucaucucccccuccgucgccgaccucgaccccuacgacaagucccuccacucccgcgucuuccccggcggcaagugcuccggcaucaccgucuccuccacccgcugcuccaccaaccacgacuacaccaucuggaugcccgagaacccccgccucggcaccuccugcgacaucuucaccaacucccgcggcaagcgcgccuccaagggcggcaagaccugcggcuucgucgacgagcgcggccucuacaagucccucaagggcgccugcaagcucaagcucugcggcguccucggccuccgccucauggacggcaccugggucgccauccagaccuccgacgagaucaaguggugcucccccgaccagcucgucaaccuccacgacuuccacuccgacgagaucgagcaccucgucgucgaggagcucgucaagaagcgcgaggagugccucgacgcccucgagaccaucaugaccaccaaguccgucuccuuccgccgccucucccaccuccgcaagcucguccccggcuucggcaaggccuacaccaucuucaacaagacccucauggaggccgacgcccacuacaaguccauccgcaccuggaacgagaucauccccuccaagggcugccuccgcgucggcggccgcugccacccccacgucaacggcgucuucuucaacggcaucauccucggccccgacggccacguccucauccccgagaugcaguccucccuccuccaccagcacauggagcuccucgaguccuccgucaucccccucaugcacccccucgccgaccccuccaccgucuucaaggacggcgacgaggccgaggacuucgucgagguccaccuccccgacguccacaagcagaucuccggcgucgaccucggccuccccaacuggggcaaguacguccucaucuccgccggcucccucaccgcccucaugcucaugaucuuccucaugaccugcugccgcaagaccaaccgcgccgaguccauccagcacucccccggcgagaccggccgcaaggucuccgucaccucccacaacggccgcgucaucuccuccugggaguccuacaaguccggcggcgagaccaagcucuga

SEQ ID NO: 127304 - RNA, 1575 nt, Artificial Sequence
  derived and/or modified CDS sequence (opt2) from glycoprotein__RABV__JQ685892.1
augaucccccaggcccuccucuacgucccccuccucaucuccucccucugcuucggcggcuuccccaucuacaccauccccgacaagcucggccccuggucccccaucgacauccaccaccucuccugccccaacaaccucgucgucgaggacgagggcugcaccucccucuccggcuucuccuacauggagcucaaggucggcuacaucuccgccaucaaggucaacggcuucaccugcaccggcgucgucaccgaggccgagaccuacaccaacuucgucggcuacgucaccaccaccuucaagcgcaagcacuuccgccccaugcccgacgccugccgcgccgccuacaacuggaagauggccggcgacccccgcuacgaggagucccuccagaaccccuaccccgacuacuccuggcuccgcaccgucaagaccaccaaggagucccucaucaucaucucccccuccgucgccgaccucgaccccuacgacaagucccuccacucccgcgucuuccccggcggcaagugccucggcaucaccaucuccuccaccuacugcuccaccaaccacgacuacaccaucuggaugcccgaggaggcccgccucggcaccuccugcgacaucuucaccaacucccgcggcaagcgcgccuccaagggcggcaagaccugcggcuucgucgacgagcgcggccucuacaagucccucaagggcgccugcaagcucaagcucugcggcguccccggccuccgccucauggacggcaccugggucaccauccagaccuccgacgagaccaaguggugccccuccgaccagcucgucaaccuccacgacuuccacuccgacgagaucgagcaccucgucgucgaggagcucgucaagaagcgcgaggagugccucgacgcccucgaguccaucaugaccaccaaguccgucuccuuccgccgccucucccaccuccgcaagcucguccccggcuucggcaaggccuacaccaucuucaacaagacccucauggaggccgacgcccacuacaaguccauccgcaccuggaacgagaucauccccuccaagggcugccucaaggucggcggccgcugccacccccacgucgacggcgucuucuucaacggcaucauccucggccccgacggcaacguccucauccccgagaugcaguccucccuccuccagcagcacgucgagcuccucgaguccuccgucaucccccucaugcacccccucgccgaccccuccaccgucuucaaggacggcgacgaggccgaggacuucgucgagguccaccuccccgacauccacaagcaggucuccggcgucgaccucggccuccccaacuggggcaaguaccuccucauguccgccggcgcccucgccacccucaugcucaucaucuuccucauggccugcugccgccgcgccaaccgcaccgaguccauccagcgcgaccccggcgaguccggccgcaaggucuccauccccucccaggacggcaaggucaucuccuccugggagcucuacaaguccggcggcgagacccgccucuga

SEQ ID NO: 127305 - RNA, 1575 nt, Artificial Sequence
  derived and/or modified CDS sequence (opt2) from glycoprotein__RABV__JQ685893.1
augaucccccaggcccuccucuacgucccccuccucauccccucccucugcuucggcggcuuccccaucuacaccauccccgacaagcucggccccuggucccccaucgacauccaccaccucuccugccccaacaaccucgucgucgaggacgagggcugcaccucccucuccggcuucuccuacauggagcucaaggucggcuacaucuccgccaucaaggucaacggcuucaccugcaccggcgucgucaccgaggccgagaccuacaccaacuucgucggcuacgucaccaccaccuucaagcgcaagcacuuccgccccaugcccgacgccugccgcgccgccuacaacuggaaggucgccggcgacccccgcuacgaggagucccuccagaaccccuaccccgacuacuccuggcuccgcaccgucaagaccaccaaggagucccucaucaucaucucccccuccgucgccgaccucgaccccuacgacaagucccuccacucccgcgucuuccccggcggcaagugccucggcaucaccaucuccuccaccuacugcuccaccaaccacgacuacaccaucuggaugcccgaggaggcccgccucggcaccuccugcgacaucuucaccaacucccgcggcaagcgcgccuccaagggcggcaagaccugcggcuucgucgacgagcgcggccucuacaagucccucaagggcgccugcaagcucaagcucugcggcguccccggccuccgccucauggacggcaccugggucaccauccagaccuccgacgagaccaaguggugccccuccgaccagcucgucaaccuccacgacuuccacuccgacgagaucgagcaccucgucgucgaggagcucgucaagaagcgcgaggagugccucgacgcccucgaguccaucaugaccaccaaguccgucuccuuccgccgccucucccaccuccgcaagcucguccccggcuucggcaaggccuacaccaucuucaacaagacccucauggaggccgacgcccacuacaaguccauccgcaccuggaacgagaucauccccuccaagggcugccucaaggucggcggccgcugccacccccacgucgacggcgucuucuucaacggcaucauccucggccccgacggcaacguccucauccccgagaugcaguccucccuccuccagcagcacgucgagcuccucgaguccuccgucaucccccucaugcacccccucgccgaccccuccaccgucuucaaggacggcgacgaggccgaggacuucgucgagguccaccuccccgacauccacaagcaggucuccggcgucgaccucggccuccccaacuggggcaaguaccuccucauguccgccggcgcccucgccacccucaugcucaccaucuuccucaugaccugcugccgccgcgccaaccgcaccgaguccauccagcgcgaccccggcgaguccggcaagaaggucuccaucaccucccaggacggcaaggucaucuccuccugggagcucuacaaguccggcggcgagacccgccucuga

SEQ ID NO: 127306 - RNA, 1575 nt, Artificial Sequence
  derived and/or modified CDS sequence (opt2) from glycoprotein__RABV__JQ685894.1
auguucccccaggcccuccucuucgucucccuccucaucuccucccucugcuucggcaaguuccccaucuacaccauccccgacaagcucggccccuggucccccaucgacauccaccaccucuccugccccaacaaccucgucgucgaggacgagggcugcaccaaccucuccggcuucuccuacauggagcucaaggucggcuacaucuccgccaucaaggucaacggcuucaccugcaccggcgucgucaccgaggccgagaccuacaccaacuucaucggcuacgucaccaccgucuucaagcgcaagcacucccgccccacccccgacgccugccgcgccgccuacaacuggaagauggccggcgacccccgcuacgaggagucccuccacaaccccuaccccgacuaccacuggcuccgcaccgucaagaccaccaaggagucccucgucaucaucucccccuccgucgccgaccucgaccccuacgacaagucccuccacucccgcgucuuccccuccggcaagugcuccggcaucaccgucuccuccaccuacugccucaccaaccacgaguacaccaucuggaugcccgagaaccuccgccucggcaccuccugcgacaucuucaccaacucccgcggcaagcgcgccucccgcggcuccaagaccugcggcuucgucgacgagcgcggccucuacaagucccucaagggcgccugcaagcucaagcucugcggcguccucggccuccgccucauggacggcaccugggucgccaugcagaccuccgacgagaccaaguggugcccccccgaccagcucgucaaccuccacgacuuccgcuccgacgagaucgagcaccucgucgucgaggagcucgucaagaagcgcgaggagugccucgacgccaucgaguccaucaugaccaccaaguccgucuccuuccgccgccucucccaccuccgcaagcucguccccggcuucggcaaggccuacaccaucuucaacaagacccucauggaggccgacgcccacuacaaguccguccgcaccuggaacgagaucauccccuccaagggcugccuccgcgucggcggccgcugccacccccacgucaagggcgucuucuucaacggcaucauccucggccccgacggccacguccucauccccgagaugcaguccucccuccuccagcagcacauggagcuccucgaguccuccaucaucccccucaugcacccccucgccgaccccuccgccgucuucaaggacggcgacgaggccgaggacuucgucgagguccaccuccccgacguccacaagcaggucuccggcgucgaccucggccuccccaacuggggcaaguacauccucgucuccgccggcgcccucaucgcccucaugcucaucaucuuccucaugaccugcuuccgcggcuucaaccuccccaaguccacccagcacucccucggcgagaccgagcgcaagauguccgucaccccccaguccggcaagaucaucuccuccugggaguccuacaaguccggcggcgagacccgccucuga

SEQ ID NO: 127307 - RNA, 1575 nt, Artificial Sequence
  derived and/or modified CDS sequence (opt2) from glycoprotein__RABV__JQ685896.1
augaucccccaggcccuccucuacgucccccuccucaucuccucccucugcuucggcggcuuccccaucuacaccauccccgacaagcucggccccuggucccccaucgacauccaccaccucuccugccccaacaaccucgucgucgaggacgagggcugcaccucccucuccggcuucuccuacauggagcucaaggucggcuacaucuccgccaucaaggucaacggcuucaccugcaccggcgucgucaccgaggccgagaccuacaccaacuucgucggcuacgucaccaccaccuucaagcgcaagcacuuccgccccaugcccgacgccugccgcgccgccuacaacuggaagauggccggcgacccccgcuacgaggagucccuccagaaccccuaccccgacuacuccuggcuccgcaccgucaagaccaccaaggagucccucaucaucaucucccccuccgucgccgaccucgaccccuacgacaagucccuccacucccgcgucuuccccggcggcaagugccucggcaucaccaucuccuccaccuacugcuccaccaaccacgacuacaccaucuggaugcccgaggaggcccgccucggcaccuccugcgacaucuucaccaacucccgcggcaagcgcgccuccaagggcggcaagaccugcggcuucgucgacgagcgcggccucuacaagucccucaagggcgccugcaagcucaagcucugcggcguccccggccuccgccucauggacggcaccugggucaccauccagaccuccgacgagaccaaguggugccccuccgaccagcucgucaaccuccacgacuuccacuccgacgagaucgagcaccucguccucgaggagcucgucaagaagcgcgaggagugccucgacgcccucgaguccaucaugaccaccaaguccgucuccuuccgccgccucucccaccuccgcaagcucguccccggcuucggcaaggccuacaccaucuucaacaagacccucauggaggccgacgcccacuacaaguccauccgcaccuggaacgagaucauccccuccaagggcugccucaaggucggcggccgcugccacccccacgucgacggcgucuucuucaacggcaucauccucggccccgacggcaacguccucauccccgagaugcaguccucccuccuccagcagcacgucgagcuccucgaguccuccgucaucccccucaugcacccccucgccgaccccuccaccgucuucaaggacggcgacgaggccgaggacuucgucgagguccaccuccccgacauccacaagcaggucuccggcgucgaccucggccuccccaacuggggcaaguaccuccucauguccgccggcgcccucgccacccucaugcucaucaucuuccucauggccugcugccgccgcgccaaccccaccgaguccauccagcgcgaccccggcgaguccggccgcaaggucuccauccccucccaggacggcaaggucaucuccuccugggagcucuacaaguccggcggcgagacccgccucuga

SEQ ID NO: 127308 - RNA, 1575 nt, Artificial Sequence
  derived and/or modified CDS sequence (opt2) from glycoprotein__RABV__JQ685897.1
augaucccccaggcccuccucuacgucccccuccucaucuccucccucugcuucggcggcuuccccaucuacaccauccccgacaagcucggccccuggucccccaucgacauccaccaccucuccugccccaacaaccucgucgucgaggacgagggcugcaccucccucuccggcuucuccuacauggagcucaaggucggcuacaucuccgccaucaaggucaacggcuucaccugcaccggcgucgucaccgaggccgagaccuacaccaacuucgucggcuacgucaccaccaccuucaagcgcaagcacuuccgccccaugcccgacgccugccgcgccgccuacaacuggaaggucgccggcgacccccgcuacgaggagucccuccagaaccccuaccccgacuacuccuggcuccgcaccgucaagaccaccaaggagucccucaucaucaucucccccuccgucgccgaccucgaccccuacgacaagucccuccacucccgcgucuuccccggcggcaagugccucggcaucaccaucuccuccaccuacugcuccaccaaccacgacuacaccaucuggaugcccgaggaggcccgccucggcaccuccugcgacaucuucaccaacucccgcggcaagcgcgccuccaagggcggcaagaccugcggcuucgucgacgagcgcggccucuacaagucccucaagggcgccugcaagcucaagcucugcggcguccccggccuccgccucauggacggcaccugggucaccauccagaccuccgacgagaccaaguggugccccuccgaccagcucgucaaccuccacgacuuccacuccgacgagaucgagcaccucgucgucgaggagcucgucaagaagcgcgaggagugccucgacgcccucgaguccaucaugaccaccaaguccgucuccuuccgccgccucucccaccuccgcaagcucguccccggcuucggcaaggccuacaccaucuucaacaagacccucauggaggccgacgcccacuacaaguccauccgcaccuggaacgagaucauccccuccaagggcugccucaaggucggcggccgcugccacccccacgucgacggcgucuucuucaacggcaucauccucggccccgacggcaacguccucauccccgagaugcaguccucccuccuccagcagcacgucgagcuccucgaguccuccgucaucccccucaugcacccccucgccgaccccuccaccgucuucaaggacggcgacgaggccgaggacuucgucgagguccaccuccccgacauccacaagcaggucuccggcgucgaccucggccuccccaacuggggcaaguaccuccucaucuccgccggcgcccucgccacccucaugcucaccaucuuccucaugaccugcugccgccgcgccaaccgcaccgaguccauccagcgcgaccccggcgagcccggcaagaaggucuccaucaccucccaggacggcaaggucaucuccuccugggagcucuacaaguccggcggcgagacccgccucuga

SEQ ID NO: 127309 - RNA, 1575 nt, Artificial Sequence; identical to SEQ ID NO: 127304
  derived and/or modified CDS sequence (opt2) from glycoprotein__RABV__JQ685898.1

SEQ ID NO: 127310 - RNA, 1575 nt, Artificial Sequence
  derived and/or modified CDS sequence (opt2) from glycoprotein__RABV__JQ685899.1
auggucccccaggcccuccucuucgucccccuccucgucuuccccuccugccucggcaaguuccccaucuacaccauccccgacaagcucggccccuggucccccaucgacauccaccaccucuccugccccaacaaccucgucgucgaggacgagggcugcaacaaccucuccggcuucuccuacauggagcucaaggucggcuacaucuccgccaucaaggucaacggcuucaccugcaccggcgucgucaccgaggccgagaccuacaccaacuucgucggcuacgucaccaccaccuucaagcgcaagcacuuccgccccacccccgacgccugccgcgccgccuacaacuggaagauggccggcgacccccgcuacgaggagucccuccacacccccuaccccgacuaccacuggcuccgcaccgucaagaccaccaaggagucccucgucaucaucucccccuccgucgccgaccucgaccccuacgacaagucccuccacucccgcgucuuccccuccggcaagugcuccggcaugaccgucuccuccaccugcugcuccaccaaccacgacuacaccaucuggaugcccgagaacccccgccucggcaccuccugcgacaucuucaccaacucccgcggcaagcgcgccuccaagggcuccaagaccugcggcuucgucgacgagcgcggccucuacaagucccucaagggcgccugcaagcucaagcucugcggcguccucggccuccgccucauggacggcaccugggucgccaugcagaucuccgacgagaccaaguggugcccccccgaccagcucgucaaccuccacgacuuccgcuccgacgagaucgagcaccucgucgucgaggagcucgucaagaagcgcgaggagugccucgacgcccucgaguccaucaugaccaccaaguccgucuccuuccgccgccucucccaccuccgcaagcucguccccggcuucggcaaggccuacaccaucuucaaccgcacccucauggaggccgacgcccacuacaaguccguccgcaccuggaacgaggucauccccuccaagggcugccuccgcgucggcggccgcugccacccccacgucaacggcgucuucuucaacggcaucauccucggccccgacggccacguccucauccccgagaugcaguccucccuccuccagcagcacauggagcuccucgaguccuccgucaucccccucaugcacccccucgccaaccccuccaccgucuucaaggagggcgacgaggccgaggacuucgucgagguccaccuccccgacguccacaagcaggucuccggcgucgaccucggccuccccaacuggggcaaguacguccucauguccgccggcgcccucaucgcccucaugcucaucaucuuccucaugaccugcugccgccgcgucucccgccccgaguccaugcagcgcucccucggcggcaccggccgcaaggucuccgccgccucccaguccggcaaggucaucuccuccugggaguccuacaaguccggcggcgagacccgccucuga

SEQ ID NO: 127311 - RNA, 1575 nt, Artificial Sequence
  derived and/or modified CDS sequence (opt2) from glycoprotein__RABV__JQ685900.1
augaucccccaggcccuccucuucgucccccuccucauccccucccucugccucggcgaguuccccaucuacaccauccccgacaagcucggccccuggauccccaucgacauccaccaccucuccugccccaacaaccucgucgccgagaacgacggcugcaacucccucuccggcuucuccuacauggagcucaaggucggcuacaucuccgccaucaaggucaacggcuucaccugcaccggcgucgucaccgaggccgagaccuacaccaacuucgucggcuacgucaccaccaccuucaagcgcaagcacuuccgccccaugcccgacgccugccgcgccgcccacgacuggaagauggccggcgacccccgcuacgaggacucccuccagaaccccuaccccgacuaccacuggcuccgcaccgucaagaccaccaaggagucccucgucaucaucucccccuccgucgccgaccucgaccccuacgacaagucccuccacucccgcgucuuccccuccggcaagugccucggcaucaccgucuccuccaccuacugcuccaccaaccacgacuacaccaucuggaugcccgucgagccccgccucggcaccuccugcgacaucuucaccaacucccgcggcaagcgcgccuccaagggcggcaaggucugcggcuucgucgacgagcgcggccucuacaagucccucaagggcgccugcaagcucaagcucugcggcguccccggcauccgccucauggacggcaccugggucuccauccagaccuccgaggacaucaaguggugcccccccgaccgccucgucaaccuccacgacuuccacuccgacgagaucgagcaccucgucgucgaggagcucaucaagcgccgcgagaacugccucgacgcccucgaguccaucaugaccaccaaguccgucuccuuccgccgccucucccaccuccgcaagcucguccccggcuucggcaaggccuacaccaucuucaacaagacccucauggaggccgacgcccacuacaaguccgucaagaccuggaacgaggucauccccuccaagggcugccucgaggucggcggccgcugccacccccccgucaacggcgucuucuucaacggcaucauccucggccccgacggcaacguccucauccccgagaugcaguccucccuccuccagcagcacauggagcuccucgaguccuccgucaucccccucaugcacccccucgccgaccccuccaccgucuucaaggagggcgacgaggccgaggacuucgucgagguccaccuccccgacguccacaagcaggucuccgacgucgaccucggccuccccuccuggggcaaguaccuccucauguccgccggcgcccucgccauccucauccucgccaucguccucaucaucugcugccgccgcgucaacaagaccggcuccacccagcgcggccaccgcgaguccggcggcaagauguccgucgccccccagaacggcaagaucaucuccuccugggagcucuacaaguccgaguccgagaccggccucuga

SEQ ID NO: 127312 - RNA, 1575 nt, Artificial Sequence
  derived and/or modified CDS sequence (opt2) from glycoprotein__RABV__JQ685901.1
augguccccuggguccuccucuucguccccuuccucaucuccucccucugcuucggcaaguuccccaucuacaccauccccgacaagcucggccccuggucccccaucgacauccaccaccucuccugccccaacaaccucgucgucgaggacgagggcugcaacucccucuccggcuucuccuacauggagcucaaggucggcuacaucuccgccaucaaggucaacggcuucaccugcaccggcgucgucaccgaggccgagaccuacaccaacuucgucggcuacgucaccaccaccuucaagcgcaagcacuuccgccccaugcccgacgccugccgcuccgccuacaacuggaagauggccggcgacccccgcuacgaggagucccuccacaaccccuaccccgacuaccacuggcuccgcaccgucaagaccaccaaggagucccucaucaucaucucccccuccgucgccgaccucgaccccuacgacaagucccuccacucccgcaucuuccccggcggcaagugcaccggccucaccgucuccuccaccuacugcuccaccaaccacgacuacaccaucuggaugcccgagaaggccggccucggcaccuccugcgacaucuucaccaacuccaagggcaagcgcgccuccaagggcggcaagaccugcggcuucgucgacgagcgcggccucuacaagucccucaagggcgccugcaagcucaagcucugcggcgucuccggccuccgccucauggacggcaccugggucgccauccagacccucgacgagaccaaguggugcucccccgaccagcucgucaaccuccacgacuuccacuccgacgagcucgagcaccucgucgucgaggagcucguccgcaagcgcgaggagugccucgacgcccucgaguccaucaugaccaccaaguccgucuccuuccgccgccucucccaccuccgcaagcucguccccggcuucggcaaggccuacaccaucuucaacaagacccucauggaggccgacgcccacuacaaguccguccgcaccugguccgagaucauccccuccaagggcugccuccgcgucggcggccgcugccacccccacgucaacggcgucuucuucaacggcaucauccucggccccgacggccacguccucauccccgagaugcaguccucccuccuccagcagcacgucgagcuccucgaguccuccgucaucccccucaugcacccccucgccgaccccuccgccgucuucaaggacggcgacgaggccgaggacuucgucgagguccaccuccccgacguccacaagcagaucuccggcgucgaccucggccuccccuccuggggcaaguacaugcucaugaucgccggcgcccucaugacccucaugcucuucaucuuccucaugaccugcugccgccgcgucaaccgcaccgaguccauccgccagggcccccgcgagcucgaguccaaggucuccgucaccccccagaaccgcaaggucaucuccuccugggaguccuacaaguccggcggcgagaccaagcucuga

SEQ ID NO: 127313 - RNA, 1575 nt, Artificial Sequence
  derived and/or modified CDS sequence (opt2) from glycoprotein__RABV__JQ685902.1
augaucccccaggcccuccucuucgucccccuccucauccccucccucugccucggcgaguuccccaucuacaccauccccgacaagcucggccccuggucccccaucgacauccaccaccucuccugccccaacaaccucgucgccgagaacgacggcugcaccucccucuccggcuucuccuacauggagcucaaggucggcuacaucuccgccaucaaggucaacggcuucaccugcaccggcgucgucaccgaggccgagaccuacaccaacuucgucggcuacgucaccaccaccuucaagcgcaagcacuuccgccccacccccgacgccugccgcgccgcccacgacuggaagauggccggcgacccccgcuacgaggccucccuccagaaccccuaccccgacuaccacuggcuccgcaccgucaagaccaccaaggagucccucgucaucaucucccccuccgucgccgaccucgaccccuacgacaagucccuccacucccgcgucuuccccuccggcaagugccucggcaucaccgucuccuccaccuacugcuccaccaaccacgacuacaccaucuggaugcccgucgagccccgccucggcaccuccugcgacaucuucaccaacucccgcggcaagcgcgccuccaagggcggccgcgucugcggcuucgucgacgagcgcggccucuacaagucccucaagggcgccugccgccucaagcucugcggcguccccggcauccgccuccucgacggcaccugggucuccauccagaccuccgaggacaucaaguggugcccccccgaccgccucgucaaccuccacgacuuccacuccgacgagaucgagcaccucgucgucgccgagcucaucaagcgccgcgagaacugccucgacgcccucgaguccaucaugaccaccaaguccgucaccuuccgccgccucacccaccuccgcaagcucguccccggcuucggcaaggccuacaccaucuucaacaagacccucauggaggccgacgcccacuacaaguccgucaagaccuggaacgaggucauccccuccaagggcugccucgaggucggcggccgcugccacccccacgucaacggcgucuucuucaacggcaucauccucggccccgacggcaacguccucauccccgagaugcaguccucccuccuccagcagcacauggagcuccucgaguccuccgucaucccccucaugcacccccucgccgaccccuccaccgucuucaaggagggcgacgaggccgaggacuucgucgagguccaccuccccgacguccacaagcaggucuccgacgucgaccucggccuccccuccuggggcaaguaccuccucaucuccgccggcgcccucgccauccucauccucgccaucguccucaucaucugcugccgccgcgucaacaagaccggcuccacccagcgcggccaccgcgaguccggcggcaagauguccgucgucccccagaacggcaagaucaucuccuccugggagcucuacaaguccgaguccgagaccggccucuga

SEQ ID NO: 127314 - RNA, 1575 nt, Artificial Sequence
  derived and/or modified CDS sequence (opt2) from glycoprotein__RABV__JQ685903.1
augauccuccaggcccuccucuucgucccccuccucaucuccucccucugcuucggcggcuuccccaucuacaccauccccgacaagcucggccccuggucccccaucgacauccaccaccucuccugccccaacaaccucgucgucgaggacgagggcugcaccucccucuccggcuucuccuacauggagcucaaggucggcuacaucuccgccaucaaggucaacggcuucaccugcaccggcgucgucaccgaggccgagaccuacaccaacuucgucggcuacgucaccaccaccuucaagcgcaagcacuuccgccccaugcccgacuccugccgcgccgccuacaacuggaagaccgccggcgacccccgcuacgaggagucccuccagaaccccuaccccgacuaccacuggcuccgcaccgucaagaccaccaaggagucccucaucaucaucucccccuccgucgccgaccucgaccccuacgacaagucccuccacucccgcgucuuccccggcggcaagugccucggcaucaccgucuccuccaccuacugcuccaccaaccacgacuacaccaucuggaugcccgaggaggcccgccucggcaccuccugcgacaucuucaccaacucccgcggcaagcgcgccuccaagggcggccgcaccugcggcuucgucgacgagcgcggccucuacaagucccucaagggcgccugcaagcucaagcucugcggcguccucggccuccgccucauggacggcaccugggucaccauccacaccuccaacgagaccaaguggugccccuccgaccagcucgucaaccuccacgacuuccacuccgacgagaucgagcaccucgucgucgaggagcucgucaagaagcgcgaggagugccucgacgcccucgaguccaucaugaccaccaaguccgucuccuuccgccgccucucccaccuccgcaagcucguccccggcuucggcaaggccuacaccaucuucaacaagacccucauggaggccgacgcccacuacaaguccauccgcaccuggaacgagaucauccccuccaagggcugccucaaggucggcggccgcugccacccccacgucgacggcgucuucuucaacggcaucauccucggccccgacggcaacguccucauccccgagaugcaguccucccuccuccagcagcacgucgagcuccucgaguccuccgucaucccccucaugcacccccucgccgaccccuccaccgucuucaaggacggcgacgaggccgaggacuucgucgagguccaccuccccgacguccacaagcaggucuccggcgucgaccucggccuccccaacuggggcaaguaccuccucauguccgccggcguccucgccacccucaugcucaccaucuuccucaucaccugcugccgccgcgucgaccgcaccgaguccauccagcgcggccccggcgagcucggccgcgagauguccgucaccucccagaacggcaaggucaucuccuccugggagcucuacaaguccggcggcgagacccgccucuga

SEQ ID NO: 127315 - RNA, 1575 nt, Artificial Sequence
  derived and/or modified CDS sequence (opt2) from glycoprotein__RABV__JQ685905.1
augaucuuccaggcccuccucuucgucccccuccucaucuccucccucugccucggcaaguuccccaucuacaccauccccgacaagcucggccccuggucccccaucgacauccaccaccucuccugccccaacaaccucgucgucgaggacgagggcugcaccucccucuccggcuucuccuacauggagcucaaggucggcuacaucuccgccaucaaggucaacggcuucaccugcaccggcgucgucaccgaggccgagaccuacaccaacuucgucggcuacgucaccaccaccuucaagcgcaagcacuuccgccccauccccgacgccugccgcgccgccuacaacuggaagaucgccggcgacccccgcuacgaggagucccuccagaaccccuaccccgacuaccacuggcuccgcaccgucaagaccaccaaggagucccucaucaucaucucccccuccgucgccgaccucgaccccuacgacaagucccuccacucccgccucuuccccggcggcaagugccucggcaucaccaucuccuccaccuacugcuccaccaaccacgacuacaccaucuggaugcccgaggagccccgccucggcaccuccugcgacaucuucaccaacuccaagggcaagaaggccuccaagggcggcaaggucugcggcuucgucgacgagcgcggccucuacaagucccucaagggcgccugcaagcucaagcucugcggcgucuccggccuccgccucauggacggcaccugggucaccauccagaccuccgacgagaccaaguggugcccccccgaccagcucgucaaccuccacgacuuccacuccgacgagaucgagcaccucgucgucgaggagcucgucaagaagcgcgaggagugccucgacgcccucgaguccaucaugaccaccaaguccgucuccuuccgccgccucuccuaccuccgcaagcucguccccggcuucggcaaggccuacaccaucuucaacaagacccucauggaggccgacgcccacuacaaguccguccgcaccuggaacgagaucauccccuccaagggcugccucaaggucuccgaccgcugccacccccacgucgacggcgucuucuucaacggcaucauccucggccccgacggcaacguccucauccccgagaugcaguccucccuccuccagcagcacauggagcuccucgaguccuccgucaucccccucaugcacccccucgccgaccccuccaccgucuucaaggacggcgacgaggccgaggacuucgucgagguccaccuccccgacguccacaagcagaucuccggcgucgaccucggccuccccuccuggggcaaguaccuccucaugaucgccggcggccucgccacccucguccucaucaucuuccucauggccugcugccgccgcaccaagcgcaccgagucccgccgccgcggcuccggcgaguccggcgagaagguccucgccaccccccagcccaagaaggucgucuccuccugggagcucuacaagcgcgagggcgacgcccgccucuga

SEQ ID NO: 127316 - RNA, 1575 nt, Artificial Sequence
  derived and/or modified CDS sequence (opt2) from glycoprotein__RABV__JQ685906.1
augaucccccaggcccuccucuacgucccccuccucauccccucccucugcuucggcggcuuccccaucuacaccauccccgacaagcucggccccuggucccccaucgacauccaccaccucuccugccccaacaaccucgucgucgaggacgagggcugcaccucccucuccggcuucuccuacauggagcucaaggucggcuacaucuccgccaucaaggucaacggcuucaccugcaccggcgucgucaccgaggccgagaccuacaccaacuucgucggcuacgucaccaccaccuucaagcgcaagcacuuccgccccaugcccgacgccugccgcgccgccuacaacuggaaggucgccggcgacccccgcuacgaggagucccuccagaaccccuaccccgacuacuccuggcuccgcaccgucaagaccaccaaggagucccucaucaucaucucccccuccgucgccgaccucgaccccuacgacaagucccuccacucccgcgucuuccccggcggcaagugccucggcaucaccaucuccuccaccuacugcuccaccaaccacgacuacaccaucuggaugcccgaggaggcccgccucggcaccuccugcgacaucuucaccaacucccgcggcaagcgcgccuccaagggcggcaagaccugcggcuucgucgacgagcgcggccucuacaagucccucaagggcgccugcaagcucaagcucugcggcguccccggccuccgccucauggacggcaccugggucaccauccagaccuccgacgagaccaaguggugccccuccgaccagcucgucaaccuccacgacuuccacuccgacgagaucgagcaccucgucgucgaggagcucgucaagaagcgcgaggagugccucgacgcccucgaguccaucaugaccaccaaguccgucuccuuccgccgccucucccaccuccgcaagcucguccccggcuucggcaaggccuacaccaucuucaacaagacccucauggaggccgacgcccacuacaaguccauccgcaccuggaacgagaucauccccuccaagggcugccucaaggucggcggccgcugccacccccacgucgacggcgucuucuucaacggcaucauccucggccccgacggcaacguccucauccccgagaugcaguccucccuccuccagcagcacgucgagcuccucgaguccuccgucaucccccucaugcacccccucgccgaccccuccaccgucuucaaggacggcgacgaggccgaggacuucgucgagguccaccuccccgacauccacaagcaggucuccggcgucgaccucggccuccccaacuggggcaaguaccuccucauguccgccggcgcccucgccacccucaugcucaccaucuuccucaugaccugcugccgccgcgccaaccgcaccgaguccauccagcgcgaccccggcgaguccggcaagaaggucuccaccaccucccaggacggcaaggucaucuccuccugggagcucuacaaguccggcggcgagacccgccucuga

SEQ ID NO: 127317 - RNA, 1575 nt, Artificial Sequence
  derived and/or modified CDS sequence (opt2) from glycoprotein__RABV__JQ685907.1
augaucccccaggcccuccucuacgucccccuccucaucuccucccucugcuucggcggcuuccccaucuacaccauccccgacaagcucggccccuggucccccaucgacauccaccaccucuccugccccaacaaccucgucgucgaggacgagggcugcaccucccucuccggcuucuccuacauggagcucaaggucggcuacaucuccgccaucaaggucaacggcuucaccugcaccggcgucgucaccgaggccgagaccuacaccaacuucgucggcuacgucaccaccaccuucaagcgcaagcacuuccgccccaugcccgacgccugccgcgccgccuacaacuggaagaucgccggcgacccccgcuacgaggagucccuccagaaccccuaccccgacuacuccuggcuccgcaccgucaagaccaccaaggagucccucaucaucaucucccccuccgucgccgaccucgaccccuacgacaagucccuccacucccgcgucuuccccggcggcaagugccucggcaucaccaucuccuccaccuacugcuccaccaaccacgacuacaccaucuggaugcccgaggaggcccgccucggcaccuccugcgacaucuucaccaacucccgcggcaagcgcgccuccaagggcggcaagaccugcggcuucgucgacgagcgcggccucuacaagucccucaagggcgccugcaagcucaagcucugcggcguccccggccuccgccucauggacggcaccugggucaccauccagaccuccgacgagaccaaguggugccccuccgaccagcucgucaaccuccacgacuuccacuccgacgagaucgagcaccucgucgucgaggagcucgucaagaagcgcgaggagugccucgacgcccucgaguccaucaugaccaccaaguccgucuccuuccgccgccucucccaccuccgcaagcucguccccggcuucggcaaggccuacaccaucuucaacaagacccucauggaggccgacgcccacuacaaguccauccgcaccuggaacgagaucauccccuccaagggcugccucaaggucggcggccgcugccacccccacgucgacggcgucuucuucaacggcaucauccucggccccgacggcaacguccucauccccgagaugcaguccucccuccuccagcagcacgucgagcuccucgaguccuccgucaucccccucaugcacccccucgccgaccccuccaccgucuucaaggacggcgacgaggccgaggacuucgucgagguccaccuccccgacauccacaagcaggucuccggcgucgaccucggccuccccaacuggggcaaguaccuccucauguccgccggcgcccucgccacccucaugcucaucaucuuccucauggccugcugccgccgcgccaaccgcaccgaguccauccagcgcgaccccggcgaguccggccgcaaggucuccauccccucccaggacggcaaggucaucuccuccugggagcucuacaaguccggcggcgagacccgccucuga

SEQ ID NO: 127318 - RNA, 1575 nt, Artificial Sequence
  derived and/or modified CDS sequence (opt2) from glycoprotein__RABV__JQ685909.1
augaucccccaggcccuccucuacgucccccuccucaucuccucccucugcuucggcggcuuccccaucuacaccauccccgacaagcucggccccuggucccccaucgacauccaccaccucuccugccccaacaaccucgucgucgaggacgagggcugcaccucccucuccggcuucuccuacauggagcucaaggucggcuacaucuccgccaucaaggucaacggcuucaccugcaccggcgucgucaccgaggccgagaccuacaccaacuucgucggcuacgucaccaccaccuucaagcgcaagcacuuccgccccaugcccgacgccugccgcgccgccuacaacuggaagauggccggcgacccccgcuacgaggagucccuccagaaccccuaccccgacuacuccuggcuccgcaccgucaagaccaccaaggagucccucaucaucaucucccccuccgucgccgaccucgaccccuacgacaagucccuccacucccgcgucuuccccggcggcaagugccucggcaucaccaucuccuccaccuacugcuccaccaaccacgacuacaccaucuggaugcccgaggaggcccgccucggcaccuccugcgacaucuucaccaacucccgcggcaagcgcgccuccaagggcggcaagaccugcggcuucgucgacgagcgcggccucuacaagucccucaagggcgccugcaagcucaagcucugcggcguccccggccuccgccucauggacggcaccugggucaccauccagaccuccgacgagaccaaguggugccccuccgaccagcucgucaaccuccacgacuuccacuccgacgagaucgagcaccucgucgucgaggagcucgucaagaagcgcgaggagugccucgacgcccucgaguccaucaugaccaccaaguccgucuccuuccgccgccucucccaccuccgcaagcucguccccggcuucggcaaggccuacaccaucuucaacaagacccucauggaggccgacgcccacuacaaguccauccgcaccuggaacgagaucauccccuccaagggcugccucaaggucggcggccgcugccacccccacgucgacggcgucuucuucaacggcaucauccucggccccgacggcaacguccucauccccgagaugcaguccucccuccuccagcagcacgucgagcuccucgaguccuccgucaucccccucaugcacccccucgccgaccccuccaccgucuucaaggacggcgacgaggccgaggacuucgucgagguccaccuccccgacauccacaagcaggucuccggcgucgaccucggccuccccaacuggggcaaguaccuccucauguccgccggcgcccucgccacccucaugcucaccaucuuccucaugaccugcugccgccgcgccaaccgcaccgaguccauccagcgcgaccccggcgaguccggccgcaaggucuccaucaccucccccgacggcaaggucaucuccuccugggagcucuacaaguccggcggcgagaccggccucuga

SEQ ID NO: 127319 - RNA, 1575 nt, Artificial Sequence
  derived and/or modified CDS sequence (opt2) from glycoprotein__RABV__JQ685910.1
augaucccccaggccuuccucuucgucccccuccucauccccucccucugccucggcgaguuccccaucuacaccauccccgacaagcucggccccuggucccccaucgacauccaccaccucuccugccccaacaaccucgucgccgagaacgacggcugcaccucccucuccggcuucuccuacauggagcucaaggucggcuacaucuccgccaucaaggucaacggcuucaccugcaccggcgucaugaccgaggccgagaccuacaccaacuucgucggcuacgucaccaccaccuucaagcgcaagcacuuccgccccaugcccgacgccugccgcgccgcccacgacuggaagaucgccggcgacccccgcuacgaggacucccuccagaaccccuaccccgacuaccacuggcuccgcaccgucaagaccaccaaggagucccucgucaucaucucccccuccgucgccgaccucgaccccuacgacaagucccuccacucccgcgucuuccccuccggcaagugccucggcaucaccgucuccuccaccuacugcuccaccaaccacgacuacaccaucuggaugcccgucgagccccgccucggcaccuccugcgacaucuucaccaacucccgcggcaagcgcgccuccaagggcggccgcgucugcggcuucgucgacgagcgcggccucuacaagucccucaagggcgccugcaagcucaagcucugcggcguccccggcauccgccucauggacggcaccugggucuccauccagaccuccgaggagaucaaguggugcccccccgaccgccucgucaaccuccacgacuuccacuccgacgagaucgagcaccucgucgucgaggagcucaucaagcgccgcgagaacugccucgacgcccucgaguccaucaugaccaccaaguccgucuccuuccgccgccucucccaccuccgcaagcucguccccggcuucggcaaggccuacaccaucuucaacaagacccucauggaggccgacgcccacuacaaguccgucaagaccuggaacgaggucauccccuccaagggcugccucgaggucggcggccgcugccacccccccgucaacggcgucuucuucaacggcaucauccucggccccgacggcaacguccucauccccgagaugcaguccucccuccuccagcagcacauggagcuccucgaguccuccgucaucccccucaugcacccccucgccgaccccuccaccgucuucaaggagggcgacgaggccgaggacuucgucgagguccaccuccccgacguccacaagcaggucuccgacgucgaccucggccuccccuccuggggcaaguaccuccucauguccgccggcgcccucgccauccucauccucgucaucguccucaucaucugcugccgccgcgucaacaagaccggcuccacccagcgcggccaccgcgaguccggcggcaagauguccgucgccccccagaacggcaagaucaucuccuccugggagcucuacaaguccgaguccgagaccggccucuga

SEQ ID NO: 127320 - RNA, 1575 nt, Artificial Sequence
  derived and/or modified CDS sequence (opt2) from glycoprotein__RABV__JQ685911.1
augaucccccaggcccuccucuacgucccccuccucauccccucccucugcuucggcggcuuccccaucuacaccauccccgacaagcucggccccuggucccccaucgacauccaccaccucuccugccccaacaaccucgucgucgaggacgagggcugcaccucccucuccggcuucuccuacauggagcucaaggucggcuacaucuccgccaucaaggucaacggcuucaccugcaccggcgucgucaccgaggccgagaccuacaccaacuucgucggcuacgucaccaccaccuucaagcgcaagcacuuccgccccaugcccgacgccugccgcgccgccuacaacuggaaggucgccggcgacccccgcuacgaggagucccuccagaaccccuaccccgacuacuccuggcuccgcaccgucaagaccaccaaggagucccucaucaucaucucccccuccgucgccgaccucgaccccuacgacaagucccuccacucccgcgucuuccccggcggcaagugccucggcaucaccaucuccuccaccuacugcuccaccaaccacgacuacaccaucuggaugcccgaggaggcccgccucggcaccuccugcgacaucuucaccaacucccgcggcaagcgcgccuccaagggcggcaagaccugcggcuucgucgacgagcgcggccucuacaagucccucaagggcgccugcaagcucaagcucugcggcguccccggccuccgccucauggacggcaccugggucaccauccagaccuccgacgagaccaaguggugccccuccgaccagcucgucaaccuccacgacuuccacuccgacgagaucgagcaccucgucgucgaggagcucgucaagaagcgcgaggagugccucgacgcccucgaguccaucaugaccaccaaguccgucuccuuccgccgccucucccaccuccgcaagcucguccccggcuucggcaaggccuacaccaucuucaacaagacccucauggaggccgacgcccacuacaaguccauccgcaccuggaacgagaucauccccuccaagggcugccucaaggucggcggccgcugccacccccacgucgacggcgucuucuucaacggcaucauccucggccccgacggcaacguccucauccccgagaugcaguccucccuccuccagcagcacgucgagcuccucgaguccuccgucaucccccucaugcacccccucgccgaccccuccaccgucuucaaggacggcgacgaggccgaggacuucgucgagguccaccuccccgacauccacaagcaggucuccggcgucgaccucggccuccccaacuggggcaaguaccuccucauguccgccggcgcccucgccacccucaugcucaccaucuuccucaugaccugcugccgccgcuccaaccgcaccgaguccauccagcgcgaccccggcgaguccggcaagaaggucuccaucaccucccaggacggcaaggucaucuccuccugggagcucuacaaguccggcggcgagacccgccucuga

SEQ ID NO: 127321 - RNA, 1575 nt, Artificial Sequence; identical to SEQ ID NO: 127304
  derived and/or modified CDS sequence (opt2) from glycoprotein__RABV__JQ685912.1

SEQ ID NO: 127322 - RNA, 1575 nt, Artificial Sequence; identical to SEQ ID NO: 127304
  derived and/or modified CDS sequence (opt2) from glycoprotein__RABV__JQ685913.1

SEQ ID NO: 127323 - RNA, 1575 nt, Artificial Sequence
  derived and/or modified CDS sequence (opt2) from glycoprotein__RABV__JQ685914.1
augaucccccaggcccuccucuucgucccccuccucaucuccucccucugcuucggcggcuuccccaucuacaccauccccgacaagcucggccccuggucccccaucgacauccaccaccucuccugccccaacaaccucgucgucgaggacgagggcugcaccucccucuccggcuucuccuacauggagcucaaggucggcuacaucuccgccaucaaggucaacggcuucaccugcaccggcgucgucaccgaggccgagaccuacaccaacuucgucggcuacgucaccaccaccuucaagcgcaagcacuuccgccccaugcccgacuccugccgcgccgccuacaacuggaagaccgccggcgacccccgcuacgaggagucccuccagaaccccuaccccgacuaccacuggcuccgcaccgucaagaccaccaaggagucccucaucaucaucucccccuccgucgccgaccucgaccccuacgacaagucccuccacucccgcgucuuccccggcggcaagugccucggcaucaccgucuccuccaccuacugcuccaccaaccacgacuacaccaucuggaugcccgaggaggcccgccucggcaccuccugcgacaucuucgccaacucccgcggcaagcgcgccuccaagggcggccgcaccugcggcuucgucgacgagcgcggccucuacaagucccucaagggcgccugcaagcucaagcucugcggcguccucggccuccgccucauggacggcaccugggccaccauccacaccuccaacgagaccaaguggugccccuccgaccagcucgucaaccuccacgacuuccacuccgacgagaucgagcaccucgucgucgaggagcucgucaagaagcgcgaggagugccucgacgcccucgaguccaucaugaccaccaaguccgucuccuuccgccgccucucccaccuccgcaagcucguccccggcuucggcaaggccuacaccaucuucaacaagacccucauggaggccgacgcccacuacaaguccauccgcaccuggaacgagaucauccccuccaagggcugccucaaggucggcggccgcugccacccccacgucgacggcgucuucuucaacggcaucauccucggccccgacggcaacguccucauccccgagaugcaguccucccuccuccagcagcacgucgagcuccucgaguccuccgucaucccccucaugcacccccucgccgaccccuccaccgucuucaaggacggcgacgaggccgaggacuucgucgagguccaccuccccgacguccacaagcaggucuccggcgucgaccucggccuccccaacuggggcaaguaccuccucauguccgccggcgcccucgccacccucaugcucaccaucuuccucaucaccugcugccgccgcgucgacaagaccgaguccauccagcgcggccccggcgagcucggccgcgaggucuccgucaccucccagaacggcaaggucaucuccuccugggagcucuacaaguccggcggcgagacccgccucuga

SEQ ID NO: 127324 - RNA, 1575 nt, Artificial Sequence
  derived and/or modified CDS sequence (opt2) from glycoprotein__RABV__JQ685915.1
augauccuccaggcccuccuccuccucccccuccucaucuccuccuggugccucggcaaguuccccaucuacaccauccccgacaagcucggccccuggucccccaucgacauccaccaccucuccugccccaacaaccucgucgucgaggacgagggcugcaccucccucuccggcuucuccuacauggagcucaaggucggcuacaucuccgccaucaaggucaacggcuucaccugcaccggcgucgucaccgaggccgagaccuacaccaacuucgucggcuacgucaccaccaccuucaagcgcaagcacuuccgccccaugcccgacgccugccgcgccgcccacgaguggaagauggccggcgacccccgcuacgaggacucccuccagaaccccuaccccgacuaccacuggcuccgcaccgucaagaccaccaaggagucccucaucaucaucucccccuccgucgccgaccucgaccccuacgacaagucccuccacucccgcgucuuccccggcggcaacugccucggcgucaccaucuccuccaccuacugcuccaccaaccacgacuacaccaucuggaugcccgaggaggcccgccucggcaccuccugcgacaucuucaccaacuccaagggcaagaaggccuccaagggcggcaaggucugcggcuucgucgacgagcgcggccucuacaagucccucaagggcgccugcaagcucaagcucugcggcguccccggccuccgccucauggacggcaccugggucuccauccagaccuccgacgagaccaaguggugcccccccgaccagcucgucaacauccacgacuuccacuccgacgagaucgagcaccucaucgucgaggagcucgucaagaagcgcgaggagugccucgacgcccucgaguccaucaugaccaccaaguccgucuccuuccgccgccucucccaccuccgcaagcucguccccggcuucggcaaggccuacaccaucuucaacaagacccucauggaggccgacgcccacuacaaguccguccgcaccuggaacgaggucauccccuccaagggcugccucaaggucggcggccgcugccacccccacgucggcggcgucuucuucaacggcaucauccucggccccgacggcaccguccucauccccgagaugcaguccucccuccuccagcagcacauggagcuccucgaguccuccgucaucccccucaugcacccccucgccgaccccuccaaggucuucaaggagggcgacgaggccgaggacuucgucgagguccaccuccccgacguccacaagcaggucuccggcgucgaccucggccuccccuccuggggcaaguaccuccucauguccgucggcgcccucgccacccucauccucaucaucuuccucaucaccugcugccgcaaggucaagcgcaccgaguccauccagcgcggccacggcgaguccggccgcaaggucuccgccuccccccagaacggcaaggucaucuccuccugggagcucuacaaguccgagggcgagaccaaccucuga

SEQ ID NO: 127325 - RNA, 1575 nt, Artificial Sequence
  derived and/or modified CDS sequence (opt2) from glycoprotein__RABV__JQ685916.1
augaucccccaggcccuccucucccuccuccuccucaucuccucccucugccucggcaaguuccccaucuacaccauccccgacaagcucggccccuggucccccaucgacauccaccaccucuccugccccaacaaccucgucgucgaggacgagggcugcaccucccucuccggcuucuccuacauggagcucaaggucggcuacaucuccgccaucaaggucaacggcuucaccugcaccggcgucgucaccgaggccgagaccuacaccaacuucgucggcuacgucaccaccaccuucaagcgcaagcacuuccgccccaugcccgacgccugccgcgccgcccacgaguggaagauggccggcgacccccgcuacgaggacucccuccagaaccccuaccccgacuaccacuggcuccgcaccgucaagaccaccaaggagucccucaucaucaucucccccuccgucgccgaccucgaccccuacgacaagucccuccacucccgcgucuuccccggcggcaacugccucggcaucaccaucuccuccaccuacugcuccaccaaccacgacuacaccaucuggaugcccgaggaggcccgccucggcaccuccugcgacaucuucaccaacuccaagggcaagcgcgccuccaagggcggcaagaucugcggcuucgucgacgagcgcggccucuacaagucccucaagggcgccugcaagcucaagcucugcggcguccccggccuccgccucauggacggcaccugggucuccauccagaccuccgacgagaccaaguggugcccccccgaccagcucgucaacguccacgacuuccacuccgacgagaucgagcaccucaucgucgaggagcucgucaagaagcgcgaggagugccucgacgcccucgaguccaucaugaccaccaaguccgucuccuuccgccgccucucccaccuccgcaagcucguccccggcuucggcaaggccuacaccaucuucaacaagacccucauggaggccgacgcccacuacaaguccguccgcaccuggaacgagaucauccccuccaagggcugccucaaggucggcggcaugugccacccccacgucggcggcgucuucuucaacggcaucauccucggccccgacggcaccguccucauccccgagaugcaguccucccuccuccagcagcacauggagcuccucgaguccuccgucaucccccucaugcacccccucgccgaccccuccaccgucuucaaggagggcgacgaggccgaggacuucgucgagauccaccuccccgacguccacaagcagaucuccggcgucgaccucggccuccccuccuggggcaaguaccuccucaucuccgccggcgcccucgccacccucauccucaccaucuuccucaucaccugcugccgcaaggucaaccgcaccgaguccauccagcgcggccacggcgaguccgagcgcaaggucuccgucuccccccagaacggccgcgucaucuccuccugggagcucuacaaguccggcggcgagaccaaccucuga

SEQ ID NO: 127326 - RNA, 1575 nt, Artificial Sequence
  derived and/or modified CDS sequence (opt2) from glycoprotein__RABV__JQ685917.1
augaucccccaggcccuccucuacgucccccuccucaucuccucccucugcuucggcggcuuccccaucuacaccauccccgacaagcucggccccuggucccccaucgacauccaccaccucuccugccccaacaaccucgucgucgaggacgagggcugcaccucccucuccggcuucuccuacauggagcucaaggucggcuacaucuccgccaucaaggucaacggcuucaccugcaccggcgucgucaccgaggccgagaccuacaccaacuucgucggcuacgucaccaccaccuucaagcgcaagcacuuccgccccguccccgacgccugccgcgccgccuacaacuggaaggucgccggcgacccccgcuacgaggagucccuccagaaccccuaccccgacuacuccuggcuccgcaccgucaagaccaccaaggagucccucaucaucaucucccccuccgucgccgaccucgaccccuacgacaagucccuccacucccgcgucuuccccggcggcaagugccucggcaucaccaucuccuccaccuacugcuccaccaaccacgacuacaccaucuggaugcccgaggaggcccgccucggcaccuccugcgacaucuucaccaacucccgcggcaagcgcgccuccaagggcggcaagaccugcggcuucgucgacgagcgcggccucuacaagucccucaagggcgccugcaagcucaagcucugcggcguccccggccuccgccucauggacggcaccugggucaccauccagaccuccgacgagaccaaguggugccccuccgaccagcucgucaaccuccacgacuuccacuccgacgagaucgagcaccucgucgucgaggagcucgucaagaagcgcgaggagugccucgacgcccucgaguccaucaugaccaccaaguccgucuccuuccgccgccucucccaccuccgcaagcucguccccggcuucggcaaggccuacaccaucuucaacaagacccucauggaggccgacgcccacuacaaguccauccgcaccuggaacgagaucauccccuccaagggcugccucaaggucggcggccgcugccacccccacgucgacggcgucuucuucaacggcaucauccucggccccgacggcaacguccucauccccgagaugcaguccucccuccuccagcagcacgucgagcuccucgaguccuccgucaucccccucaugcacccccucgccgaccccuccaccgucuucaaggacggcgacgaggccgaggacuucgucgagguccaccuccccgacauccacaagcaggucuccggcgucgaccucggccuccccgacuggggcaaguaccuccucauguccgccggcgcccucgccacccucaugcucaccaucuuccucaugaucugcugccgccgcgccaaccgcaccgaguccauccagcgcgaccccggcgaguccggcaagaaggucuccaucaccucccaggacggcaaggucaucuccuccugggagcucuacaaguccggcggcgagacccgccucuga

SEQ ID NO: 127327 - RNA, 1575 nt, Artificial Sequence
  derived and/or modified CDS sequence (opt2) from glycoprotein__RABV__JQ685918.1
augaucccccagucccuccucuuccucccccuccucaucuccucccucugcuucggcgaguuccccaucuacaccauccccgagaagcucggccccuggucccccaucgacauccaccaccucuccugccccaacaaccucgucgucgaggacgagggcugcaacucccucuccggcuucuccuacauggagcucaaggucggcuacaucuccuccaucaaggucaacggcuucaccugcaccggcgucgucaccgaggccgagaccuacaccaacuucgucggcuacgucaccaccaccuucaagcgcaagcacuuccgccccaugcccgacgccugccgcgccgccuacuccuggaagauggccggcgacccccgcuacgaggagucccuccacaaccccuaccccgacuaccacuggcuccgcaccgucaagaccaccaaggagucccucgucaucaucucccccuccgucgccgaccucgaccccuacgacaagucccuccacucccgcgucuucuccggcggcaagugccucggcaucaccaucuccuccaccuacugcuccaccaaccacgacuacaccaucuggaugcccgaggaggcccgccucggcaccuccugcgacaucuucaccaacuccaagggcaagcgcgccuccaagggcggccgcaccugcggcuucgucgacgagcgcggccucuacaagucccucaagggcgccugcaagcucaagcucugcggcguccccggccuccgccucauggacggcaccugggucuccauccagaccuccaacgagaccaaguggugcccccccgaccagcucgucaacauccacgacuuccgcuccgacgagaucgagcaccucgucgucgaggagcucgucaagaagcgcgaggagugccucgacgcccucgaguccaucaugaccaccaaguccgucuccuuccgccgccucucccaccuccgcaagcucguccccggcuucggcaaggccuacaccaucuucaacaagacccucauggaggccgacgcccacuacaaguccguccgcaccuggaacgaggucauccccuccaagggcugccucuccgucggcggccgcugcuacccccacgucuccggcgucuucuucaacggcaucauccucggccccgacggcuccguccucauccccgagaugcaguccucccuccuccagcagcacauggagcuccucgaguccuccgucaucccccucaugcacccccucgccaaccccuccaccgucuucaaggacggcgacgaggccgaggacuucgucgagguccaccuccccgacgucaaggagcaggucuccggcgucgaccucggccuccccaacuggggcaaguacguccucauguccgccggcgcccucgccauccucaugcucgccaucuuccucaugaccugcugccgccgcgccaaccgcaccaaguccauccagcagggcccccgcgaguccggccgcaaggucuccguccccccccagaacggcaaggucaucuccuccugggaguccuucaaguccggcggcgagacccgccucuga

SEQ ID NO: 127328 - RNA, 1575 nt, Artificial Sequence
  derived and/or modified CDS sequence (opt2) from glycoprotein__RABV__JQ685920.1
augaucccccaggcccuccucuucguccccuuccucuuccccucccucugccucggcaaguuccccaucuacaccauccccgagaagcucggccccuggucccccaucgacauccaccaccucuccugccccaacaaccucgucgucgaggacgagggcugcgacucccucuccggcuucuccuacauggagcucaaggucggcuacaucuccgccaucaaggucaacggcuucaccugcaccggcgucgucaccgaggccgagaccuacaccaacuucgucggcuacgucaccaccaccuucaagcgcaagcacuuccgccccaugcccgacgccugccgcgccgccuacaacuggaagaccgccggcgacccccgcuacgaggagucccuccacaaccccuaccccgacuaccacuggcuccgcaccgucaagaccaccaaggagucccucgucaucaucucccccuccgucgccgaccucgaccccuacgacaagucccuccacucccgcgucuuccccggcggcaagugccucggcaucaccaucuccuccaccuacugcuccaccaaccacgacuacaccaucuggaugcccgaggaggcccgccucggcaccuccugcgacaucuucaccaacuccaagggcaagcgcgccuccaagggcggccgcaccugcggcuucgucgacgagcgcggccucuacaagucccucaagggcgccugcaagcucaagcucugcggcguccccggccuccgccucauggacggcaccugggucgccauccagacccccggcgagaccaaguggugcucccccgaccagcucgucaaccuccacgacuuccgcuccgacgagaucgagcaccucgucgucgaggagcucaucaagaagcgcgaggagugccucgacgcccucgaguccaucaugaccaccaaguccgucuccuuccgccgccucuccaaccuccgcaagcucguccccggcuucggcaaggccuacaccaucuucaacaagacccucauggaggccgacgcccacuacaaguccguccgcaccugggacgagaucauccccuccaagggcugccuccgcgucggcggccgcugccacccccacgucaacggcgucuucuucaacggcaucauccucggccccgacggccacguccucauccccgagaugcaguccucccuccuccagcagcacauggagcuccucgaguccuccgucaucccccucauccacccccucgccgaccccuccaccgucuucaaggacggcgacgaggccgaggacuucgucgagguccaccuccccgacguccacaagcaggucuccggcgucgaccucggccuccccaacuggggcaaguacguccucauguccgccggcguccucgccaccgucauccucaccaucuuccuccucaccugcugccgccgcgucaaccgcaccaagcccaagcagcagucccucggcgaguccggccgcaaggucuccgucaccccccagaacggcaaggucauguccuccugggaguacuacaaguccgagggccgcaccucccucuga

SEQ ID NO: 127329 - RNA, 1575 nt, Artificial Sequence
  derived and/or modified CDS sequence (opt2) from glycoprotein__RABV__JQ685921.1
augauccuccaggcccuccucuucguccccauccucaucuccuccuucugcuucggcgacuuccccaucuacaccauccccgagaagcucggccccuggucccccaucgacauccaccaccucuccugccccaacaaccucgucgucgaggacgagggcugcuccucccucuccggcuucuccuacauggagcucaaggucggcuacaucuccgccaucaaggucaacggcuucaccugcaccggcgucgucaccgaggccgagaccuacaccaacuucgucggcuacgucaccaccaccuucaagcgcaagcacuuccgccccaugcccgacgccugccgcgccgccuacaacuggaagaccgccggcgacccccgcuacgaggagucccuccagaaccccuaccccgacuaccacuggcuccgcaccgucaagaccaccaaggagucccucgucaucaucucccccuccgucgccgaccucgaccccuacgacaagucccuccacucccgcgucuucuccgacggcaagugccucggcaucaccaucuccuccaccuacugcuccaccaaccacgacuacaccaucuggaugcccgaggaggcccgccucggcaccuccugcgacaucuucaccaccucccgcggcaagcgcgccuccaagggcggcaagaccugcggcuucgucgacgagcgcggccucuacaagucccucaagggcgccugcaagcucaagcucugcggcgucuccggccuccgccucauggacggcaccugggucuccauccaggcccccgacgaggccaaguggugcuccaccgaccagcucgucaacauccacgacauccgcuccgacgagaucgagcaccucgucgucgaggagcucgucaagaagcgcgaggagugccucgacgcccucgaguccaucaugaccaccaaguccgucuccuuccgccgccucucccaccuccgcaagcucguccccggcuucggcaaggccuacaccaucuucaacaagacccucauggaggccgacgcccacuacaaguccguccgcaccugguccgaggucauccccuccaagggcugccucuccgucggcggccgcugccacccccacgagaacggcgucuucuucaacggcaucauccucggccccgacggcuccguccucauccccgagaugcaguccucccuccuccagcagcacauggagcuccucgaguccuccgucaucccccucaugcacccccucgccaaccccuccaccgucuucaaggacggcgacgaggccgaggacuucgucgagguccaccuccccgacguccaggagcagaucuccggcgucgaccucggccuccccaacuggggcaaguacgucaugauguccgccggcgcccucgccauccucaugcucaccaucuuccucaugaccugcugccgccgcgccaaccgcacccgcuccacccagcgcgaccucggcggccucgagcgcaaggucuccgucccccccaaggacggccgcgucauguccuccugggaguccuacaaguccggcggcgagaccucccucuga

SEQ ID NO: 127330 - RNA, 1575 nt, Artificial Sequence
  derived and/or modified CDS sequence (opt2) from glycoprotein__RABV__JQ685922.1
augaucccccaggcccuccucuucgucccccuccucauccccucccucugccucggcaaguuccccaucuacaccauccccgacaagcucggccccuggucccccaucgacauccaccaccucuccugccccaacaaccucgucgucgaggacgagggcugcaccucccucuccggcuucuccuacauggagcucaaggucggcuacaucuccgccaucaaggucaacggcuucaccugcaccggcgucgucaccgaggccgagaccuacaccaacuucgucggcuacgucaccaccaccuucaagcgcaagcacuuccgccccaugcccgacgccugccgcgccgcccacgacuggaagaucgccggcgacccccgcuacgaggacucccuccagaaccccuaccccgacuaccacuggcuccgcaccgucaagaccaccaaggagucccucgucaucaucucccccuccgucgccgagcucgaccccuacgacaagucccuccacucccgcgucuuccccuccggcaagugccucggcaucaccgucuccuccaccuacugcuccaccaaccacgacuacaccaucuggaugcccgucgaggcccgccucggcaccuccugcgacaucuucaccaacucccgcggcaagaaggccuccaagggcggccgcaccugcggcuucgucgacgagcgcggccucuacaagucccucaagggcgccugcaagcucaagcucugcggcguccccggccuccgccucauggacggcaccugggucuccauccagaccuccgacgacaucaaguggugcccccccgaccagcucgucaaccuccacgacuuccacuccgacgagaucgagcaccucgucgucgaggagcucaucaagaagcgcgagggcugccucgacgcccucgaguccaucaugaccaccaaguccgucuccuuccgccgccucucccaccuccgcaagcucguccccggcuucggcaaggccuacaccaucuucaacaacacccucauggaggccgacgcccacuacaaguccguccgcaccuggaacgaggucauccccuccaagggcugccucaaggucggcggccgcugccacccccccgucaacggcgucuucuucaacggcaucauccucggccccgacggcaacguccucauccccgagaugcaguccucccuccuccagcagcacauggagcuccucgaguccuccgucaucccccucaugcacccccucgccgaccccuccaccgucuucaaggacggcgacgaggccgaggacuucgucgagguccaccuccccgacguccacaagcaggucuccgacgucgaccucggccuccccuccuggggcaaguaccuccucauguccgccggcgcccucgccacccucauccucgccaucuuccucaucaccugcugccgccgcgccaaccgcaccgaguccacccagcgcggccaccgcgaguccggcggcaaggucuccgucgccccccagaacggcaagaucaucuccuccugggagcucuacaaguccgaguccgagaccggcauguga

SEQ ID NO: 127331 - RNA, 1575 nt, Artificial Sequence; identical to SEQ ID NO: 127305
  derived and/or modified CDS sequence (opt2) from glycoprotein__RABV__JQ685923.1

SEQ ID NO: 127332 - RNA, 1575 nt, Artificial Sequence
  derived and/or modified CDS sequence (opt2) from glycoprotein__RABV__JQ685925.1
augaucccccaggcccuccucuccgucccccuccucaucuccucccucugcuucggcaaguuccccaucuacaccauccccgagaagcucggccccuggucccccaucgacauccaccaccucuccugccccaacaaccucgucgucgaggacgagggcugcaacucccucuccggcuucuccuacauggagcucaaggucggcuacaucuccgccaucaaggucaacggcuucaccugcaccggcgucgucaccgaggccgagaccuacaccaacuucgucggcuacgucaccaccaccuucaagcgcaagcacuuccgccccaugcccgacgccugccgcgccgccuacaacuggaagaccgccggcgacccccgcuacgaggagucccuccacaaccccuaccccgacuaccacuggcuccgcaccgucaagaccaccaaggagucccucaucaucaucucccccuccgucgccgaccucgaccccuacgacaagucccuccacucccgcaucuuccccggcggcaagugccucggcaucaccaucuccuccaccuacugcuccaccaaccacgacuacaccaucuggaugcccgaggaggcccgccucggcaccuccugcgacaucuucaccaacuccaagggcaagcgcgccuccaagggcggccgcaccugcggcuucgucgacgagcgcggccucuacaagucccucaagggcgccugcaagcucaagcucugcggcguccccggccuccgccucauggacggcaccugggucgccauccagacccccaacgagaccaaguggugcucccccgaccagcucgucaacguccacgacuuccgcuccgacgagaucgagcaccucgucgucgaggagcucauccgcaagcgcgaggagugccucgacgcccucgaguccaucaugaccaccaaguccgucuccuuccgccgccucuccaaccuccgcaagcucguccccggcuucggcaaggccuacaccaucuucaacaagacccucauggaggccgacgcccacuacaaguccguccgcaccuggaacgagaucauccccucccgcggcugccucaaggucggcggccgcugccacccccacgucaacggcgucuucuucaacggcaucauccucggccccgacggccacauccucauccccgagaugcaguccucccuccuccagcagcacauggagcuccucgaguccuccgucaucccccucauccacccccucgccgaccccuccaccgucuucaaggacggcgacgaggccgaggacuucgucgagguccaccuccccgacguccaccagcaggucuccggcgucgaccucggccuccccgacuggggcaaguacguccucauguccgccggcgcccucgccaccgucaugcucaccaucuuccucaucaccugcugccgccgcgucaagcgcaccgaguccguccagcagggccucggcgaguccggccgcaaggucuccgucgccccccagaacggcaaggucauguccuccugggaguacuacaaguccggcggcggcacccgccucuga

SEQ ID NO: 127333 - RNA, 1575 nt, Artificial Sequence
  derived and/or modified CDS sequence (opt2) from glycoprotein__RABV__JQ685926.1
augaucccccaggcccuccucuacgucccccuccucauccccucccucugccucggcggcuuccccaucuacaccauccccgacaagcucggccccuggucccccaucgacauccaccaccucuccugccccaacaaccucgucgucgaggacgagggcugcaccucccucuccggcuucuccuacauggagcucaaggucggcuacaucuccgccaucaaggucaacggcuucaccugcaccggcgucgucaccgaggccgagaccuacaccaacuucgucggcuacgucaccaccaccuucaagcgcaagcacuuccgccccaugcccgacgccugccgcgccgccuacaacuggaaggucgccggcgacccccgcuacgaggagucccuccagaaccccuaccccgacuacuccuggcuccgcaccgucaugaccaccaaggagucccucaucaucaucucccccuccgucgccgaccucgaccccuacgacaagucccuccacucccgcgucuuccccggcggcaagugccucggcaucaccaucuucuccaccuacugcuccaccaaccacgacuacaccaucuggaugcccgaggaggcccgccucggcaccuccugcgacaucuucaccaacucccgcggcaagcgcgccuccaagggcggcaagaccugcggcuucgucgacgagcgcggccucuacaagucccucaagggcgccugcaagcucaagcucugcggcguccccggccuccgccucauggacggcaccugggucaccauccagaccuccgacgagaccaaguggugccccuccgaccagcucgucaaccuccacgacuuccacuccgacgagaucgagcaccucgucgucgaggagcucgucaagaagcgcgaggagugccucgacgcccucgaguccaucaugaccaccaaguccgucuccuuccgccgccucucccaccuccgcaagcucguccccggcuucggcaaggccuacaccaucuucaacaagacccucauggaggccgacgcccacuacaaguccauccgcaccuggaacgagaucauccccuccaagggcugccucaaggucggcggccgcugccacccccacgucgacggcgucuucuucaacggcaucauccucggccccgacggcaacguccucauccccgagaugcaguccucccuccuccagcagcacgucgagcuccucgaguccuccgucaucccccucaugcacccccucgccgaccccuccaccgucuucaaggacggcgacgaggccgaggacuucgucgagguccaccuccccgacauccacaagcaggucuccggcgucgaccucggccuccccaacuggggcaaguaccuccucauguccgccggcgcccucgccacccucaugcucaccaucuuccucaugaccugcugccgccgcgccaaccgcaccgaguccauccagcgcgaccccggcgaguccggcaagaaggucuccgucaccucccaggacggcaaggucaucuccuccugggagcucuacaaguccggcggcgagacccgccucuga

SEQ ID NO: 127334 - RNA, 1575 nt, Artificial Sequence; identical to SEQ ID NO: 127304
  derived and/or modified CDS sequence (opt2) from glycoprotein__RABV__JQ685928.1

SEQ ID NO: 127335 - RNA, 1575 nt, Artificial Sequence
  derived and/or modified CDS sequence (opt2) from glycoprotein__RABV__JQ685929.1
auggucccccaggcccuccucuucgucccccuccucaucccccccgucugccucggcaaguuccccaucuacaccauccccgacaagcucggccccuggucccccaucgacauccaccaccucuccugccccaacaaccucgucgucgaggacgagggcugcuccaaccucuccggcuucuccuacauggagcucaaggucggcuacaucuccgccaucaaggucgacggcuucaccugcaccggcgucgucaccgaggccgagaccuacaccaacuucaucggcuacgucaccaccaccuucaagcgcaagcacuuccgccccaugcccgacgccugccgcuccgccuacaacuggaagaucgccggcgacccccgcuacgaggagucccuccacacccccuaccccgacuaccacuggcuccgcaccgucaagaccaccaaggagucccucgucaucaucucccccuccgucgccgaccucgaccccuacgacaagucccuccacuccauggucuuccccaacggcaagugcuccggcaucaccgucuacuccaccuacugcuccaccaaccacgacuacaccaucuggaugcccgagaaggccggccucggcaccuccugcgacaucuucaccaacucccgcggcaagcgcgccuccaagggcggccgcaccugcggcuucgucgacgagcgcggccucuacaagucccuccgcggcgccugcaagcucaagcucugcggcguccccggccuccgccucauggacggcaccugggccaccauccagacccccgaggagaccaaguggugcucccccgaccagcucgucaaccuccacgacuuccacuccgacgagaucgagcaccucgucgucgaggaccucgucaagaagcgcgaggagugccucgacacccucgaguccaucaugaccaccaaguccgucuccuuccgccgccucucccaccuccgcaagcucguccccggcuucggcaaggccuacaccaucuucaacaagacccucauggaggccgacgcccacuacaaguccguccgcaccuggaacgagaucauccccuccaagggcugccuccgcgucggcggccgcugccacccccacgucaacggcgucuucuucaacggcgucaucaugggccccgacggccacguccucauccccgagaugcaguccucccuccuccagcagcacauggagcuccucgaguccuccgucaucccccucauccacccccucgccgaccccuccaccgucuucaaggacaacgacgaggccgaggacuucgucgagguccaccuccccgacguccacaagcaggucuccggcaucgaccucggccuccccuccuggggccgcuaccucgucaugaucgccggcgcccucaugacccucacccucgucaucuuccucaugaucugcugccgccgcgucaacaaggccggcuccauccagcaggaccccgagaaguccgagaagcgccgcuccgucaccccccagaacggcaaggucaucuccuccugggaguccuacaaguccggcuccgagacccgccucuga

SEQ ID NO: 127336 - RNA, 1575 nt, Artificial Sequence
  derived and/or modified CDS sequence (opt2) from glycoprotein__RABV__JQ685931.1
augaucccccaggcccuccucuucgucccccuccucaucuccucccucugcuucggcggcuuccccaucuacaccauccccgacaagcucggccccuggucccccaucgacauccaccaccucuccugccccaacaaccucgucgucgaggacgagggcugcaccucccucuccggcuucuccuacauggagcucaaggucggcuacaucuccgccaucaaggucaacggcuucaccugcaccggcgucgucaccgaggccgagaccuacaccaacuucgucggcuacgucaccaccaccuucaagcgcaagcacuuccgccccaugcccgacgccugccgcgccgccuacaacuggaagaccgccggcgacccccgcuacgaggagucccuccagaaccccuaccccgacuaccacuggcuccgcaccgucaagaccaccaaggagucccucaucaucaucucccccuccgucgccgaccucgaccccuacgacaagucccuccacucccgcgucuuccccggcggcaagugccucggcaucaccgucuccuccaccuacugcuccaccaaccacgacuacaccaucuggaugcccgaggaggcccgccucggcaccuccugcgacaucuucaccaacucccgcggcaagcgcgccuccaagggcggccgcaccugcggcuucgucgacgagcgcggccucuacaagucccucaagggcgccugcaagcucaagcucugcggcguccucggccuccgccucauggacggcaccugggucaccauccagaccuccaacgagaccaaguggugccccuccgaccagcucgucaaccuccacgacuuccacuccgacgagaucgagcaccucgucgucgaggagcucgucaagaagcgcgaggagugccucgacgcccucgaguccaucaugaccaccaaguccgucuccuuccgccgccucucccaccuccgcaagcucguccccggcuucggcaaggccuacaccaucuucaacaagacccucauggaggccgacgcccacuacaaguccauccgcaccuggaacgagaucauccccuccaagggcugccucaaggucggcggccgcugccacccccacgucgacggcgucuucuucaacggcaucauccucggccccgacggcaacguccucauccccgagaugcaguccucccuccuccagcagcacgucgagcuccucgaguccuccgucaucccccucaugcacccccucgccgaccccuccaccgucuucaaggacggcgacgaggccgaggacuucgucgagguccaccuccccgacguccacaagcaggucuccggcgucgaccucggccuccccaacuggggcaaguaccuccucauguccgccggcgcccucgccacccucaugcucaccaucuuccucaucaccugcugccgccgcgucgaccgcaccgaguccauccagcgcggccccggcgagcucggccgcgaggucuccgucaccucccagaacggcaaggucaucuccuccugggagcucuacaaguccggcggcgagacccgccucuga

SEQ ID NO: 127337 - RNA, 1575 nt, Artificial Sequence; identical to SEQ ID NO: 127305
  derived and/or modified CDS sequence (opt2) from glycoprotein__RABV__JQ685932.1

SEQ ID NO: 127338 - RNA, 1575 nt, Artificial Sequence
  derived and/or modified CDS sequence (opt2) from glycoprotein__RABV__JQ685933.1
augaucccccaggcccuccucuacgucccccuccucauccccucccucugcuucggcggcuuccccaucuacaccauccccgacaagcucggccccuggucccccaucgacauccaccaccucuccugccccaacaaccucgucgucgaggacgagggcugcaccucccucuccggcuucuccuacauggagcucaaggucggcuacaucuccgccaucaaggucaacggcuucaccugcaccggcgucgucaccgaggccgagaccuacaccaacuucgucggcuacgucaccaccaccuucaagcgcaagcacuuccgccccaugcccgacgccugccgcgccgccuacaacuggaagauggccggcgacccccgcuacgaggagucccuccagaaccccuaccccgacuacuccuggcuccgcaccgucaagaccaccaaggagucccucaucaucaucucccccuccgucgccgaccucgaccccuacgacaagucccuccacucccgcgucuuccccggcggcaagugccucggcaucaccaucuccuccaccuacugcuccaccaaccacgacuacaccaucuggaugcccgaggaggcccgccucggcaccuccugcgacaucuucaccaacucccgcggcaagcgcgccuccaagggcggcaagaccugcggcuucgucgacgagcgcggccucuacaagucccucaagggcgccugcaagcucaagcucugcggcguccccggccuccgccucauggacggcaccugggucaccauccagaccuccgacgagaccaaguggugccccuccgaccagcucgucaaccuccacgacuuccacuccgacgagaucgagcaccucgucgucgaggagcucgucaagaagcgcgaggagugccucgacgcccucgaguccaucaugaccaccaaguccgucuccuuccgccgccucucccaccuccgcaagcucguccccggcuucggcaaggccuacaccaucuucaacaagacccucauggaggccgacgcccacuacaaguccauccgcaccuggaacgagaucauccccuccaagggcugccucaaggucggcggccgcugccacccccacgucgacggcgucuucuucaacggcaucauccucggccccgacggcaacguccucauccccgagaugcaguccucccuccuccagcagcacgucgagcuccucgaguccuccgucaucccccucaugcacccccucgccgaccccuccaccgucuucaaggacggcgacgaggccgaggacuucgucgagguccaccuccccgacauccacaagcaggucuccggcgucgaccucggccuccccaacuggggcaaguaccuccucauguccgccggcgcccucgccacccucaugcucaucauccuccucaugaccugcugccgccgcgccaaccgcaccgaguccauccagcgcgaccccggcgaguccggccgcaaggucuccaucaccucccccgacggcaaggucaucuccuccugggagcucuacaaguccggcggcgagacccgccucuga

SEQ ID NO: 127339 - RNA, 1575 nt, Artificial Sequence
  derived and/or modified CDS sequence (opt2) from glycoprotein__RABV__JQ685934.1
augaucccccaggcccuccucuacgucccccuccucaucuccucccucugcuucggcggcuuccccaucuacaccauccccgacaagcucggccccuggucccccaucgacauccaccaccucuccugccccaacaaccucgucgucgaggacgagggcugcaccucccucuccggcuucuccuacauggagcucaaggucggcuacaucuccgccaucaaggucaacggcuucaccugcaccggcgucgucaccgaggccgagaccuacaccaacuucgucggcuacgucaccaccaccuucaagcgcaagcacuuccgccccaugcccgacgccugccgcgccgccuacaacuggaagauggccggcgacccccgcuacgaggagucccuccagaaccccuaccccgacuacuccuggcuccgcaccgucaagaccaccaaggagucccucaucaucaucucccccuccgucgccgaccucgaccccuacgacaagucccuccacucccgcgucuuccccggcggcaagugccucggcaucaccaucuccuccaccuacugcuccaccaaccacgacuacaccaucuggaugcccgaggaggcccgccucggcaccuccugcgacaucuucaccaacucccgcggcaagcgcgccuccaagggcggcaagaccugcggcuucgucgacgagcgcggccucuacaagucccucaagggcgccugcaagcucaagcucugcggcguccccggccuccgccucauggacggcaccugggucaccauccagaccuccgacgagaccaaguggugccccuccgaccagcucgucaaccuccacgacuuccacuccgacgagaucgagcaccucgucgucgaggagcucgucaagaagcgcgaggagugccucgacgcccucgaguccaucaugaccaccaaguccgucuccuucaagcgccucucccaccuccgcaagcucguccccggcuucggcaaggccuacaccaucuucaacaagacccucauggaggccgacgcccacuacaaguccauccgcaccuggaacgagaucauccccuccaagggcugccucaaggucggcggccgcugccacccccacgucgacggcgucuucuucaacggcaucauccucggccccgacggcaacguccucauccccgagaugcaguccucccuccuccagcagcacgucgagcuccucgaguccuccgucaucccccucaugcacccccucgccgaccccuccaccgucuucaaggacggcgacgaggccgaggacuucgucgagguccaccuccccgacauccacaagcaggucuccggcgucgaccucggccuccccaacuggggcaaguaccuccucauguccgccggcgcccucgccacccucaugcucaucaucuuccucauggccugcugccgccgcgccaaccgcaccgaguccauccagcgcgaccccggcgaguccggccgcaaggucuccauccccucccaggacggcaaggucaucuccuccugggagcucuacaaguccggcggcgagacccgccucuga

SEQ ID NO: 127340 - RNA, 1575 nt, Artificial Sequence
  derived and/or modified CDS sequence (opt2) from glycoprotein__RABV__JQ685936.1
augauccuccaggcccuccucuucgucccccuccucaucuccccccucugccucggcaaguuccccaucuacaccauccccgacaagcucggccccuggucccccaucgacauccaccaccucuccugccccaacaaccucgucgucgaggacgagggcugcaccaaccucuccggcuucuccuacauggagcucaaggucggcuacaucuccgccaucaaggucaacggcuucaccugcaccggcgucgucaccgaggccgagaccuacaccaacuucgucggcuacgucaccaccaccuucaagcgcaagcacuuccgccccauccccgacgccugccgcgccgccuacaacuggaagauggccggcgacccccgcuacgaggagucccuccagaaccccuaccccgaguaccacuggcuccgcaccgucaagaccaccaaggagucccucaucaucaucucccccuccgucgccgaccucgaccccuacgacaagucccuccacucccgcgucuuccccggcggcaagugccucggcaucaccgucuccuccaccuacugcuccaccaaccacgacuacaccaucuggaugcccgaggagccccgccucggcaccuccugcgacaucuucaccuccuccaagggcaagaaggccuccaagggcggcaagaccugcggcuucgucgacgagcgcggccucuacaagucccucaagggcgccugcaagcucaagcucugcggcguccucggccuccgccucauggacggcaccugggucuccauccagaccuccgacgacaccaaguggugcccccccgaccagcucgucaaccuccacgacuuccacuccgacgagaucgagcaccucgucgucgaggagcucgucaagaagcgcgaggagugccucgacgcccucgaguccaucaugaccaccaaguccgucuccuuccgccgccucuccuaccuccgcaagcucguccccggcuucggcaaggccuacaccaucuucaacaagacccucauggaggccgacgcccacuacaaguccguccgcaccuggaacgagaucauccccuccaagggcugccucaagguccgcgagcgcugccacccccccgucgacggcgucuucuucaacggcaucauccucggccccgacggcaacguccucauccccgagaugcaguccucccuccuccagcagcacauggagcuccucgaguccuccgucaucccccucaugcacccccucgccgaccccuccaccgucuucaaggagggcgacgaggccgaggacuucgucgagguccaccuccccgacguccacaagcagaucuccggcgucgaccucggccuccccuccuggggcaaguaccuccucaugaucgccggcggccucgucacccucguccucaucaucugcuccaucgccugcugccgccgcgccaagcgcaccgagucccgccgccgcggcuccggcgaguccggcaagaaggucaacgccaccccccagacccgcaaggucgucuccuccugggagcucuacaagcgcgagggcgacgcccgccucuga

SEQ ID NO: 127341 - RNA, 1575 nt, Artificial Sequence
  derived and/or modified CDS sequence (opt2) from glycoprotein__RABV__JQ685938.1
augguccuccaggcccuccucuucgcccccuuccucaucuccucccucugccucggcaaguuccccaucuacaccauccccgacaagcucggccccuggucccccaucgacauccaccaccucuccugccccaacaaccucgucgucgaggacgagggcugcaacucccucuccggcaucuccuacauggagcucaaggucggcuacaucuccgccaucaaggucaacggcuucaccugcaccggcgucgucaccgaggccgagaccuacaccaacuucgucggcuacgucaccaccaccuucaagcgcaagcacuuccaccccaugcccgacgccugccgcuccgccuacaacuggaagcucgccggcgacccccgcuacgaggagucccuccagaaccccuaccccgacuaccacuggcuccgcaccgucaagaccaccaaggagucccucaucaucaucucccccuccgucgccgaccucgaccccuacgacaagucccuccacucccgcaucuuccccuccggcaagugcuccggcaugaccaucuccuccaccuacugcuccaccaaccacgaguacaccaucuggaugcccgagaaggccggccucggcaccuccugcgacaucuucaccaccuccaagggcaagcgcgccuccaagggcggcaagaccugcggcuucgucgacgagcgcggccucuacaagucccucaagggcgccugcaagcucaagcucugcggcgucuccggccuccgccucauggacggcaccugggucgccauccagaccuccgaggagaccaaguggugcccccccgaccagcucgucaaccuccacgaccuccacuccgacgagaucgagcaccucgucgucgaggagcucgucaagaagcgcgaggagugccucgacgcccucgaguccaucaugaccaccaaguccgucuccuuccgccgccucucccaccuccgcaagcucguccccggcuucggcaaggccuacaccaucuucaacaagacccucauggaggccgacgcccacuacaaguccauccgcaccuggaacgagaucauccccuccaagggcugccuccgcgucggcggcaagugccacccccacgucaacggcgucuucuucaacggcaucauccucggccccgacggccacguccucauccccgagaugcaguccucccuccuccagcagcacauggagcuccucgaguccuccgucaucccccucaugcacccccucgccgaccucuccaccgucuucaaggacggcgacgaggccgaggacuucgucgagguccaccuccccgacguccacaagcagaucuccggcgucgaccucggccuccccuccuggggcaaguacguccucauguccgccggcgcccucgccauccucaugcucgucaucucccucaugaagugcuucuggggcgucaaccgcaccaagcccauccagcagggcccccgcgaguccgagcgcaaggucuccaucgccccccagucccgcaaggucaucuccuccugggaguccuacaaguccggcggcgagaccgagcucuga

SEQ ID NO: 127342 - RNA, 1575 nt, Artificial Sequence
  derived and/or modified CDS sequence (opt2) from glycoprotein__RABV__JQ685940.1
augaucccccaggcccuccucuacgucccccuccucauccccucccucugcuucggcggcuuccccaucuacaccauccccgacaagcucggccccuggucccccaucgacauccaccaccucuccugccccaacaaccucgucgucgaggacgagggcugcaccucccucuccggcuucuccuacauggagcucaaggucggcuacaucuccgccaucaaggucaacggcuucaccugcaccggcgucgucaccgaggccgagaccuacaccaacuucgucggcuacgucaccaccaccuucaagcgcaagcacuuccgccccaugcccgacgccugccgcgccgccuacaacuggaaggucgccggcgacccccgcuacgaggagucccuccagaaccccuaccccgacuacuccuggcuccgcaccgucaagaccaccaaggagucccucaucaucaucucccccuccgucgccgaccucgaccccuacgacaagucccuccacucccgcgucuuccccggcggcaagugccucggcaucaccaucuccuccaccuacugcuccaccaaccacgacuacaccaucuggaugcccgaggaggcccgccucggcaccuccugcgacaucuucaccaacucccgcggcaagcgcgccuccaagggcggcaagaccugcggcuucgucgacgagcgcggccucuacaagucccucaagggcgccugcaagcucaagcucugcggcguccccggccuccgccucauggacggcaccugggucaccauccagaccuccgacgagaccaaguggugccccuccgaccagcucgucaaccuccacgacuuccacuccgacgagaucgagcaccucgucgucgaggagcucgucaagaagcgcgaggagugccucgacgcccucgaguccaucaugaccaccaaguccgucuccuuccgccgccucucccaccuccgcaagcucguccccggcuucggcaaggccuacaccaucuucaacaagacccucauggaggccgacgcccacuacaaguccauccgcaccuggaacgagaucauccccuccaagggcugccucaaggucggcggccgcugccacccccacgucgacggcgucuucuucaacggcaucauccucggccccgacggcaacguccucauccccgagaugcaguccucccuccuccagcagcacgucgagcuccucgaguccuccgucaucccccucaugcacccccucgccgaccccuccaccgucuucaaggacggcgacgaggccgaggacuucgucgagguccaccuccccgacauccacaagcaggucuccggcgucgaccucggccuccccaacuggggcaaguaccuccucauguccgccggcgcccucgccacccucaugcucaccaucuuccucaucaccugcugccgccgcuccaaccgcaccgaguccauccagcgcgaccccggcgaguccggcaagaaggucuccaucaccucccaggacggcaaggucaucuccuccugggagcucuacaaguccggcggcgagacccgccucuga

SEQ ID NO: 127343 - RNA, 1575 nt, Artificial Sequence; identical to SEQ ID NO: 127304
  derived and/or modified CDS sequence (opt2) from glycoprotein__RABV__JQ685941.1

SEQ ID NO: 127344 - RNA, 1575 nt, Artificial Sequence
  derived and/or modified CDS sequence (opt2) from glycoprotein__RABV__JQ685942.1
augaucccccaggcccuccuccucgucccccuccucaucuccucccucugcuucggcggcuuccccaucuacaccauccccgacaagcucggccccuggucccccaucgacauccaccaccucuccugccccaacaaccucgucgucgaggacgagggcugcaccucccucuccggcuucuccuacauggagcucaaggucggcuacaucuccgccaucaaggucaacggcuucaccugcaccggcgucgucaccgaggccgagaccuacaccaacuucgucggcuacgucaccaccaccuucaagcgcaagcacuuccgccccacccccgacgccugccgcgccgccuacaacuggaagauggccggcgacccccgcuacgaggagucccuccagaaccccuaccccgacuaccacuggcuccgcaccgucaagaccaccaaggagucccucaucaucaucucccccuccgucgccgaccucgaccccuacgacaagucccuccacucccgcgucuuccccggcggcaagugccucggcaucaccgucuccuccaccuacugcuccaccaaccacgacuacaccaucuggaugcccgaggaggcccgccucggcaccuccugcgacaucuucaccaacucccgcggcaagcgcgccuccaagggcggcaagaccugcggcuucgucgacgagcgcggccucuacaagucccucaagggcgccugcaagcucaagcucugcggcguccccggccuccgccucauggacggcaccugggucaccauccagaccuccgacgagaccaaguggugccccuccgaccagcucgucaaccuccacgacuuccacuccgacgagaucgagcaccucgucgucgaggagcucgucaagaagcgcgaggagugccucgacgcccucgaguccaucaugaccaccaaguccgucuccuuccgccgccucucccaccuccgcaagcucguccccggcuucggcaaggccuacaccaucuucaacaagacccucauggaggccgacgcccacuacaaguccauccgcaccuggaacgagaucauccccuccaagggcugccucaaggucggcggccgcugccacccccacgucgacggcgucuucuucaacggcaucauccucggccccgacggcaacguccucauccccgagaugcaguccucccuccuccagcagcacgucgagcuccucgaguccuccgucaucccccucaugcacccccucgccgaccccuccaccgucuucaaggacggcgacgaggccgaggacuucgucgagguccaccuccccgacauccacaagcaggucuccggcgucgaccucggccuccccaacuggggcaaguaccuccucauguccgccggcgcccucgccacccucauccucaccaucuuccucgucaccugcugccgccgcgucgaccgcacccgcuccauccagcgcggcuccggcgaguccggccgcaaggucuccgucaccucccagaacggcaaggucaucuccuccugggagcucuacaaguccggcggcgagacccgccucuga

SEQ ID NO: 127345 - RNA, 1575 nt, Artificial Sequence
  derived and/or modified CDS sequence (opt2) from glycoprotein__RABV__JQ685943.1
augguccuccaggcccuccucuucgucccccuccucgucuuccccuccugcuucggcaaguuccccaucuacaccauccccgacaagcucggccccuggucccccaucgacauccaccaccucuccugccccaacaaccucgucgucgaggacgagggcugcaacaaccucuccggcuucuccuacauggagcucaaggucggcuacaucuccgccaucaaggucaacggcuucaccugcaccggcgucgucaccgaggccgagaccuacaccaacuucgucggcuacgucaccaccaccuucaagcgcaagcacuuccgccccacccccgacgccugccgcgccgccuacaacuggaagauggccggcgacccccgcuacgaggagucccuccacaaccccuaccccgacuaccacuggcuccgcaccgucaagaccaccaaggagucccucgucaucaucucccccuccgucgccgaccucgaccccuacgacaagucccuccacucccgcgucuuccccuccggcaagugcuccggcaugaccgucuccuccaccugcugcuccaccaaccacgacuacaccaucuggaugcccgagaacccccgccucggcaccuccugcgacaucuucaccaacucccgcggcaagcgcgccuccaagggcuccaagaccugcggcuucgucgacgagcgcggccucuacaagucccucaagggcgccugcaagcucaagcucugcggcguccucggccuccgccucauggacggcaccugggucgccaugcagaccuccgacgagaucaaguggugcccccccgaccagcucgucaaccuccacgacuuccgcuccgacgagaucgagcaccucgucgucgaggagcucgucaagaagcgcgaggagugccucgacgcccucgaguccaucaugaccaccaaguccgucuccuuccgccgccucucccaccuccgcaagcucguccccggcuucggcaaggccuacaccaucuucaaccgcacccucauggaggccgacgcccacuacaaguccguccgcaccuggaacgaggucauccccuccaagggcugccuccgcgucggcggccgcugccacccccacgucaacggcgucuucuucaacggcaucauccucggccccgacggccacguccucauccccgagaugcaguccucccuccuccagcagcacauggagcuccucgaguccuccgucaucccccucaugcacccccucgccaaccccuccaccgucuucaaggagggcgacgaggccgaggacuucgucgagguccaccuccccgacguccacaagcaggucuccggcgucgaccucggccuccccaacuggggcaaguacguccucauguccgccggcgcccucaucgcccucaugcucaucaucuuccucaugaccugcugccgccgcgucaaccgccccgaguccacccagcgcauccucggcggcaccggcaagaaggucuccgccgccucccaguccggcaaggucaucuccuccugggaguccuacaaguccggcggcgagacccagcucuga

SEQ ID NO: 127346 - RNA, 1575 nt, Artificial Sequence
  derived and/or modified CDS sequence (opt2) from glycoprotein__RABV__JQ685944.1
auggucccccaggcccuccucgucgucccccuccucggcuucucccucugcuucggcaaguuccccaucuacaccauccccgacaagcucggccccuggucccccaucgacauccaccaccucuccugccccaacaaccucgucgucgaggacgagggcugcaccaaccucuccggcuucuccuacauggagcucaaggucggcuacaucuccgccaucaaggucaacggcuucaccugcaccggcgucgucaccgaggccgagaccuacaccaacuucgucggcuacgucaccaccaccuucaagcgcaagcacuuccaccccacccccgacgagugccgcgccgccuacaacuggaagauggccggcgacccccgcuacgaggagucccuccacaaccccuaccccgacuaccacuggcuccgcaccgucaagaccaccaaggagucccucgucaucaucucccccuccgucgccgaccucgaccccuacgacaagucccuccacucccgcgucuuccccuccggcaagugcuccggcaucaccgucuccuccaccuacugcuccaccaaccacgacuacaccaucuggaugcccgagaacccccgccucggcaccuccugcgacaucuucaccaacucccgcggcaagcgcgccuccaagggcuccaagaccugcggcuucgucgacgagcgcggccucuacaagucccucaagggcgccugcaagcucaagcucugcggcguccccggccucaagcucaucgacggcaccuggaucgccaugcagaccuccgacgagaccaaguggugcccccccgaccagcucgucaaccuccacgacuuccgcuccgacgagaucgagcaccucgucgucgaggaccucgucaagaagcgcgaggagugccucgacgcccucgaguccaucaugaccaccaaguccgucuccuuccgccgccucucccaccuccgcaagcucguccccggcuucggcaaggccuacaccaucuucaacaagacccucauggaggccgacgcccacuacaaguccguccgcaccuggaacgagaucauccccuccaagggcugccucaaggucggcggccgcugccacccccacgucaacggcgucuucuucaacggcgucauccucggccccgacggccacguccucauccccgagaugcaguccucccuccuccagcagcacauggagcuccucgaguccuccgucaucccccucaugcacccccucgccgaccccuccaccgucuucaaggacggcgacgaggccgaggacuucgucgagauccaccuccccaacguccacaagcaggucuccggcgucgaccucggccuccccaacuggggcaaguacgucucccucuccgccggcgcccucaccgcccucaugcucaucaucuuccucauggccugcugccgcaaggucaaccgccccgagcccacccagcgcucccucgagggcaagggccgcaaggucuccaucaccucccaguccggcaaggucaucuccuccugggaguccuacaaguccggcggcgagacccgccucuga

SEQ ID NO: 127347 - RNA, 1575 nt, Artificial Sequence; identical to SEQ ID NO: 127308
  derived and/or modified CDS sequence (opt2) from glycoprotein__RABV__JQ685945.1

SEQ ID NO: 127348 - RNA, 1575 nt, Artificial Sequence
  derived and/or modified CDS sequence (opt2) from glycoprotein__RABV__JQ685946.1
augaucccccaggcccuccucuacgucccccuccucauccccucccucugcuucggcggcuuccccaucuacaccauccccgacaagcucggccccuggucccccaucgacauccaccaccucuccugccccaacaaccucgucgucgaggacgagggcugcaccucccucuccggcuucuccuacauggagcucaaggucggcuacaucuccgccaucaaggucaacggcuucaccugcaccggcgucgucaccgaggccgagaccuacaccaacuucgucggcuacgucaccaccaccuucaagcgcaagcacuuccgccccaugcccgacgccugccgcgccgccuacaacuggaagauggccggcgacccccgcuacgaggagucccuccagaaccccuaccccgacuacuccuggcuccgcaccgucaagaccaccaaggagucccucaucaucaucucccccuccgucgccgaccucgaccccuacgacaagucccuccacucccgcgucuuccccggcggcaagugccucggcaucaccaucuccuccaccuacugcuccaccaaccacgacuacaccaucuggaugcccgaggaggcccgccucggcaccuccugcgacaucuucaccaacucccgcggcaagcgcgccuccaagggcggcaagaccugcggcuucgucgacgagcgcggccucuacaagucccucaagggcgccugcaagcucaagcucugcggcguccccggccuccgccucauggacggcaccugggucaccauccagaccuccgacgagaccaaguggugccccuccgaccagcucgucaaccuccacgacuuccacuccgacgagaucgagcaccucgucgucgaggagcucgucaagaagcgcgaggagugccucgacgcccucgaguccaucaugaccaccaaguccgucuccuuccgccgccucucccaccuccgcaagcucguccccggcuucggcaaggccuacaccaucuucaacaagacccucauggaggccgacgcccacuacaaguccauccgcaccuggaacgagaucauccccuccaagggcugccucaaggucggcggccgcugccacccccacgucgacggcgucuucuucaacggcaucauccucggccccgacggcaacguccucauccccgagaugcaguccucccuccuccagcagcacgucgagcuccucgaguccuccgucaucccccucaugcacccccucgccgaccccuccaccgucuucaaggacggcgacgaggccgaggacuucgucgagguccaccuccccgacguccacaagcaggucuccggcgucgaccucggccuccccaacuggggcaaguaccuccucauguccgccggcgcccucgccacccucaugcucaccaucuuccucaugaccuacugccgccgcgccaaccgcgccgaguccauccagcgcgaccccggcgaguccggccgcaaggucuccaucaccucccaggacggcaaggucaucuccuccugggagcucuacaaguccggcggcgaggcccgccucuga

SEQ ID NO: 127349 - RNA, 1575 nt, Artificial Sequence
  derived and/or modified CDS sequence (opt2) from glycoprotein__RABV__JQ685947.1
augaucccccaggcccuccucuucgucucccuccucauccccucccucugccucggcgaguuccccaucuacaccauccccgacaagcucggccccuggacccccaucgacauccaccaccucuccugccccaacaaccucgucgccgagaacgacggcugcaccucccucuccggcuucuccuacauggagcucaaggucggcuacaucuccgccaucaaggucaacggcuucaccugcaccggcgucgucaccgaggccgagaccuacaccaacuucgucggcuacgucaccaccaccuucaagcgcaagcacuuccgccccaugcccgacgccugccgcgccgcccacgacuggaagauggccggcgacccccgcuacgaggacucccuccagaaccccuaccccgacuaccacuggcuccgcaccgucaagaccaccaaggagucccucgucaucaucucccccuccgucgccgaccucgaccccuacgacaagucccuccacucccgcgucuuccccuccggcaagugccucggcaucaccgucuccuccaccuacugcuccaccaaccacgacuacaccaucuggaugcccgucgagccccgccucggcaccuccugcgacaucuucaccaacucccgcggcaagcgcgccuccaagggcggccgcgucugcggcuucgucgacgagcgcggccucuacaagucccucaagggcgccugcaagcucaagcucugcggcguccccggcauccgccucauggacggcaccugggucuccauccagaccuccgaggacaucaaguggugcccccccgaccgccucgucaaccuccacgacuuccacuccgacgagcucgagcaccucgucgucgaggagcucaucaagcgccgcgagaacugccucgacgcccucgaguccaucaugaccaccaaguccgucuccuuccgccgccucucccaccuccgcaagcucguccccggcuucggcaaggccuacaccaucuucaacaagacccucauggaggccgacgcccacuacaaguccgucaagaccuggaacgaggucauccccuccaagggcugccucgaggucggcggcaagugccacccccccgucaacggcgucuucuucaacggcaucauccucggccccgacggcaacguccucauccccgagaugcaguccucccuccuccagcagcacauggagcuccucgaguccuccgucaucccccucaugcacccccucgccgaccccuccaccgucuucaaggagggcgacgaggccgaggacuucgucgagguccaccuccccgacguccacaagcaggucuccgacgucgaccucggccuccccuccuggggcaaguaccuccucauguccgccggcgcccucgccauccucauccucgccaucguccucaucaucugcugccgccgcgucaacaagacccgcuccacccagcgcggccagcgcgagucccgcggcaagauguccgucgccccccagaacggcaagaucaucuccuccugggagcucuacaagcgcgaguccgagaccggccucuga

SEQ ID NO: 127350 - RNA, 1575 nt, Artificial Sequence; identical to SEQ ID NO: 127348
  derived and/or modified CDS sequence (opt2) from glycoprotein__RABV__JQ685951.1

SEQ ID NO: 127351 - RNA, 1575 nt, Artificial Sequence
  derived and/or modified CDS sequence (opt2) from glycoprotein__RABV__JQ685952.1
augaucccccaggccauccucuccgucccccuccucaucuccucccucugcuucggcaaguuccccaucuacaccauccccgagaagcucggccccuggucccccaucgacauccaccaccucuccugccccaacaaccucgucgucgaggacgagggcugcaccacccucuccggcuucuccuacaucgagcucaaggucggcuacaucuccgccaucaaggucaacggcuucaccugcaccggcgucgucaccgaggccgagaccuacaccaacuucgucggcuacgucaccaccaccuucaagcgcaagcacuuccgccccaugcccgacgccugccgcgccgccuacaacuggaagauggccggcgacccccgcuacgaggagucccuccacaaccccuaccccgacuaccacuggcuccgcaccgucaagaccaccaaggagucccucgucaucaucucccccuccgucgccgaccucgaccccuacgacaagucccuccacucccgcgucuuccccggcggcaagugccucggcaucaccaucuccuccaccuacugcuccaccaaccacgacuacaccaucuggaugcccgaggaggcccgccucggcaccuccugcgacaucuucaucaacucccgcggcaagcgcgccuccaagggcggccgcaccugcggcuucgucgacgagcgcggccucuacaagucccucaagggcgccugcaagcucaagcucugcggcguccccggccuccgccucauggacggcaccugggucuccauccccgccuccgacgagaccaaguggugcucccccgaccagcucgucaacguccacgacuuccacuccgacgagaucgagcaccucgucgucgaggagcucgucaagcgccgcgaggagugccucgacgcccucgaguccaucgucaccaccaaguccaucuccuuccgccgccucucccaccuccgcaagcucguccccggcuucggcaaggccuacaccaucuucaacaagacccucauggaggccgacgcccacuacaaguccguccgcaccuggaacgagaucauccccuccaagggcugccucuccgucggcggccgcugccacccccacgucaacggcgucuucuucaacggcaucauccucggccccgacggcaacguccucauccccgagaugcaguccucccuccuccagcagcacauggagcuccucgaguccuccgucaucccccucaugcacccccucgccgaccccuccaccgucuucaaggacggcgacgaggccgaggacuucgucgagguccaccuccccgacguccaggagcaggucuccggcgucgaccucggccuccccaacuggggcaaguacguccucauguccgccggcgcccucgccauccucauccucaccaucuuccucaucaccugcugccgccgcgccgacaagaccaaguccauccagcagggccucggcggcuccggccgcaaggucuccgucuccccccagaacggcaaggucaucuccuccugggaguccuacaagaacggcggcgagacccgccucuga

SEQ ID NO: 127352 - RNA, 1575 nt, Artificial Sequence
  derived and/or modified CDS sequence (opt2) from glycoprotein__RABV__JQ685953.1
augaucuuccaggcccuccccuucgucccccuccucaucuccucccucugccucggcaaguuccccaucuacaccauccccgacaagcucggccccuggucccccaucgacauccaccaccucuccugccccaacaaccucgucgucgaggacgagggcugcaccucccucuccggcuucuccuacauggagcucaaggucggcuacaucuccgccaucaaggucaacggcuucaccugcaccggcgucgucaccgaggccgagaccuacaccaacuucgucggcuacgucaccaccaccuucaagcgcaagcacuuccgccccauccccgacgccugccgcgccgccuacaacuggaagauggccggcgacccccgcuacgaggagucccuccagaaccccuaccccgaguaccacuggcuccgcaccgucaagaccaccaaggagucccucaucaucaucucccccuccgucgccgaccucgaccccuacaacaagucccuccacucccgcgucuuccccggcggcaagugccucggcaucaccaucuccuccaccuacugcuccaccaaccacgacuacaccaucuggaugcccgaggagccccgccucggcaccuccugcgacaucuucaccuccuccaagggcaagaaggccuccaagggcggcaagaccugcggcuucgucgacgagcgcggccucuacaagucccucaagggcgccugcaagcucaagcucugcggcguccucggccuccgccucauggacggcaccugggucuccauccagaccuccgacgacaccaaguggugcccccccgaccagcucgucaaccuccacgacuuccacuccgacgagaucgagcaccucgucgucgaggagcucgucaagaagcgcgaggagugccucgacgcccucgaguccaucaugaccaccaaguccgucuccuuccgccgccucuccuaccuccgcaagcucguccccggcuucggcaaggccuacaccaucuucaacaagacccucauggaggccgacgcccacuacaaguccguccgcaccuggaacgagaucauccccuccaagggcugccucaagguccgcgagcgcugccacccccccgucgacggcgucuucuucaacggcaucauccucggccccgacggcaacguccucauccccgagaugcaguccucccuccuccagcagcacauggagcuccucgaguccuccgucaucccccucaugcacccccucgccgaccccuccaccgucuucaaggacggcgacgaggccgaggacuucgucgagguccaccuccccgacguccacaagcagaucuccggcgucgaccucggccuccccuccuggggcaaguaccuccucaugaucgccggcggccucgccacccucgcccucaucaucuucuccauggccugcugccgccgcgccaagcgcaccgagcccggccgccgcggcuccggcgaguccggcaagcgcguccccgccaccccccagacccgcaaggucgucuccuccugggagcucuacaaguccgagggcgacgcccgccucuga

SEQ ID NO: 127353 - RNA, 1575 nt, Artificial Sequence
  derived and/or modified CDS sequence (opt2) from glycoprotein__RABV__JQ685954.1
auggucccccaggcccuccucuucgucccccuccucauccccuccgucugccucggcaaguuccccaucuacaccauccccgacaagcucggccccuggucccccaucgacauccaccaccucuccugccccaacaaccucgucgucgaggacgagggcugcuccaaccucuccggcuucuccuacauggagcucaaggucggcuacaucuccgccaucaaggucgacggcuucaccugcaccggcgucgucaccgaggccgagaccuacaccaacuucaucggcuacgucaccaccaccuucaagcgcaagcacuuccgccccaugcccgacgccugccgcuccgccuacaacuggaagaucgccggcgacccccgcuacgaggagucccuccacacccccuaccccgacuaccacuggcuccgcaccgucaagaccaccaaggagucccucgucaucaucucccccuccgucgccgaccucgaccccuacgacaagucccuccacuccauggucuuccccaacggcaagugcuccggcaucaccgucuacuccaccuacugcuccaccaaccacgacuacaccaucuggaugcccgagaaggccggccucggcaccuccugcgacaucuucaccaacuccaagggcaagcgcgccuccaagggcggccgcaccugcggcuucgucgacgagcgcggccucuacaagucccuccgcggcgccugcaagcucaagcucugcggcguccccggccuccgccucauggacggcaccugggccaccauccagacccccgaggagaccaaguggugcucccccgaccagcucgucaaccuccacgacuuccacuccgacgagaucgagcaccucgucgucgaggaccucgucaagaagcgcgaggagugccucgacacccucgaguccaucaugaccaccaaguccgucuccuuccgccgccucucccaccuccgcaagcucguccccggcuucggcaaggccuacaccaucuucaacaagacccucauggaggccgacgcccacuacaaguccguccgcaccuggaacgagaucauccccuccaagggcugccuccgcgucggcggccgcugccacccccacgucaacggcgucuucuucaacggcgucaucaugggccccgacggccacguccucauccccgagaugcaguccucccuccuccagcagcacauggagcuccucgaguccuccgucaucccccucauccacccccucgccgaccccuccaccgucuucaaggacaacgacgaggccgaggacuucgucgagguccaccuccccgacguccacaagcaggucuccggcaucgaccucggccuccccuccuggggccgcuaccuccucaugaucgccggcgcccucaugacccucacccucgucaucuuccucaugaucugcugccgccgcgucaacaaggccggcuccauccagcaggaccccgagaaguccgagcgccgccgcuccgucaccccccagaacggcaaggucaucuccuccugggaguccuacaaguccggcuccgagacccgccucuga

SEQ ID NO: 127354 - RNA, 1575 nt, Artificial Sequence
  derived and/or modified CDS sequence (opt2) from glycoprotein__RABV__JQ685955.1
augaucucccaggccuuccucuacgucccccuccucaucuccucccucugcuucggcaaguuccccaucuacaccauccccgacaagaucggccccuggucccccaucgacauccaccaccucuccugccccaacaaccucgucgucgaggacgagggcugcaccucccucuccggcuucuccuacauggagcucaaggucggcuacaucuccgccaucaaggucaacggcuucaccugcaccggcgucgucaccgaggccgagaccuacaccaacuucgucggcuacgucaccaccaccuucaagcgcaagcacuuccgccccaugcccgacgccugccgcuccgccuacaacuggaagaccgccggcgacccccgcuacgaggagucccuccagaaccccuaccccgacuacuccuggcuccgcaccgucaagaccaccaaggagucccucgucaucaucucccccuccgucgccgaccucgaccccuacgacaagucccuccacucccgcgucuuccccaacggcaagugccucggcaucaccaucuccuccaccuacugcuccaccaaccacgacuacaccaucuggaugcccgaggaggcccgccucggcaccuccugcgacaucuucaccaacuccaagggcaagcgcgccuccaagggcggccgcaccugcggcuucgucgacgagcgcggccucuacaagucccuccgcggcgccugcaagcucaagcucugcggcguccccggccuccgccucauggacggcaccugggucuccauccagaccuccgacgagaccaaguggugcccccccgaccagcucgucaacguccacgacuuccacuccgacgagaucgagcaccucgucgucgaggagcucgucaagaagcgcgaggagugccucgacgcccucgaguccaucaugaccaccaaguccgucuccuuccgccgccucucccaccuccgcaagcucguccccggcuucggcaaggccuacaccaucuucaacaagacccucauggaggccgacgcccacuacaaguccguccagaccuggaacgagaucauccccuccaagggcugccucaaggucggcggcaugugccacccccacgucgacggcgucuucuucaacggcaucauccucggccccgacggcaacguccucauccccgagaugcaguccucccuccuccagcagcacauggagcuccucgaguccuccgucaucccccucaugcacccccucgccgaccccuccaccgucuucaaggacggcgacgaggccgaggacuucgucgagguccaccuccccgacauccacaagcaggucuccggcaucgaccucggccuccccgacuggggcaaguaccuccucauguccgccggcgcccucgccauccuccuccucaccaucuuccucaugaccugcugccgccgcgucaaccgcaccgaguccgcccagcgcgaccccggcgagcucggccgcaaggucuccgccaccccccagaaccgcaaggucaucuccuccugggagcucuacaaguccggcggcgacacccgccucuga

SEQ ID NO: 127355 - RNA, 1575 nt, Artificial Sequence
  derived and/or modified CDS sequence (opt2) from glycoprotein__RABV__JQ685956.1
augaucccccaggcccuccucuacgucccccuccucaucuccucccucugcuucggcggcuuccccaucuacaccauccccgacaagcucggccccuggucccccaucgacauccaccaccucuccugccccaacaaccucgucgucgaggacgagggcugcaccucccucuccggcuucuccuacauggagcucaaggucggcuacaucuccgccaucaaggucaacggcuucaccugcaccggcgucgucaccgaggccgagaccuacaccaacuucgucggcuacgucaccaccaccuucaagcgcaagcacuuccgccccaugcccgacgccugccgcgccgccuacaacuggaaggucgccggcgacccccgcuacgaggagucccuccagaaccccuaccccgacuacuccuggcuccgcaccgucaagaccaccaaggagucccucaucaucaucucccccuccgucgccgaccucgaccccuacgacaagucccuccacucccgcgucuuccccggcggcaagugccucggcaucaccaucuccuccaccuacugcuccaccaaccacgacuacaccaucuggaugcccgaggaggcccgccucggcaccuccugcgacaucuucaccaacucccgcggcaagcgcgccuccaagggcggcaagaccugcggcuucgucgacgagcgcggccucuacaagucccucaagggcgccugcaagcucaagcucugcggcguccccggccuccgccucauggacggcaccugggucaccauccagaccuccgacgagaccaaguggugccccuccgaccagcucgucaaccuccacgacuuccacuccgacgagaucgagcaccucgucgucgaggagcucgucaagaagcgcgaggagugccucgacgcccucgaguccaucaugaccaccaaguccgucuccuuccgccgccucucccaccuccgcaagcucguccccggcuucggcaaggccuacaccaucuucaacaagacccucauggaggccgacgcccacuacaaguccauccgcaccuggaacgagaucauccccuccaagggcugccucaaggucggcggccgcugccacccccacgucgacggcgucuucuucaacggcaucauccucggccccgacggcaacguccucauccccgagaugcaguccucccuccuccagcagcacgucgagcuccucgaguccuccgucaucccccucaugcacccccucgccgaccccuccaccgucuucaaggacggcgacgaggccgaggacuucgucgagguccaccuccccgacauccacaagcaggucuccggcgucgaccucggccuccccaacuggggcaaguaccuccucauguccgccggcgcccucgccacccucaugcucaccaucuuccucaugaccugcugccgccgcgccaaccgcaccgaguccauccagcgcgaccccggcgaguccggcaagaaggucuccaucaccucccaggacggcaaggucaucuccuccugggagcucuacaaguccggcggcgagacccgccucuga

SEQ ID NO: 127356 - RNA, 1575 nt, Artificial Sequence
  derived and/or modified CDS sequence (opt2) from glycoprotein__RABV__JQ685957.1
augaucucccaggcccuccucuucgucccccuccucaucuccucccucugccucggcgaguuccccaucuacaccauccccgagaagcucggccccuggucccccaucgacauccaccaccucuccugccccaacaaccucgucgucgaggacgagggcugcaacucccucuccggcuucuccuacauggagcucaaggucggcuacaucuccuccaucaaggucaacggcuucaccugcaccggcgucgucaccgaggccgagaccuacaccaacuucgucggcuacgucaccaccaccuucaagcgcaagcacuuccgccccaugcccgacgccugccgcgccgccuacaacuggaagauguccggcgacccccgcuacgaggagucccuccacaaccccuaccccgacuaccacuggcuccgcaccgucaagaccaccaaggagucccucgucaucaucucccccuccgucgccgaccucgaccccuacgacaagucccuccacucccgcgucuucuccggcggcaagugccucggcaucaccaucuccuccaccuacugcuccaccaaccacgacuacaccaucuggaugcccgaggaggcccgccucggcaccuccugcgacaucuucaccaacuccaagggcaagaaggccuccaagggcggccgcaccugcggcuucgucgacgagcgcggccucuacaagucccucaagggcgccugcaagcucaagcucugcggcguccccggccuccgccucauggacggcaccugggucuccauccagaccuccgacgagaccaaguggugcccccccgaccagcucgucaacauccacgacuuccgcuccgacgagaucgagcaccucgucgucgaggagcucgucaagaagcgcgaggagugccucgacgcccucgaguccaucaugaccaccaaguccgucuccuuccgccgccucucccaccuccgcaagcucguccccggcuucggcaaggccuacaccaucuucaacaagacccucauggaggccgacgcccacuacaaguccguccgcaccuggaacgagaucauccccuccaagggcugccucuccgucggcggccgcugccacccccacgucgacggcgucuucuucaacggcaucauccucggccccgacggcuccguccucauccccgagaugcaguccucccuccuccagcagcacauggagcuccucgaguccuccgucaucccccucaugcacccccucgccaaccccuccaccgucuucaaggacggcgacgaggccgaggacuucgucgagguccaccuccccgacauccaggagcaggucuccggcgucgaccucggccuccccaacuggggcaaguacguccucauguccgccggcgcccucgccauccuccuccucaccaucuuccucaugaccugcugcauccgcaccaaccgcaccaaguccauccagcagggccccggcgaguccggccgcaaggucuccguccccccccagaacggccgcgucaucuccuccugggaguccuucaaguccggcggcgagaccggccucuga

SEQ ID NO: 127357 - RNA, 1575 nt, Artificial Sequence; identical to SEQ ID NO: 127320
  derived and/or modified CDS sequence (opt2) from glycoprotein__RABV__JQ685959.1

SEQ ID NO: 127358 - RNA, 1575 nt, Artificial Sequence
  derived and/or modified CDS sequence (opt2) from glycoprotein__RABV__JQ685960.1
augaucccccaggcccuccucuacgucccccuccucaucuccucccucugcuucggcggcuuccccaucuacaccauccccgacaagcucggccccuggucccccaucgacauccaccaccucuccugccccaacaaccucgucgucgaggacgagggcugcaccucccucuccggcuucuccuacauggagcucaaggucggcuacaucuccgccaucaaggucaacggcuucaccugcaccggcgucgucaccgaggccgagaccuacaccaacuucgucggcuacgucaccaccaccuucaagcgcaagcacuuccgccccaugcccgacgccugccgcgccgccuacaacuggaaggucgccggcgacccccgcuacgaggagucccuccagaaccccuaccccgacuacuccuggcuccgcaccgucaagaccaccaaggagucccucaucaucaucucccccuccgucgccgaccucgaccccuacgacaagucccuccacucccgcgucuuccccggcggcaagugccucggcaucaccaucuccuccaccuacugcuccaccaaccacgacuacaccaucuggaugcccgaggaggcccgccucggcaccuccugcgacaucuucaccaacucccgcggcaagcgcgccuccaagggcggcaagaccugcggcuucgucgacgagcgcggccucuacaagucccucaagggcgccugcaagcucaagcucugcggcguccccggccuccgccucauggacggcaccugggucaccauccagaccuccgacgagaccaaguggugccccuccgaccagcucgucaaccuccacgacuuccacuccgacgagaucgagcaccucgucgucgaggagcucgucaagaagcgcgaggagugccucgacgcccucgaguccaucaugaccaccaaguccgucuccuuccgccgccucucccaccuccgcaagcucguccccggcuucggcaaggccuacaccaucuucaacaagacccucauggaggccgacgcccacuacaaguccauccgcaccuggaacgagaucauccccuccaagggcugccucaaggucggcggccgcugccacccccacgucgacggcgucuucuucaacggcaucauccucggccccgacggcaacguccucauccccgagaugcaguccucccuccuccagcagcacgucgagcuccucgaguccuccgucaucccccucaugcacccccucgccgaccccuccaccgucuucaaggacggcgacgaggccgaggacuucgucgagguccaccuccccgacauccacaagcaggucuccggcgucgaccucggccuccccaacuggggcaaguaccuccucauguccgccggcgcccucgccacccucaugcucaccaucuuccucaugaccugcugccgccgcgccaaccgcaccgaguccauccagcgcgaccccggcgaguccggcaagaaggucuccaucaccucccaggacggcaaggucaucuccuccugggagcucuacaagcgcggcggcgagacccgccucuga

SEQ ID NO: 127359 - RNA, 1575 nt, Artificial Sequence
  derived and/or modified CDS sequence (opt2) from glycoprotein__RABV__JQ685961.1
augaucccccaggcccuccucuacgucccccuccucaucuccccccucugcuucggcggcuuccccaucuacaccauccccgacaagcucggccccuggucccccaucgacauccaccaccucuccugccccaacaaccucgucgucgaggacgagggcugcaccucccucuccggcuucuccuacauggagcucaaggucggcuacaucuccgccaucaaggucaacggcuucaccugcaccggcgucgucaccgaggccgagaccuacaccaacuucgucggcuacgucaccaccaccuucaagcgcaagcacuuccgccccaugcccgacgccugccgcgccgccuacaacuggaaggucgccggcgacccccgcuacgaggagucccuccagaaccccuaccccgacuacuccuggcuccgcaccgucaagaccaccaaggagucccucaucaucaucucccccuccgucgccgaccucgaccccuacgacaagucccuccacucccgcgucuuccccggcggcaagugccucggcaucaccaucuccuccaccuacugcuccaccaaccacgacuacaccaucuggaugcccgaggaggcccgccucggcaccuccugcgacaucuucaccaacucccgcggcaagcgcgccuccaagggcggcaagaccugcggcuucgucgacgagcgcggccucuacaagucccucaagggcgccugcaagcucaagcucugcggcguccccggccuccgccucauggacggcaccugggucaccauccagaccuccgacgagaccaaguggugccccuccgaccagcucgucaaccuccacgacuuccacuccgacgagaucgagcaccucgucgucgaggagcucgucaagaagcgcgaggagugccucgacgcccucgaguccaucaugaccaccaaguccgucuccuuccgccgccucucccaccuccgcaagcucguccccggcuucggcaaggccuacaccaucuucaacaagacccucauggaggccgacgcccacuacaaguccauccgcaccuggaacgagaucauccccuccaagggcugccucaaggucggcggccgcugccacccccacgucgacggcgucuucuucaacggcaucauccucggccccgacggcaacguccucauccccgagaugcaguccucccuccuccagcagcacgucgagcuccucgaguccuccgucaucccccucaugcacccccucgccgaccccuccaccgucuucaaggacggcgacgaggccgaggacuucgucgagguccaccuccccgacauccacaagcaggucuccggcgucgaccucggccuccccaacuggggcaaguaccuccucaucuccgccggcgcccucgccacccucaugcucaccaucuuccucaugaccugcugccgccgcgccaaccgcaccgaguccauccagcgcgaccccggcgagcccggcaagaaggucuccaucaccucccaggacggcaaggucaucuccuccugggagcucuacaaguccggcggcgagacccgccucuga

SEQ ID NO: 127360 - RNA, 1575 nt, Artificial Sequence
  derived and/or modified CDS sequence (opt2) from glycoprotein__RABV__JQ685962.1
augaucccccaggcccuccucuacgucccccuccucauccccucccucugcuucggcggcuuccccaucuacaccauccccgacaagcucggccccuggucccccaucgacauccaccaccucuccugccccaacaaccucgucgucgaggacgagggcugcaccucccucuccggcuucuccuacauggagcucaaggucggcuacaucuccgccaucaaggucaacggcuucaccugcaccggcgucgucaccgaggccgagaccuacaccaacuucgucggcuacgucaccaccaccuucaagcgcaagcacuuccgccccaugcccgacgccugccgcgccgccuacaacuggaaggucgccggcgacccccgcuacgaggagucccuccagaaccccuaccccgacuacuccuggcuccgcaccgucaagaccaccaaggagucccucaucaucaucucccccuccgucgccgaccucgaccccuacgacaagucccuccacucccgcgucuuccccggcggcaagugccucggcaucaccaucuccuccaccuacugcuccaccaaccacgacuacaccaucuggaugcccgaggaggcccgccucggcaccuccugcgacaucuucaccaacucccgcggcaagcgcgccuccaagggcggcaagaccugcggcuucgucgacgagcgcggccucuacaagucccucaagggcgccugcaagcucaagcucugcggcguccccggccuccgccucauggacggcaccugggucaccauccagaccuccgacgagaccaaguggugccccuccgaccagcucgucaaccuccacgacuuccacuccgacgagaucgagcaccucgucgucgaggagcucgucaagaagcgcgaggagugccucgacgcccucgaguccaucaugaccaccaaguccgucuccuuccgccgccucucccaccuccgcaagcucguccccggcuucggcaaggccuacaccaucuucaacaagacccucauggaggccgacgcccacuacaaguccauccgcaccuggaacgagaucauccccuccaagggcugccucaagguccgcggccgcugccacccccacgucgacggcgucuucuucaacggcaucauccucggccccgacggcaacguccucauccccgagaugcaguccucccuccuccagcagcacgucgagcuccucgaguccuccgucaucccccucaugcacccccucgccgaccccuccaccgucuucaaggacggcgacgaggccgaggacuucgucgagguccaccuccccgacauccacaagcaggucuccggcgucgaccucggccuccccaacuggggcaaguaccuccucauguccgccggcgcccucgccacccucaugcucaccaucuuccucaugaccugcugccgccgcuccaaccgcaccgaguccauccagcgcgaccccggcgaguccggcaagaaggucuccaucaccucccaggacggcaaggucaucuccuccugggagcucuacaaguccggcggcgagacccgccucuga

SEQ ID NO: 127361 - RNA, 1575 nt, Artificial Sequence
  derived and/or modified CDS sequence (opt2) from glycoprotein__RABV__JQ685963.1
augauccuccaggcccuccucuucgucccccuccucaucuccucccucugccucggcaaguuccccaucuacaccauccccgacaagcucggccccuggucccccaucgacauccaccaccucuccugccccaacaaccucgucgucgaggacgagggcugcaccucccucuccggcuucuccuacauggagcucaaggucggcuacaucuccuccaucaaggucaacggcuucaccugcaccggcgucgucaccgaggccgagaccuacaccaacuucgucggcuacgucaccaccaccuucaagcgcaagcacuuccgccccauccccgacgccugccgcgccgccuacaacuggaagauggccggcgacccccgcuacgaggagucccuccagaaccccuaccccgacuaccacuggcuccgcaccgucaagaccaccaaggagucccucaucaucaucucccccuccgucgccgaccucgaccccuacgacaagucccuccacucccgcgucuuccccggcggcaagugccucggcaucaccaucuccuccaccuacugcuccaccaaccacgacuacaccgucuggaugcccgaggagccccgccucggcaccuucugcgacaucuucaccaacuccaagggcaagaaggccuccaagggcggcaaggucugcggcuucgucgacgagcgcggccucuacaagucccucaagggcgccugcaagcucaagcucugcggcguccccggccuccgccucauggacggcaccugggucaccauccagaccuccgaggaggucaaguggugccccgccgaccagcucgucaaccuccacgacuuccacuccgacgagaucgagcaccucgucgucgaggagcucgucaagaagcgcgaggagugccucgacgcccucgaguccaucaugaccaccaaguccgucuccuuccgccgccucuccuaccuccgcaagcucguccccggcuucggcaaggccuacaccaucuucaacaagacccucauggaggccgacgcccacuacaaguccguccgcaccuggaacgagaucauccccuccaagggcugccucaaggucaaggagcgcugccacccccacgucgacggcgucuucuucaacggcaucauccucggccccgacggcaacguccucauccccgagaugcaguccucccuccuccagcagcacauggagcuccucgaguccuccgucaucccccucaugcacccccucgccgaccccuccaccgucuucaaggacggcgacgaggccgaggacuucgucgagguccaccuccccgacguccacaagcagaucuccggcgucgaccucggccuccccuccuggggcaaguaccuccucaugaucgccggcggccucgccgcccucguccucaucaucuuccucauggucugcugccgccgcaccaagcgcaccgagucccgccgccgcggcuccggcgaguccggcaagaaggucuccgucaccccccagacccgcaaggucgucuccuccugggagcucuacaaguccgagggcgacgcccgccucuga

SEQ ID NO: 127362 - RNA, 1575 nt, Artificial Sequence
  derived and/or modified CDS sequence (opt2) from glycoprotein__RABV__JQ685964.1
augaucccccaggcccuccucuacgucccccuccucaucuccucccucugcuucggcggcuuccccaucuacaccauccccgacaagcucggccccuggucccccaucgacauccaccaccucuccugccccaacaaccucgucgucgaggacgagggcugcaccucccucuccggcuucuccuacauggagcucaaggucggcuacaucuccgccaucaaggucaacggcuucaccugcaccggcgucgucaccgaggccgagaccuacaccaacuucgucggcuacgucaccaccaccuucaagcgcaagcacuuccgccccaugcccgacgccugccgcgccgccuacaacuggaagauggccggcgacccccgcuacgaggagucccuccagaaccccuaccccgacuacuccuggcuccgcaccgucaagaccaccaaggagucccucaucaucaucucccccuccgucgccgaccucgaccccuacgacaagucccuccacucccgcgucuuccccggcggcaagugccucggcaucaccaucuccuccaccuacugcuccaccaaccacgacuacaccaucuggaugcccgaggaggcccgccucggcaccuccugcgacaucuucaccaacucccgcggcaagcgcgccuccaagggcggcaagaccugcggcuucgucgacgagcgcggccucuacaagucccucaagggcgccugcaagcucaagcucugcggcguccccggccuccgccucauggacggcaccugggucaccauccagaccuccgacgagaccaaguggugccccuccgaccagcucgucaaccuccacgacuuccacuccgacgagaucgagcaccucgucgucgaggagcucgucaagaagcgcgaggagugccucgacgcccucgaguccaucaugaccaccaaguccgucuccuuccgccgccucucccaccuccgcaagcucguccccggcuucggcaaggccuacaccaucuucaacaagacccucauggaggccgacgcccacuacaaguccauccgcaccuggaacgagaucauccccuccaagggcugccucaaggucggcggccgcugccacccccacgucgacggcgucuucuucaacggcaucauccucggccccgacggcaacguccucauccccgagaugcaguccucccuccuccagcagcacgucgagcuccucgaguccuccgucaucccccucaugcacccccucgccgaccccuccaccgucuucaaggacggcgacgaggccgaggacuucgucgagguccaccuccccgacauccacaagcaggucuccggcgucgaccucggccuccccaacuggggcaaguaccuccucauguccgccggcgcccucgccacccucaugcucaucaucuuccucauggccugcugccgccgcgccaaccgcaccgaguccauccagcgcgaccccggcgaguccggcaagaaggucuccauccccucccaggacggcaaggucaucuccuccugggagcucuacaaguccggcggcgagacccgccucuga

SEQ ID NO: 127363 - RNA, 1575 nt, Artificial Sequence
  derived and/or modified CDS sequence (opt2) from glycoprotein__RABV__JQ685965.1
augaucccccaggccauccucuccgucccccuccucaucuccucccucugcuucggcaaguuccccaucuacaccauccccgagaagcucggccccuggucccccaucgacauccaccaccucuccugccccaacaaccucgucgucgaggacgagggcugcaccacccucuccggcuucuccuacaucgagcucaaggucggcuacaucuccgccaucaaggucaacggcuucaccugcaccggcgucgucaccgaggccgagaccuacaccaacuucgucggcuacgucaccaccaccuucaagcgcaagcacuuccgccccaugcccgacgccugccgcgccgccuacaacuggaagauggccggcgacccccgcuacgaggagucccuccacaaccccuaccccgacuaccacuggcuccgcaccgucaagaccaccaaggagucccucgucaucaucucccccuccgucgccgaccucgaccccuacgacaagucccuccacucccgcgucuuccccggcggcaagugccucggcaucaccaucuccuccaccuacugcuccaccaaccacgacuacaccaucuggaugcccgaggaggcccgccucggcaccuccugcgacaucuucaccaacucccgcggcaagcgcgccuccaagggcggccgcaccugcggcuucgucgacgagcgcggccucuacaagucccucaagggcgccugcaagcucaagcucugcggcguccccggccuccgccucauggacggcaccugggucuccauccaggccuccgacgagaccaaguggugcucccccgaccagcucgucaacguccacgacuuccacuccgacgagaucgagcaccucgucgucgaggagcucgucaagcgccgcgaggagugccucgacgcccucgaguccaucgucaccaccaaguccaucuccuuccgccgccucucccaccuccgcaagcucguccccggcuucggcaaggccuacaccaucuucaacaagacccucauggaggccgacgcccacuacaaguccguccgcaccuggaacgagaucauccccuccaagggcugccucuccgucggcggccgcugccacccccacgucaacggcgucuucuucaacggcaucauccucggccccgacggcaacguccucauccccgagaugcaguccucccuccuccagcagcacauggagcuccucgaguccuccgucaucccccucaugcacccccucgccgaccccuccaccgucuucaaggacggcgacgaggccgaggacuucgucgagguccaccuccccgacguccaggagcaggucuccggcgucgaccucggccuccccaacuggggcaaguacguccucauguccgccggcgcccucgccauccucauccucaccaucuuccucaucaccugcugccgccgcgccaacaagaccaaguccauccagcagggccucggcggcuccggccgcaaggucuccgucuccccccagaacggcaaggucaucuccuccugggaguccuacaaguccggcggcgagacccgccucuga

SEQ ID NO: 127364 - RNA, 1575 nt, Artificial Sequence
  derived and/or modified CDS sequence (opt2) from glycoprotein__RABV__JQ685967.1
auggucccccaggcccuccucgucgucccccuccucggcuucucccucugcuucggcaaguuccccaucuacaccauccccgacaagcucggccccuggucccccaucgacauccaccaccucuccugccccaacaaccucgucgucgaggacgagggcugcaccaaccucuccggcuucuccuacauggagcucaaggucggcuacaucuccgccaucaaggucaacggcuucaccugcaccggcgucgucaccgaggccgagaccuacaccaacuucgucggcuacgucaccaccaccuucaagcgcaagcacuuccgccccacccccgacgagugccgcgccgccuacaacuggaagauggccggcgacccccgcuacgaggagucccuccacaaccccuaccccgacuaccacuggcuccgcaccgucaagaccaccaaggagucccucgucaucaucucccccuccgucgccgaccucgaccccuacgacaagucccuccacucccgcgucuuccccuccggcaagugcuccggcaucaccgucuccuccaccuacugcuccaccaaccacgacuacaccaucuggaugcucgagaacccccgccucggcaccuccugcgacaucuucaccaacucccgcggcaagcgcgccuccaagggcuccaagaccugcggcuucgucgacgagcgcggccucuacaagucccucaagggcgccugcaagcucaagcucugcggcguccucggccucaagcucauggacggcaccugggucgccaugcagaccuccgacgagaccaaguggugcccccccgaccagcucgucaaccuccacgaccuccgcuccgacgagaucgagcaccucgucgucgaggagcucgucaagaagcgcgaggagugccucgacgcccucgaguccaucaugaccaccaaguccgucuccuuccgccgccucucccaccuccgcaagcucguccccggcuucggcaaggccuacaccaucuucaacaagacccucauggaggccgacgcccacuacaaguccguccgcaccuggaacgagaucauccccuccaagggcugccucaaggucggcggccgcugccacccccacgucaacggcgucuucuucaacggcgucauccucggccccgacggccacguccucauccccgagaugcaguccucccuccuccagcagcacauggagcuccucgaguccuccgucaucccccucaugcacccccucgccgaccccuccaccgucuucaaggacggcgacgaggccgaggacuucgucgagguccaccuccccgacguccacaagcaggucuccggcgucgaccucggccuccccaacuggggcaaguacgucucccucuccgccggcgcccucaucgcccucaugcucaucauccuccucaucaccugcugccgcaaggucaaccgccccgagcccacccagcgcucccucgagggcaaggagcgcaaggucuccgucaccucccaguccggcaaggucaucuccuccugggaguccuacaaguccggcggcgagacccgccucuga

SEQ ID NO: 127365 - RNA, 1575 nt, Artificial Sequence
  derived and/or modified CDS sequence (opt2) from glycoprotein__RABV__JQ685968.1
augguccuccaggcccuccucuucgcccccuuccucaucuccucccucugccucggcaaguuccccaucuacaccauccccgacaagcucggccccuggucccccaucgacauccaccaccucuccugccccaacaaccucgucgucgaggacgagggcugcaacucccucuccggcaucuccuacauggagcucaaggucggcuacaucuccgccaucaaggucaacggcuucaccugcaccggcgucgucaccgaggccgagaccuacaccaacuucgucggcuacgucaccaccaccuucaagcgcaagcacuuccaccccaugcccgacgccugccgcuccgccuacaacuggaagcucgccggcgacccccgcuacgaggagucccuccacaaccccuaccccgacuaccacuggcuccgcaccgucaagaccaccaaggagucccucaucaucaucucccccuccgucgccgaccucgaccccuacgacaagucccuccacucccgcaucuucccccgcggcaagugcuccggcaugaccaucuccuccaccuacugcuccaccaaccacgaguacaccaucuggaugcccgagaaggccggccucggcaccuccugcgacaucuucaccaccuccaagggcaagcgcgccuccaagggcggcaagaccugcggcuucgucgacgagcgcggccucuacaagucccucaagggcgccugcaagcucaagcucugcggcgucuccggccuccgccucauggacggcaccugggucgccauccagaccuccgaggagaccaaguggugcccccccgaccagcucgucaaccuccacgaccuccacuccgacgagaucgagcaccucgucgucgaggagcucgucaagaagcgcgaggagugccucaacgcccucaaguccaucaugaccaccaaguccgucuccuuccgccgccucucccaccuccgcaagcucguccccggcuucggcaaggccuacaccaucuucaacaagacccucauggaggccgacgcccacuacaaguccauccgcaccuggaacgagaucauccccuccaagggcugccuccgcgucggcggcaagugccacccccacgucgacggcgucuucuucaacggcaucauccucggccccgacggccacguccucauccccgagaugcaguccucccuccuccagcagcacauggagcuccucgaguccuccgucaucccccucaugcacccccucgccgaccucuccaccgucuucaaggacggcgacgaggccgaggacuucgucgagguccaccuccccgacguccacaagcagaucuccggcgucgaccucggccuccccuccuggggcaaguacguccucauguccgccggcgcccucgccauccucaugcucgucaucucccucaugaagugcuucuggggcgucaaccgcaccaagcccauccagcagggcccccgcgaguccgagcgcaaggucuccaucgccccccagucccgcaaggucaucuccuccugggaguccuacaagaacggcggcgagaccgagcucuga

SEQ ID NO: 127366 - RNA, 1575 nt, Artificial Sequence
  derived and/or modified CDS sequence (opt2) from glycoprotein__RABV__JQ685970.1
auggucucccaggcccuccucuucgucuccccccucauccucucccucugcuccggcgaguuccccaucuacaccauccccgacaagcucggccccuggucccccaucgacauccaccaccucuccugccccaacaaccucgucgucgaggacgagggcugcaccaaccucuccggcuucuccuacauggagcucaaggucggcuacaucuccgccaucaaggucaacggcuucaccugcaccggcgucgucaccgaggccgagaccuacaccaacuucgucggcuacgucaccaccaccuucaagcgcaagcacuuccgccccacccccgacgccugccgcgccgccuacaacuggaagauggccggcgacccccgcuacgaggagucccuccacaaccccuaccccgacuaccacuggcuccgcaccgucaagaccaccaaggagucccucgucaucaucucccccuccgucgccgaccucgaccccuacgacaagucccuccacucccgcgucuuccccuccggcaagugcuccggcaucaccgucuccuccaccuacugccucaccaaccacgacuacaccaucuggaugcccgagaaccuccgccucggcaccuccugcgacaucuucaccaacucccgcggcaagcgcgccucccgcggcuccaagaccugcggcuucgucgacgagcgcggccucuacaagucccucaagggcgccugcaagcucaagcucugcggcguccucggccuccgccucauggacggcaccugggucgccaugcagaccuccgacgagaccaaguggugccccuccgaccagcucgucaaccuccacgacuuccgcuccgacgagaucgagcaccucgucgucgaggagcucgucaagaagcgcgaggagugccucgacgccaucgaguccaucaugaccaccaaguccgucuccuuccgccgccucucccaccuccgcaagcucguccccggcuucggcaaggccuacaccaucuucaacaagacccucauggaggccgacgcccacuacaaguccguccgcaccuggaacgagaucauccccuccaagggcugccuccgcgucggcggccgcugccacccccacgucaacggcgucuucuucaacggcaucauccucggccccgacggccacguccucauccccgagaugcaguccucccuccuccagcagcacgucgagcuccucgaguccuccgucaucccccucaugcacccccucgccgaccccuccaccgucuucaaggacggcgaggaggccgaggacuucgucgagguccaccuccccgacguccacaagcaggucuccggcgucgaccucggccuccccaacuggggcaaguacgcccucgucuccgccggcgcccucaccgcccucaugcucaucgccuuccucaugaccugcugccgcggcgucaaccuccccaaguccacccagcgcucccccggcggcacccgccgcaaggucuccgucgccucccaguccggcaaggucaucgccuccugggaggccuacaaguccggcugcgagaccaagauguga

SEQ ID NO: 127367 - RNA, 1575 nt, Artificial Sequence
  derived and/or modified CDS sequence (opt2) from glycoprotein__RABV__JQ685971.1
augaucccccaggcccuccucuucgucccccuccucaucuccucccucugcuucggcaaguuccccaucuacaccauccccgagaagcucggccccuggucccccaucgacauccaccaccucuccugccccaacaaccucgucgccgaggacgagggcugcaacucccucuccggcuucuccuacauggagcucaaggucggcuacaucuccgccaucaaggucaacggcuucaccugcaccggcgucgucaccgaggccgagaccuacaccaacuucgucggcuacgucaccaccaccuucaagcgcaagcacuuccgccccacccccgacgccugccgcgccgccuacaacuggaagauggccggcgacccccgcuacgaggagucccuccacaaccccuaccccgacuaccacuggcuccgcaccgucaagaccaccaaggagucccucgucaucaucucccccuccgucgccgaccucgaccccuacgacaagucccuccacucccgcgucuuccccgacggcaagugccucggcaucaccaucuccuccaccuacugcuccaccaaccacgacuacaccaucuggaugcccgaggaggcccgccucggcaccuccugcgacaucuucaccaccuccaagggcaagcgcgccuccaagggcgacaagaucugcggcuucgucgacgagcgcggccucuacaagucccucaagggcgccugcaagcucaagcucugcggcguccucggccuccgccucauggacggcaccugggucuccauccagacccccggcgagaccaaguggugcucccccgaccagcucgucaaccuccacgacuuccacuccgacgagaucgagcaccucgucgccgaggagcucgucaagaagcgcgaggagugccucgacgcccucgaguccaucaugaccaccaaguccgucuccuuccgccgccucucccaccuccgcaagcucguccccggcuucggcaaggccuacaccaucuucaacaagacccucauggaggccgacgcccacuacaaguccguccgcaccuggaacgaggucauccccuccaagggcugccucuccgucggcggccgcugccacccccacgucaacggcgucuucuucaacggcaucauccucggccccgacggcuccguccucauccccgagaugcaguccucccuccuccagcagcacauggagcuccucgaguccuccgucaucccccucaugcacccccucgccgaccccuccaccgucuucaaggacggcgacgaggccgagaacuucgucgagguccaccuccccgacguccacaagcaggucuccggcgucgaccucggccuccccaacuggggcaaguaccuccucaugaucgccggcgcccucgccacccucaugcucaccaucuuccucaugaccugcugccgccgcaccaagcgcgccgaguccauccaguacggccucggcgaguccggccgcaaggucuccgucaccccccaguccggcaaggucaucuccuccugggaguccuacaaguccggcggcgagacccgccucuga

SEQ ID NO: 127368 - RNA, 1575 nt, Artificial Sequence; identical to SEQ ID NO: 127304
  derived and/or modified CDS sequence (opt2) from glycoprotein__RABV__JQ685974.1

SEQ ID NO: 127369 - RNA, 1575 nt, Artificial Sequence
  derived and/or modified CDS sequence (opt2) from glycoprotein__RABV__JQ685975.1
auggucccccaggcccuccucuucgucccccuccucgucuucucccucugcuucggcaaguuccccaucuacaccauccccgacaagcucggccccuggucccccaucgacauccaccaccucuccugccccaacaaccucgucgucgaggacgagggcugcaccaaccucuccggcuucuccuacauggagcucaaggucggcuacaucuccgccaucaaggucaacggcuucaccugcaccggcgucgucaccgaggccgagaccuacaccaacuucgucggcuacgucaccaccaccuucaagcgcaagcacuuccgccccauccccgacgccugccgcgccgccuacaacuggaagauggccggcgacccccgcuacgaggagucccuccacaaccccuaccccgacuaccacuggcuccgcaccgucaagaccaccaaggagucccucgucaucaucucccccuccgucgccgaccucgaccccuacgacaagucccuccacucccgcgucuuccccggcggcaagugcuccggcaugaccgucuucuccaccuacugcuccaccaaccacgacuacaccaucuggaugcccgagaacccccgccucggcaccuccugcgacaucuucgccaacucccgcggcaagcgcgccucccgcggcuccaagaccugcggcuucgucgacgagcgcggccucuacaagucccucaagggcgccugcaagcucaagcucugcggcguccucggccuccgccucgucgacggcaccugggucgccaugcagaccuccgacgacaccaaguggugcccccccgaccagcucgucaaccuccacgacuuccgcuccgacgagaucgaguaccucgucgucgaggagcucgucaagaagcgcgaggagugccucgacgcccucgaguccaucaugaccaccaaguccgucuccuuccgccgccucucccaccuccgcaagcucguccccggcuucggcaaggccuacaccaucuucaacaagacccucauggaggccgacgcccacuacaaguccguccgcaccuggaacgagaucauccccuccaagggcugccuccgcgucggcggccgcugccacccccacgucaacggcgucuucuucaacggcaucauccucggccccgacggccacguccucauccccgagaugcaguccucccuccuccagcagcacauggagcuccucgaguccuccgucaucccccucaugcacccccucgccgaccccuccaccgucuucaaggagggcgacgaggccgaggacuucgucgagguccaccuccccgacguccacaagcaggucuccgaggucgaccucggccuccccaacuggggcaaguacauccucaugaucgccggcgcccucaucgcccucaugcucaucaucuuccucaugaccugcugcggccgcgucaaccgcuccgaguccaagcagcgcucccucggcggcaccggccgcaaggucuccgucaccucccaguccggcaaggucaucuccuccugggaguccuacaaguccggcggcgagacccgccucuga

SEQ ID NO: 127370 - RNA, 1575 nt, Artificial Sequence
  derived and/or modified CDS sequence (opt2) from glycoprotein__RABV__JQ685978.1
augaucucccaggcccuccucuucgucccccuccucaucuccucccucugcuucggcgaguuccccaucuacaccauccccgagaagcucggccccuggucccccaucgacauccaccaccucuccugccccaacaaccucgucgucgaggacgagggcugcaacucccucuccggcuucuccuacauggagcucaaggucggcuacaucuccuccaucaaggucaacggcuucaccugcaccggcgucgucaccgaggccgagaccuacaccaacuucgucggcuacgucaccaccaccuucaagcgcaagcacuuccgccccaugcccgacgccugccgcgccgccuacaacuggaagauguccggcgacccccgcuacgaggagucccuccacaaccccuaccccgacuaccacuggcuccgcaccgucaagaccaccaaggagucccucgucaucaucucccccuccgucgccgaccucgaccccuacgacaagucccuccacucccgcgucuucuccggcggcaagugccucggcaucaccaucuccuccaccuacugcuccaccaaccacgacuacaccaucuggaugcccgaggaggcccgccucggcaccuccugcgacaucuucaccaacuccaagggcaagaaggccuccaagggcggccgcaccugcggcuucgucgacgagcgcggccucuacaagucccucaagggcgccugcaagcucaagcucugcggcguccccggccuccgccucauggacggcaccugggucuccauccagaccuccgacgagaccaaguggugcccccccgaccagcucgucaacauccacgacuuccgcuccgacgagaucgagcaccucgucgucgaggagcucgucaagaagcgcgaggagugccucgacgcccucgaguccaucaugaccaccaaguccgucuccuuccgccgccucucccaccuccgcaagcucguccccggcuucggcaaggccuacaccaucuucaacaagacccucauggaggccgacgcccacuacaaguccguccgcaccuggaacgagaucauccccuccaagggcugccucuccgucggcggccgcugccacccccacgucgacggcgucuucuucaacggcaucauccucggccccgacggcuccguccucauccccgagaugcaguccucccuccuccagcagcacauggagcuccucgaguccuccgucaucccccucaugcacccccucgccaaccccuccaccgucuucaaggacggcgacgaggccgaggacuucgucgagguccaccuccccgacguccaggagcaggucuccggcgucgaccucggccuccccaacuggggcaaguacguccucauguccgccggcgcccucgccauccuccuccucaccaucuuccucaugaccugcugccgccgcgccaaccgcaccaaguccauccgccagggccccggcgaguccggccgcaaggucuccguccccccccagaacggccgcgucaucuccuccugggaguccuucaaguccggcgacgagaccggccucuga

SEQ ID NO: 127371 - RNA, 1575 nt, Artificial Sequence; identical to SEQ ID NO: 127370
  derived and/or modified CDS sequence (opt2) from glycoprotein__RABV__JQ685979.1

SEQ ID NO: 127372 - RNA, 1575 nt, Artificial Sequence
  derived and/or modified CDS sequence (opt2) from glycoprotein__RABV__JQ685980.1
auggucccccaggcccuccucuucgucccccuccucgccuuccccaugugcuucggcaaguuccccaucuacaccauccccgacaagcucggccccuggucccccaucgacauccaccaccucuccugccccaacaaccucgucgucgaggacgagggcugcaccaaccucuccggcuucuccuacauggagcucaaggucggcuacaucuccgccaucaaggucaacggcuucaccugcaccggcgucgucaccgaggccgagaccuacaccaacuucgucggcuacgucaccaccaccuuccgccgcaagcacuuccgccccacccccgacgccugccgcgccgccuacaacuggaagauggccggcgacccccgcuacgaggagucccuccacaaccccuaccccgacuaccacuggcuccgcaccgucaagaccaccaaggagucccucaucaucaucucccccuccgucgccgaccucgaccccuacgacaagucccuccacucccgcgucuuccccuccggcaagugccucggcaucaccaucuccuccaccuacugcuccaccaaccacgacuacaccaucuggaugcccgagaaccuccgccucggcaccuccugcgacaucuucaccaacucccgcggcaagcgcgccuccaagggcucccgcaccugcggcuucgucgacgagcgcggccucuacaagucccucaagggcgccugcaagcucaagcucugcggcguccucggccuccgccucauggacggcaccugggucgccaugcagaccuccgacgagaccaaguggugcccccccgaccagcucgucaaccuccacgacuuccgcuccgacgagaucgagcaccucgucgucgaggagcucgucaagaagcgcgaggagugccucgacgcccucgaguccaucaugaccaccaaguccgucuccuuccgccgccucucccaccuccgcaagcucguccccggcuucggcaaggccuacaccaucuucaacaagacccucauggaggccgacgcccacuacaaguccguccgcaccuggaacgagaucauccccuccaagggcugccuccgcgucggcggccgcugccacccccacgucaacggcgucuucuucaacggcaucauccucggccccgacggccacguccucauccccgagaugcaguccucccuccuccagcagcacauggagcuccucgaguccuccgucaucccccucaugcacccccucgccgaccccuccaccgucuucaaggacggcgacgaggccgaggacuucgucgagguccaccuccccgacguccacaagcagaucuccggcgucgaccucggccuccccaacuggggcaaguacguccucaucaucgccggcguccucaucgccaugauccucaccaucuuccucaugaccugcugcggccgcggcaaccgccccaaguccacccagcacucccucggcggcaucggccgcaaggucuccgccaccucccaguccggcaaggucaucuccuccugggaguccuacaagaacggcggcgagacccgccucuga

SEQ ID NO: 127373 - RNA, 1575 nt, Artificial Sequence
  derived and/or modified CDS sequence (opt2) from glycoprotein__RABV__JQ685981.1
auggucccccagguccuccucuucgucccccuccucgucuucuccaugugcuucggcaaguuccccaucuacaccauccccgacaagcucggccccuggucccccaucgacauccaccaccucuccugccccaacaaccucgucgucgaggacgagggcugcaccaaccucuccggcuucuccuacauggagcucaaggucggcuacaucuccgccaucaaggucaacggcuucaccugcaccggcgucgucaccgaggccgagaccuacaccaacuucgucggcuacgucaccaccaccuucaagcgcaagcacuuccgccccacccccgacgccugccgcgccgccuacaacuggaagauggccggcgacccccgcuacgaggagucccuccacaaccccuaccccgacuaccacuggcuccgcaccgucaagaccaccaaggagucccucgucaucaucucccccuccgucgccgaccucgaccccuacgacaagucccuccacucccgcgucuuccccuccggcaagugcuccggcaucaccaucuccuccaccuacugcuccaccaaccacgacuacaccaucuggaugcccgagaacccccgccucggcaccuccugcgacaucuucaccaacucccgcggcaagcgcgccuccaagggcggcaagaccugcggcuucgucgacgagcgcggccucuacaagucccucaagggcgccugcaagcucaagcucugcggcguccucggccuccgccucauggacggcaccugggucgccaugcagaccuccgacgagaccaaguggugcccccccgaccagcucgucaaccuccacgacuuccgcuccgacgagaucgagcaccucgucgucgaggagcucgucaagaagcgcgaggagugccucgacgcccucgaguccaucaugaccaccaaguccgucuccuuccgccgccucucccaccuccgcaagcucguccccggcuucggcaaggccuacaccaucuucaacaagacccucauggaggccgacgcccacuacaaguccguccgcaccuggaacgagaucauccccuccaagggcugccuccgcgucggcggccgcugccacccccacgucaagggcgucuucuucaacggcaucauccucggccccgacggccacguccucauccccgagaugcaguccucccuccuccagcagcacauggagcuccucgaguccuccgucaucccccucaugcacccccucgccgaccccuccaccgucuucaaggacggcgacgaggccgaggacuucgucgagguccaccuccccgacguccacaagcagaucuccggcgucgaccucggccuccccuccuggggccgcuacguccucgucuccgccggcguccucgucguccucaugcucaccaucuucaucaucaccugcugcggccgcguccaccgccccaaguccacccagcacggccucggcggcaccggccgcaaggucuccgucaccucccaguccggcaaggucaucuccuccugggaguccuacaaguccggcggcgagacccgccucuga

SEQ ID NO: 127374 - RNA, 1575 nt, Artificial Sequence
  derived and/or modified CDS sequence (opt2) from glycoprotein__RABV__JQ685982.1
auggucccccaggcccuccucuucgucccccuccucgccuuccccaugugcuucggcaaguuccccaucuacaccauccccgacaagcucggccccuggucccccaucgacauccaccaccucuccugccccaacaaccucgucgucgaggacgagggcugcaccaaccucuccggcuucuccuacauggagcucaaggucggcuacaucuccgccaucaaggucaacggcuucaccugcaccggcgucgucaccgaggccgagaccuacaccaacuucgucggcuacgucaccaccaccuucaagcgcaagcacuuccgccccacccccgacgccugccgcgccgccuacaacuggaagauggccggcgacccccgcuacgaggagucccuccacaaccccuaccccgacuaccacuggcuccgcaccgucaagaccaccaaggagucccucaucaucaucucccccuccgucgccgaccucgaccccuacgacaagucccuccacucccgcgucuuccccuccggcaagugccucggcaucaccaucuccuccaccuacugcuccaccaaccacgacuacaccaucuggaugcccgagaaccuccgccucggcaccuccugcgacaucuucaccaacucccgcggcaagcgcgccuccaagggcuccaagaccugcggcuucgucgacgagcgcggccucuacaagucccucaagggcgccugcaagcucaagcucugcggcguccucggccuccgccucauggacggcaccugggucgccaugcagaccuccgacgagaccaaguggugcccccccgaccagcucgucaaccuccacgacuuccgcuccgacgagaucgagcaccucgucgucgaggagcucgucaagaagcgcgaggagugccucgacgcccucgaguccaucaugaccaccaaguccgucuccuuccgccgccucucccaccuccgcaagcucguccccggcuucggcaaggccuacaccaucuucaacaagacccucauggaggccgacgcccacuacaaguccguccgcaccuggaacgagaucauccccuccaagggcugccuccgcgucggcggccgcugccacccccacgucaacggcgucuucuucaacggcaucauccucggccccgacggccacguccucauccccgagaugcaguccucccuccuccagcagcacauggagcuccucgaguccuccgucaucccccucaugcacccccucgccgaccccuccaccgucuucaaggacggcgacgaggccgaggacuucgucgagguccaccuccccgacguccacaagcagaucuccggcgucgaccucggccuccccaacuggggcaaguacguccucaucaucgccggcguccucaucgccaugauccucaccaucuuccucaugaccugcugcggccgcggcaaccgccccaaguccacccagcacucccucggcggcaucggccgcaaggucuccgccaccucccaguccggcaaggucaucuccuccugggaguccuacaaguccggcggcgagacccgccucuga

SEQ ID NO: 127375 - RNA, 1575 nt, Artificial Sequence
  derived and/or modified CDS sequence (opt2) from glycoprotein__RABV__JQ685983.1
auggucccccaggcccuccucuucgucccccuccucgucuuccccaugugcuucggcaaguuccccaucuacaccauccccgacaagcucggccccuggucccccaucgacauccaccaccucuccugccccaacaaccucgucgucgaggacgagggcugcaccaaccucuccggcuucuccuacauggagcucaaggucggcuacaucuccgccaucaaggucaacggcuucaccugcaccggcgucgucaccgaggccgagaccuacaccaacuucgucggcuacgucaccaccaccuucaagcgcaagcacuuccgccccacccccgacgccugccgcgccgccuacaacuggaagauggccggcgacccccgcuacgaggagucccuccacaaccccuaccccgacuaccacuggcuccgcaccgucaagaccaccaaggagucccucgucaucaucucccccuccgucgccgaccucgaccccuacgacaagucccuccacucccgcgucuuccccgacggcaagugcuccggcaucaccaucuccuccaccuacugccccaccaaccacgacuacaccaucuggcuccccgagaacccccgccucggcaccuccugcgacaucuucaccaacucccgcggcaagcgcgccuccaagggcuccaagaccugcggcuucgucgacgagcgcggccucuacaagucccucaagggcgccugcaagcucaagcucugcggcguccucggccuccgccucauggacggcaccugggucgccaugcagaccuccgacgagaccaaguggugcccccccgaccagcucgucaaccuccacgacuuccgcuccgacgagaucgagcaccucgucgucgaggagcucgucaagaagcgcgaggagugccucgacgcccucgaguccaucaugaccaccaaguccgucuccuuccgccgccucucccaccuccgcaagcucguccccggcuucggcaaggccuacaccaucuucaacaagacccucauggaggccgacgcccacuacaaguccguccgcaccuggaacgagaucauccccuccaagggcugccuccgcgucggcggccgcugccacccccacgucaacggcgucuucuucaacggcaucauccucggccccgacggccacguccucauccccgagaugcaguccucccuccuccagcagcacauggagcuccucgaguccuccgucaucccccucaugcacccccucgccgaccccuccaccgucuucaaggacggcgacgaggccgaggacuucgucgagguccaccuccccgacguccacaagcagaucuccggcgucgaccucggccuccccaacuggggcaaguacguccucgucuccgccggcguccucaucgcccucaugcucaucaucuuccucaugaccugcugcggccgcauccaccgccccaaguccacccagugcgaccucggcggcaccggccgcaaggucuccgucaccucccaguccggcaaggucaucuccuccugggaguccuacaaguccggcggcgagacccgccucuga

SEQ ID NO: 127376 - RNA, 1575 nt, Artificial Sequence
  derived and/or modified CDS sequence (opt2) from glycoprotein__RABV__JQ685984.1
auggucccccagguccuccucuucgucccccuccucgucuucucccucugcuucggcaaguuccccaucuacaccauccccgacaagcucggccccuggucccccaucgacauccaccaccucuccugccccaacaaccucgucgucgaggacgagggcugcaccaaccucuccggcuucuccuacauggagcucaaggucggcuacaucuccgccaucaaggucaacggcuucaccugcaccggcgucgucaccgaggccgagaccuacaccaacuucgucggcuacgucaccaccaccuucaagcgcaagcacuuccgccccacccccgacgccugccgcgccgccuacaacuggaagauggccggcgacccccgcuacgaggagucccuccacaaccccuaccccgacuaccacuggcuccgcaccgucaagaccaccaaggagucccucgucaucaucucccccuccgucaccgaccucgaccccuacgacaagucccuccacucccgcgucuuccccggcggcaagugcuccggcaucaccgucuccuccaccuacugcuccaccaaccacgacuacaccaucuggaugcccgagaacccccgccucggcaccuccugcgacaucuucaccaacucccgcggcaagcgcgccuccaagggcuccaagaccugcggcuucgucgacgagcgcggccucuacaagucccucaagggcgccugcaagcucaagcucugcggcguccucggccuccgccucauggacggcaccugggucgccaugcagaccuccgacgagaccaaguggugcccccccgaccagcucgucaaccuccacgacuuccgcuccgacgagaucgagcaccucgucgucgaggagcucgucaagaagcgcgaggagugccucgacgcccucgaguccaucaugaccaccaaguccgucuccuuccgccgccucucccaccuccgcaagcucguccccggcuucggcaaggccuacaccaucuucaacaagacccucauggaggccgacgcccacuacaaguccguccgcaccuggaacgagaucauccccuccaagggcugccuccgcgucggcggccgcugccacccccacgucaacggcgucuucuucaacggcaucauccucggccccgacggccacguccucauccccgagaugcaguccucccuccuccagcagcacauggagcuccucgaguccuccgucaucccccucaugcacccccucgccgaccccuccaccgucuucaaggacggcgacgaggccgaggacuucgucgagguccaccuccccgacguccacaagcaggucuccggcgucgaccucggccuccccaacuggggcaaguacguccucaugaucgccggcgcccucaucgcccucaugcucaucaucuuccucaugaccugcugccgccgcgucaaccgccccgaguccacccagcgcucccucggcggcaccggccgcaaggucuccaucaccucccaguccggcaaggucaucuccuccugggaguccuacaaguccggcggcgagacccgccucuga

SEQ ID NO: 127377 - RNA, 1575 nt, Artificial Sequence
  derived and/or modified CDS sequence (opt2) from glycoprotein__RABV__JQ685985.1
auggucccccaggcccuccucuucguccccauccucgucuucucccucugcuucggcaaguuccccaucuacaccauccccgacaagcucggccccuggucccccaucgacauccaccaccucuccugccccaacaaccucgucgucgaggacgagggcugcaccaaccucuccggcuucuccuacauggagcucaaggucggcuacaucuccgccaucaaggucaacggcuucaccugcaccggcgucgucaccgaggccgagaccuacaccaacuucgucggcuacgucaccaccaccuuccgccgcaagcacuuccgccccacccccgacgccugccgcgccgccuacaacuggaagauggccggcgacccccgcuacgaggagucccuccacaaccccuaccccgacuaccacuggcuccgcaccguccgcaccaccaaggagucccucgucaucaucucccccuccgucgccgaccucgaccccuacgacaagucccuccacucccgcgucuuccccuccggcaagugcuccggcaucaccgucuccuccaccuacugcuccaccaaccacgacuacaccaucuggaugcccgagaacccccgccucggcaccuccugcgacaucuucaucaacucccgcggcaagcgcgccuccaagggcuccaagaccugcggcuucgucgacgagcgcggccucuacaagucccucaagggcgccugcaagcucaagcucugcggcguccucggccuccgccucauggacggcaccugggucgccaugcagaccuccgaggagaccaaguggugcccccccgaccagcucgucaaccuccacgacuuccgcuccgacgagaucgagcaccucgucgucgaggagcucgucaagaagcgcgaggagugccucgacgcccucgaguccaucaugaccaccaaguccgucuccuuccgccgccucucccaccuccgcaagcucguccccggcuucggcaaggccuacaccaucuucaacaagacccucauggaggccgacgcccacuacaaguccguccgcaccuggaacgagaucauccccuccaagggcugccuccgcgucggcggccgcugccacccccacgucaacggcgucuucuucaacggcaucauccucggccccgacggccacguccucauccccgagaugcaguccucccuccuccagcagcacauggagcuccucgaguccuccgucaucccccucaugcacccccucgccgaccccuccaccgucuucaaggagggcgacgaggccgaggacuucgucgagguccaccuccccgacguccacaagcaggucuccggcgucgaccucggccuccccaacuggggcaaguacguccucauguccgccggcguccucaucucccgcaugcuccucaucuuccucaugaccugcugccgccgcgucaaccgccccgaguccacccagcgcucccccggcggcgccggccgcaaggucuccgucaccucccaguccggcaaggucaucuccuccugggaguccuacaaguccggcggcgagacccgccucuga

SEQ ID NO: 127378 - RNA, 1575 nt, Artificial Sequence
  derived and/or modified CDS sequence (opt2) from glycoprotein__RABV__JQ685986.1
augguccuccagguccuccucuucgcccccuuccucaucuccucccucugccucggcaaguuccccaucuacaccauccccgacaagcucggccccuggucccccaucgacauccaccaccucuccugccccaacaaccucgucgucgaggacgagggcugcaacucccucuccggcuucuccuacauggagcucaaggucggcuacaucuccgccaucaaggucaacggcuucaccugcaccggcgucgucaccgaggccgagaccuacaccaacuucgucggcuacgucaccaccaccuucaagcgcaagcacuuccgccccguccccgacgccugccgcuccgccuacaacuggaagcucgccggcgacccccgcuacgaggagucccuccacaaccccuaccccgaguaccacuggcuccgcaccgucaagaccaccaaggagucccucaucgucaucucccccuccgucgccgaccucgaccccuacgacaagucccuccacucccgcaucuuccccuccggcaagugcuccggcaugaccgucuccuccaccuacugcuccaccaaccacgaguacaccaucuggaugcccgagaaggccucccucggcaccuccugcgacaucuucaccaccuccaagggcaagcgcgccuccaagggcggccgcaccugcggcuucgucgacgagcgcggccucuacaagucccucaagggcgccugcaagcucaagcucugcggcgucuccggccuccgccucauggacggcaccugggucgccauccagaccuccgacgaggccaaguggugcucccccgaccagcucgucaaccuccacgaccuccacuccgacgagaucgagcaccucgucgucgaggagcucguccgcaagcgcgaggagugccucgacgcccucgaguccaucaugaccaccaaguccgucuccuuccgccgccucucccaccuccgcaagcucguccccggcuucggcaaggccuacaccaucuucaacaagacccucauggaggccgacgcccacuacaaguccguccgcaccuggaacgagaucauccccuccaagggcugccuccgcgucggcggcaagugccacccccacgucaacggcgucuucuucaacggcaucauccucggccccgacggccacguccucauccccgagaugcaguccucccuccuccagcagcacaucgagcuccucgaguccuccgucaucccccucaugcacccccucgccgaccucuccaccgucuucaaggacggcgacgaggccgaggacuucgucgagguccaccuccccgacguccacaagcagaucuccggcgucgaccucggccuccccuccuggggcaaguacguccucauguccgccggcgcccucgccacccucguccucgucaucucccucaugaagugcugccgcugggucaacaagaccaaguccauccagcagggcccccgcgaguccgagcgcaaggucuccgucaccccccagaacggcaaggucaucuccuccugggaguccuacaagaucggcggcgagaccggccucuga

SEQ ID NO: 127379 - RNA, 1575 nt, Artificial Sequence
  derived and/or modified CDS sequence (opt2) from glycoprotein__RABV__JQ685987.1
auggccccccaggcccucugggucgucccccuccucggcuucucccucugcuucggcaaguuccccaucuacaccauccccgacaagcucggccccuggucccccaucgacauccaccaccucuccugccccaacaaccucgucgucgaggacgagggcugcaccaaccucuccggcuucuccuacauggagcucaaggucggcuacaucuccgccaucaaggucaacggcuucaccugcaccggcgucgucaccgaggccgagaccuacaccaacuucgucggcuacgucaccaccaccuucaagcgcaagcacuuccgccccacccccgacgccugccgcaccgccuacaacuggaagauggccggcgacccccgcuacgaggagucccuccacaaccccuaccccgacuaccacuggcuccgcaccgucaagaccaccaaggagucccucgucaucaucucccccuccgucgccgaccucgaccccuacgacaagucccuccacucccgcgucuuccccuccggcaagugcuccggcaucaccgucuccuccaccuacugccucaccaaccacgacuacaccaucuggaugcccgagaacccccgccucggcaccuccugcgacaucuucaccaacucccgcggcaagcgcgccuccaagggcuccaagaccugcggcuucgucgacgagcgcggccucuacaagucccucaagggcgccugcaagcucaagcucugcggcguccucggccucaagcucauggacggcaccugggucgccaugcagaccuccgacgagaccaaguggugccccuccgaccagcucgucaaccuccacgacuuccgcuccgacgagaucgagcaccucgucgucgaggagcucgucaagaagcgcgaggagugccucgacgcccucgaguccaucaugaccaccaaguccgucuccuuccgccgccucucccaccuccgcaagcucguccccggcuucggcaaggccuacaccaucuucaacaagacccucauggaggccgacgcccacuacaaguccguccgcaccuggaacgagaucauccccuccaagggcugccuccgcgucggcggccgcugccacccccacgucaacggcgucuucuucaacggcaucauccucggccccgacggccacauccucauccccgagaugcaguccucccuccuccagcagcacauggagcuccucgaguccuccgucaucccccucaugcacccccucgccgaccccuccaccgucuucaaggacggcgacgaggccgaggacuucgucgagguccaccuccccgacguccacaagcaggucuccggcgucgaccucggccuccccaacuggggccgcuacgucucccucggcgccggcgcccucaucgcccucaugcucaucaucuuccucaugaccugcugccgccgcgucaaccgccccgagcccacccagcgcucccucgagggcaagggccgcaaggucuccgucaccucccaguccggcaaggucaucuccuccugggaguccuacaaguccggcggcgagacccgccucuga

SEQ ID NO: 127380 - RNA, 1575 nt, Artificial Sequence
  derived and/or modified CDS sequence (opt2) from glycoprotein__RABV__JQ685988.1
auggucccccaggcccuccuccucgucccccuccucgccuuccccaugugcuucggcaaguuccccaucuacaccauccccgacaagcucggccccuggucccccaucgacauccaccaccucuccugccccaacaaccucgucgucgaggacgagggcugcaccaaccucuccggcuucuccuacauggagcucaaggucggcuacaucuccgccaucaaggucaacggcuucaccugcaccggcgucgucaccgaggccgagaccuacaccaacuucgucggcuacgucaccaccaccuucaagcgcaagcacuuccgccccacccccgacgccugccgcgccgccuacaacuggaagauggccggcgacccccgcuacgaggagucccuccacaaccccuaccccgacuaccacuggcuccgcaccgucaagaccaccaaggagucccucaucaucaucucccccuccgucgccgaccucgaccccuacgacaagucccuccacucccgcgucuuccccuccggcaagugccucggcaucaccaucuccuccaccuacugcuccaccaaccacgacuacaccaucuggaugcccgagaaccuccgccucggcaccuccugcgacaucuucaccaacucccgcggcaagcgcgccuccaagggcuccaagaccugcggcuucgucgacgagcgcggccucuacaagucccucaagggcgccugcaagcucaagcucugcggcguccucggccuccgccucauggacggcaccugggucgccaugcagaccuccaacgagaccaaguggugcccccccgaccagcucgucaaccuccacgacuuccgcuccgacgagaucgagcaccucgucgucgaggagcucgucaagaagcgcgaggagugccucgacgcccucgaguccaucaugaccaccaaguccgucuccuuccgccgccucucccaccuccgcaagcucguccccggcuucggcaaggccuacaccaucuucaacaagacccucauggaggccgacgcccacuacaaguccguccgcaccuggaacgagaucauccccuccaagggcugccuccgcgucggcggccgcugccacccccacgucaacggcgucuucuucaacggcaucauccucggccccgacggccacguccucauccccgagaugcaguccucccuccuccagcagcacauggagcuccucgaguccuccgucaucccccucaugcacccccucgccgaccccuccaccgucuucaaggacggcgacgaggccgaggacuucgucgagguccaccuccccgacguccacaagcagaucuccggcgucgaccucggccuccccaacuggggcaaguacguccucaucaucgccggcguccucaucgccaugauccucaccaucuuccucaugaccugcugcggccgcggcaaccgccccaaguccacccagcacucccucggcggcaucggccgcaaggucuccgccaccucccaguccggcaaggucaucuccuccugggaguccuacaaguccggcuccgagacccgccucuga

SEQ ID NO: 127381 - RNA, 1575 nt, Artificial Sequence
  derived and/or modified CDS sequence (opt2) from glycoprotein__RABV__JQ685989.1
auggucccccaggcccuccucuucguccccauccucgucuucucccucugcuucggcaaguuccccaucuacaccauccccgacaagcucggccccuggucccccaucgacauccaccaccucuccugccccaacaaccucgucgucgaggacgagggcugcaccaaccucuccggcuucuccuacauggagcucaaggucggcuacaucuccgccaucaaggucaacggcuucaccugcaccggcgucgucaccgaggccgagaccuacaccaacuucgucggcuacgucaccaccaccuuccgccgcaagcacuuccgccccacccccgacgccugccgcgccgccuacaacuggaagauggccggcgacccccgcuacgaggagucccuccacaaccccuaccccgacuaccacuggcuccgcaccguccgcaccaccaaggagucccucgucaucaucucccccuccgucgccgaccucgaccccuacgacaagucccuccacucccgcgucuuccccuccggcaagugcuccggcaucaccgucuccuccaccuacugcuccaccaaccacgacuacaccaucuggaugcccgagaacccccgccucggcaccuccugcgacaucuucaucaacucccgcggcaagcgcgccuccaagggcuccaagaccugcggcuucgucgacgagcgcggccucuacaagucccucaagggcgccugcaagcucaagcucugcggcguccucggccuccgccucauggacggcaccugggucgccaugcagaccuccgaggagaccaaguggugcccccccgaccagcucgucaaccuccacgacuuccgcuccgacgagaucgagcaccucgucgucgaggagcucgucaagaagcgcgaggagugccucgacgcccucgaguccaucaugaccaccaaguccgucuccuuccgccgccucucccaccuccgcaagcucguccccggcuucggcaaggccuacaccaucuucaacaagacccucauggaggccgacgcccacuacaaguccguccgcaccuggaacgagaucauccccuccaagggcugccuccgcgucggcggccgcugccacccccacgucaacggcgucuucuucaacggcaucauccucggccccgacggccacguccucauccccgagaugcaguccucccuccuccagcagcacauggagcuccucgaguccuccgucaucccccucaugcacccccucgccgaccccuccaccgucuucaaggagggcgacgaggccgaggacuucgucgagguccaccuccccgacguccacaagcaggucuccggcgucgaccucggccuccccaacuggggcaaguacguccucauguccgccggcguccucaucucccucaugcuccucaucuuccucaugaccugcugccgccgcgucaaccgccccgaguccacccagcgcucccccggcggcgccggccgcaaggucuccgucaccucccaguccggcaaggucaucuccuccugggaguccuacaaguccggcggcgagacccgccucuga

SEQ ID NO: 127382 - RNA, 1575 nt, Artificial Sequence; identical to SEQ ID NO: 127380
  derived and/or modified CDS sequence (opt2) from glycoprotein__RABV__JQ685990.1

SEQ ID NO: 127383 - RNA, 1575 nt, Artificial Sequence
  derived and/or modified CDS sequence (opt2) from glycoprotein__RABV__JQ685991.1
augguccuccaggcccuccucuucgcccccuuccucaucuccuccuucugccucggcaaguuccccaucuacaccauccccgacaagcucggccccuggucccccaucgacauccaccaccucuccugccccaacaaccucgucaucgaggacgagggcugcaacucccucuccggcuucuccuacauggagcucaaggucggcuacaucuccgccaucaaggucaacggcuucaccugcaccggcgucgucaccgaggccgagaccuacaccaacuucgucggcuacgucaccaccaccuucaagcgcaagcacuuccgccccaugcccgacgccugccgcuccgccuacaacuggaagcucgccggcgacccccgcuacgaggagucccuccacaaccccuaccccgaguaccacuggcuccgcaccgucaagaccaccaaggagucccucaucgucaucucccccuccgucgccgaccucgaccccuacgacaagucccuccacucccgcaucuuccccuccggcaagugcuccggcaugaccgucuccuccaccuacugcuccaccaaccacgaguacaccaucuggaugcccgagaaggucggccucggcaccuccugcgacaucuucaucaccuccaagggcaagcgcgccuccaagggcggccgcaccugcggcuucgucgacgagcgcggccucuacaagucccucaagggcgccugcaagcucaagcucugcggcgucuccggccuccgccucauggacggcaccugggucgccauccagaccuccgacgagaccaaguggugcucccccgaccagcucgucaaccuccacgaccuccacuccgacgagaucgagcaccucgucgucgaggagcucguccgcaagcgcgaggagugccucgacgcccucgaguccaucaugaccaccaaguccgucuccuuccgccgccucucccaccuccgcaagcucguccccggcuucggcaaggccuacaccaucuucaacaagacccucauggaggccgacgcccacuacaaguccguccgcaccuggaacgagaucauccccuccaagggcugccuccgcgucggcggcaagugccacccccacgucaacggcgucuucuucaacggcaucauccucggccccgacggccacguccucauccccgagaugcaguccucccuccuccagcagcacaucgagcuccucgaguccuccgucaucccccucaugcacccccucgccgaccucuccaccgucuucaaggacggcgacgaggccgaggacuucgucgagguccaccuccccgacguccacaagcagaucuccggcgucgaccucggccuccccuccuggggcaaguacguccucaucuccgccggcgcccucgccacccucauccucgucaucucccucaugaagugcugccgcugggucaaccgcaccaaguccauccagcagggcccccgcgaguccgagcgcaaggucuccgucgccccccaguccggcaaggucaucuccuccugggaguccuacaagaucggcggcgagaccggccucuga

SEQ ID NO: 127384 - RNA, 1575 nt, Artificial Sequence
  derived and/or modified CDS sequence (opt2) from glycoprotein__RABV__JQ685992.1
auggucccccaggcccuccucuucgucccccuccucgucuucucccucugcuucggcaaguuccccaucuacaccauccccgacaagcucggccccuggucccccaucgacauccaccaccucuccugccccaacaaccucgucgucgaggacgagggcugcaccaaccucuccggcuucuccuacauggagcucaaggucggcuacaucuccgccaucaaggucaacggcuucaccugcaccggcgucgucaccgaggccgagaccuacaccaacuucgucggcuacgucaccaccaccuuccgccgcaagcacuuccgccccacccccgacgccugccgcgccgccuacaacuggaagauggccggcgacccccgcuacgaggagucccuccacaaccccuaccccgacuaccacuggcuccgcaccgucaagaccaccaaggagucccucgucaucaucucccccuccgucgccgaccucgaccccuacgacaagucccuccacucccgcgucuuccccggcggcaagugcuccggcaucaccgucuccuccaccuacugcuccaccaaccacgacuacaccaucuggaugcccgagaacccccgccucggcaccuccugcgacaucuucgucaacucccgcggcaagcgcgccuccaagggcggcaagaccugcggcuucgucgacgagcgcggccucuacaagucccucaagggcgccugcaagcucaagcucugcggcguccccggccuccgccucauggacggcaccugggucgccauccagaccuccgacgagaccaaguggugcccccccgaccagcucgucaaccuccacgacuuccgcuccgacgagaucgagcaccucgucgucgaggagcucgucaagaagcgcgaggagugccucgacgcccucgaguccaucaugaccaccaaguccgucuccuuccgccgccucucccaccuccgcaagcucguccccggcuucggcaaggccuacaccaucuucaacaagacccucauggaggccgacgcccacuacaaguccguccgcaccuggaacgagaucauccccuccaagggcugccuccgcgucggcggccgcugccacccccacgucaacggcgucuucuucaacggcaucauccucggccccgacggccacguccucauccccgagaugcaguccucccuccuccagcagcacauggagcuccucgaguccuccgucaucccccucaugcacccccucgccgaccccuccaccgucuucaaggacggcgacgaggccgaggacuucgucgagguccaccuccccgacguccacaagcucaucuccggcgucgaccucggccuccccuccuggggcaaguacguccucauguccgccggcauccucaccacccucaugcucaugaucuuccucaugaccugcugccgccgcgucaaccaggucggcuccaagcagcacggccucgagggcgccggccgcaaggucuccgucaccucccagaacggccgcgucaucuccuccugggaguccuacaaguccggcggcgagacccgccucuga

SEQ ID NO: 127385 - RNA, 1575 nt, Artificial Sequence
  derived and/or modified CDS sequence (opt2) from glycoprotein__RABV__JQ685993.1
augguccuccaggcccuccucuucgcccccuuccucaucuccucccucugccucggcaaguuccccaucuacaccauccccgacaagcucggccccuggucccccaucgacauccaccaccucuccugccccaacaaccucgucgucgaggacgagggcugcaacucccucuccggcuucuccuacauggagcucaaggucggcuacaucuccgccaucaaggucaacggcuucaccugcaccggcgucgucaccgaggccgagaccuacaccaacuucgucggcuacgucaccaccaccuucaagcgcaagcacuuccgccccaugcccgacgccugccgcuccgccuacaacuggaagcucgccggcgacccccgcuacgaggagucccuccacaaccccuaccccgacuaccacuggcuccgcaccgucaagaccaccaaggagucccucaucgucaucucccccuccgucgccgaccucgaccccuacgacaagucccuccacucccgcaucuuccccggcggcaagugcuccggcaugaccgucuccuccaccuacugcuccaccaaccacgaguacaccaucuggaugcccgagaaggccggccucggcaccuccugcgacaucuucaccaccuccaagggcaagcgcgccaccaagggcggcaagaccugcggcuucgucgacgagcgcggccucuacaagucccucaagggcgccugcaagcucaagcucugcggcgucuccggccuccgccucauggacggcaccugggucgccauccagaccuccgacgagaccaaguggugcucccccgaccagcucgucaaccuccacgaccuccacuccgacgagaucgagcaccucgucgucgaggagcucguccgcaagcgcgaggagugccucgacgcccucgaguccaucaugaccaccaaguccgucuccuuccgccgccucucccaccuccgcaagcucguccccggcuucggcaaggccuacaccaucuucaacaagacccucauggaggccgacgcccacuacaaguccguccgcaccuggaacgagaucauccccuccaagggcugccuccgcgucggcggcaagugccacccccacgucaacggcgucuucuucaacggcaucauccucggccccgacggccacguccucauccccgagaugcaguccucccuccuccagcagcacauggagcuccucgaguccuccgucaucccccucaugcacccccucgccgaccccuccaccgucuucaaggacgacgacgaggccgaggacuucgucgagguccaccuccccgacguccacaagcaggucuccggcgucgaccucggccuccccuccuggggccgcuacguccucauguccgccggcgcccucgccacccucauggucgucaucucccucaugaagugcugcaagggcgucaaccgcaccaaguccaucaagcagggcucccgcgaguccgagcgcaaggucuccaucaccccccaguccggcaaggucaucuccuccugggaguccuacaaguccggcggcgagaccggccucuga

SEQ ID NO: 127386 - RNA, 1575 nt, Artificial Sequence
  derived and/or modified CDS sequence (opt2) from glycoprotein__RABV__JQ685994.1
augguccccugggcccuccucuucguccccuuccucaucuccucccucugcuucggcaaguuccccaucuacaccauccccgacaagcucggccccuggucccccaucgacauccaccaccucuccugccccaacaaccucgucgucgaggacgagggcugcaacucccucuccggcuucuccuacauggagcucaaggucggcuacaucuccgccaucaaggucaacggcuucaccugcaccggcgucgucaccgaggccgagaccuacaccaacuucgucggcuacgucaccaccaccuucaagcgcaagcacuuccgccccaugcccgacgccugccgcuccgccuacaacuggaagauggccggcgacccccgcuacgaggagucccuccacaaccccuaccccgacuaccacuggcuccgcaccgucaagaccaccaaggagucccucaucaucaucucccccuccgucgccgaccucgaccccuacgaccgcucccuccacucccgcaucuuccccggcggcaagugcaccggccucaccgucuccuccaccuacugcuccaccaaccacgacuacaccaucuggaugcccgagaaggccggccucggcaccuccugcgacaucuucaccaacuccaagggcaagcgcgccuccaagggcggcaagaccugcggcuucgucgacgagcgcggccucuacaagucccucaagggcgccugcaagcucaagcucugcggcgucuccggccuccgccucauggacggcaccugggucgccauccagacccucgacgagaccaaguggugcucccccgaccagcucgucaaccuccacgacuuccacuccgacgagcucgagcaccucgucgucgaggagcucguccgcaagcgcgaggagugccucgacgcccucgaguccaucaugaccaccaaguccgucuccuuccgccgccucucccaccuccgcaagcucguccccggcuucggcaaggccuacaccaucuucaacaagacccucauggaggccgacgcccacuacaaguccguccgcaccugguccgagaucauccccuccaagggcugccuccgcgucggcggccgcugccacccccacgucaacggcgucuucuucaacggcaucauccucggccccgacggccacguccucauccccgagaugcaguccucccuccuccagcagcacgucgagcuccucgaguccuccgucaucccccucaugcacccccucgccgaccccuccgccgucuucaaggacggcgacgaggccgaggacuucgucgagguccaccuccccgacguccacaagcagaucuccggcgucgaccucggccuccccuccuggggcaaguacaugcucaugaucgccggcgcccucaccacccucaugcucuucaucuuccucaugaccugcugcaagcgcgucaacaagaaggaguccauccgccaguccccccgcgagcucgaguccaaggucuccgucaccccccagaaccgcaaggucaucuccuccugggaguccuacaaguccggcggcgagaccaagcucuga

SEQ ID NO: 127387 - RNA, 1575 nt, Artificial Sequence
  derived and/or modified CDS sequence (opt2) from glycoprotein__RABV__JQ685995.1
auggucccccagguccuccucuucgucccccuccucgucuucucccucugcuucggcaaguucccccucuacaccauccccgacaagcucggccccuggucccccaucgacauccaccaccucuccugccccaacaaccucgucgucgaggacgagggcugcaccaaccucuccggcuucuccuacauggagcucaaggucggcuacaucuccgccaucaaggucuccggcuucaccugcaccggcgucgucaccgaggccgagaccuacaccaacuucgucggcuacgucaccaccaccuucaagcgccgccacuuccgccccacccccgacgccugccgcgccgccuacaacuggaagauggccggcgacccccgcuacgaggagucccuccacaaccccuaccccgacuaccacuggcuccgcaccgucaagaccaccaaggagucccucgucaucaucucccccuccgucaccgaccucgaccccuacgacaagucccuccacucccgcgucuuccccggcggcaagugcuccggcaucaccgucuccuccaccuacugcuccaccaaccacgacuacaccaucuggaugcccgaguccccccgccucggcaccuccugcgacaucuucaccaacucccgcggcaagcgcgccuccaagggcuccaagaccugcggcuucgucgacgagcgcggccucuacaagucccucaagggcgccugcaagcucaagcucugcggcguccucggccuccgccucauggacggcaccugggucgccaugcagaccuccgacgagaccaaguggugccuccccgaccagcucgucaaccuccacgacuuccgcuccgacgagaucgagcaccucgucgucgaggagcucguccgcaagcgcgaggagugccucgacgcccucgaguccaucaugaccaccaaguccgucuccuuccgccgccucucccaccuccgcaagcucguccccggcuucggcaaggccuacaccaucuucaacaagacccucauggaggccgacgcccacuacaaguccauccgcaccuggaacgagaucguccccuccaagggcugccuccgcgucggcggccgcugccacccccacgucaacggcgucuucuucaacggcaucauccucggccccgacggccagguccucauccccgagaugcaguccucccuccuccagcagcacauggagcuccucgaguccuccgucaucccccucaugcacccccucgccgaccccuccaccgucuucaaggagggcgacgaggccgaggacuucgucgagguccaccuccccgacguccacaagcaggucuccggcgucgaccucggccuccccaacuggggcaaguacguccucaugaucgccggcgcccucaucgcccucaugcucaucaucuuccucaugaccugcugccgccgcgucaaccgcuccgaguccacccagcaccgccuccgcggcaccggccgcaaggucuccgucaccucccagaccggcaaggucaucuccuccugggaguccuacaaguccggcggcgagacccgccucuga

SEQ ID NO: 127388 - RNA, 1575 nt, Artificial Sequence
  derived and/or modified CDS sequence (opt2) from glycoprotein__RABV__JQ685996.1
augaucccccaggcccuccucuccgucccccuccucaucuccucccucugcuucggcaaguuccccaucuacaccauccccgagaagcucggccccuggucccccaucgacauccaccaccucuccugccccaacaaccucgucgucgaggacgagggcugcaacucccucuccggcuucuccuacauggagcucaaggucggcuacaucuccgccaucaaggucaacggcuucaccugcaccggcgucgucaccgaggccgagaccuacaccaacuucgucggcuacgucaccaccaccuucaagcgcaagcacuuccgccccaugcccgacgccugccgcgccgccuacaacuggaagaccgccggcgacccccgcuacgaggagucccuccacaaccccuaccccgacuaccacuggcuccgcaccgucaagaccaccaaggagucccucaucaucaucucccccuccgucgccgaccucgaccccuacgacaagucccuccacucccgcaucuuccccggcggcaagugccucggcaucaccaucuccuccaccuacugcuccaccaaccacgacuacaccaucuggaugcccgaggaggcccgccucggcaccuccugcgacaucuucaccaacuccaagggcaagcgcgccuccaagggcggccgcaccugcggcuucgucgacgagcgcggccucuacaagucccucaagggcgccugcaagcucaagcucugcggcguccucggccuccgccucauggacggcaccugggucgccauccagacccccaacgagaccaaguggugcucccccgaccagcucgucaacguccacgacuuccgcuccgacgagaucgagcaccucgucgucgaggagcucauccgcaagcgcgaggagugccucgacgcccucgaguccaucaugaccaccaaguccgucuccuuccgccgccucuccaaccuccgcaagcucguccccggcuucggcaaggccuacaccaucuucaacaagacccucauggaggccgacgcccacuacaaguccguccgcaccuggaacgagaucauccccucccgcggcugccucaaggucggcggccgcugccacccccacgucaacggcgucuucuucaacggcaucauccucggccccgacggccacauccucauccccgagaugcaguccucccuccuccagcagcacauggagcuccucgaguccuccgucaucccccucauccacccccucgccgaccccuccaccgucuucaaggacggcgacgaggccgaggacuucgucgagguccaccuccccgacguccaccagcaggucuccggcgucgaccucggccuccccgacuggggcaaguacguccucauguccgccggcgcccucgccaccgucaugcucaccaucuuccucaucaccugcugccgccgcgucaagcgcaccgaguccauccagcagggccucggcgaguccggccgcaaggucuccgucaccccccagaacggcaaggucauguccuccugggaguacuacaaguccggcggcggcacccgccucuga

SEQ ID NO: 127389 - RNA, 1575 nt, Artificial Sequence
  derived and/or modified CDS sequence (opt2) from glycoprotein__RABV__JQ685997.1
augaucucccagacccuccucuucgucccccuccucaucuccuccgucugcuucggcgaguuccccaucuacaccauccccgagaagcucggccccuggucccccaucgacauccaccaccucuccugccccaacaaccucgucgucgaggacgagggcugcaacucccucuccggcuucuccuacauggagcucaaggucggcuacaucuccuccaucaaggucaacggcuucaccugcaccggcgucgucaccgaggccgagaccuacaccaacuucgucggcuacgucaccaccaccuucaagcgcaagcacuuccgccccaugcccgacgccugccgcgccgccuacaacuggaagauguccggcgacccccgcuacgaggagucccuccacaaccccuaccccgacuaccacuggcuccgcaccgucaagaccaccaaggagucccucgucaucaucucccccuccgucggcgaccucgaccccuacgacaagucccuccacucccgcgucuucuccggcggcaagugccucggcaucaccaucuccuccaccuacugcuccaccaaccacgacuacacccucuggaugcccgaggaggcccgccucggcaccuccugcgacaucuucaccaacuccaagggcaagcgcgccuccaagggcggccgcaccugcggcuucgucgacgagcgcggccucuacaagucccucaagggcgccugcaagcucaagcucugcggcguccccggccuccgccucauggacggcaccugggucuccauccagaccuccgacgagaccaaguggugcccccccgaccagcucgucaacauccacgacuuccgcuccgacgagaucgagcaccucgucgucgaggagcucgucaagaagcgcgaggagugccucgacgcccucgaguccaucaugaccaccaaguccgucuccuuccgccgccucucccaccuccgcaagcucguccccggcuucggcaaggccuacaccaucuucaacaagacccucauggaggccgacgcccacuacaaguccguccgcaccuggaacgaggucauccccuccaagggcugccucuccgucggcggccgcugccacccccacgucgacggcgucuucuucaacggcaucauccucggccccgacggcuccguccucauccccgagaugcaguccucccuccuccagcagcacauggagcuccucgaguccuccgucaucccccucaugcacccccucgccaaccccuccaccgucuucaaggacggcgacgaggccgaggacuucgucgagguccaccuccccgacguccaggagcaggucuccggcgucgaccucggccuccccaacuggggcaaguacguccucauguccgccggcgcccucgccauccuccuccucaccaucuuccucaugaccugcugccgccgcgccaaccgcaccaaguccauccgccagggccccgaggaguccggccgcaaggucuccguccccccccaguccggcaaggucaucuccuccugggaguccuucaaguccggcggcgagacccgccucuga

SEQ ID NO: 127390 - RNA, 1575 nt, Artificial Sequence
  derived and/or modified CDS sequence (opt2) from glycoprotein__RABV__JQ685998.1
augaucccccaggcccuccucuuccucccccuccucaucuccucccucugcuccggcaaguuccccaucuacaccauccccgagaagcucggccccuggucccccaucgacauccaccaccucuccugccccaacaaccucgucgucgaggacgagggcugcaacucccucuccggcuucuccuacauggagcucaaggucggcuacaucuccgccaucaaggucaacggcuucaccugcaccggcgucgucaccgaggccgagaccuacaccaacuucgucggcuacgucaccaccaccuucaagcgcaagcacuuccgccccaugcccgacgccugccgcgccgccuacaacuggaagauggccggcgacccccgcuacgaggagucccuccacaaccccuaccccgacuaccacuggcuccgcaccgucaagaccaccaaggagucccucgucaucaucucccccuccgucgccgaccucgaccccuacgacaagucccuccacucccgcgucuuccccggcggcaagugccucggcaucaccaucuccuccaccuacugcuccaccaaccacgacuacaccaucuggaugcccgaggaggcccgccucggcaccuccugcgacaucuucaccaacuccaagggcaagcgcgccuccaagggcggccgcaccugcggcuucgucgacgagcgcggccucuacaagucccucaagggcgccugcaagcucaagcucugcggcguccccggccuccgccucauggacggcaccugggucuccauccagaccuccgaggagaccaaguggugcuccuccgaccagcucgucaacauccacgacuuccgcuccgacgagaucgagcaccucgucgucgaggagcucgucaagaagcgcgaggagugccucgacgcccucgaguccaucaugaccaccaaguccgucuccuuccgccgccucucccaccuccgcaagcucguccccggcuucggcaaggccuacaccaucuucaacaacacccucauggaggccgacgcccacuacaaguccgucaagaccuggaacgagaucauccccuccaagggcugccucuccgucggcggccgcugccaccccaacgucaacggcgucuucuucaacggcaucauccucggccccgacggcuccguccucauccccgagaugcaguccucccuccuccagcagcacauggagcuccucgaguccuccgucaucccccucaugcacccccucgccaaccccuccaccgucuucaaggacggcgacgaggccgaggaguucgucgagguccaccuccccgacgucaaggagcaggucuccggcgucgaccucggccuccccaacuggggccgcuacguccucauguccgccggcgcccucgccauccucguccucaccaucuuccucaugaccugcugccgccgcgccaaccgcaccaaguccauccagcagggccucggcgaguccguccgcaaggucuccgucccccuccagaacggcaaggucaucuccuccugggaguccuacaaguccggcggcgagacccgccucuga

SEQ ID NO: 127391 - RNA, 1575 nt, Artificial Sequence
  derived and/or modified CDS sequence (opt2) from glycoprotein__RABV__JQ685999.1
augaucccccaggcccuccucuucgucccccuccucauccccucccucugccucggcgaguuccccaucuacaccauccccgacaagcucggccccuggacccccaucgacauccaccaccucuccugccccaacaaccucgucgccgagaacgacggcugcaccucccucuccggcuucuccuacauggagcucaaggucggcuacaucuccgccaucaaggucaacggcuucaccugcaccggcgucgucaccgaggccgagaccuacaccaacuucgucggcuacgucaccaccaccuucaagcgcaagcacuuccgccccaugcccgacgccugccgcgccgcccacgacuggaagauggccggcgacccccgcuacgaggacucccuccagaaccccuaccccgacuaccacuggcuccgcaccgucaagaccaccaaggagucccucgucaucaucucccccuccgucgccgaccucgaccccuacgacaagucccuccacucccgcgucuuccccuccggcaagugccucggcaucaccgucuccuccaccuacugcuccaccaaccacgacuacaccaucuggaugcccgucgagccccgccucggcaccuccugcgacaucuucaccaacucccgcggcaagcgcgccuccaagggcggccgcgucugcggcuucgucgacgagcgcggccucuacaagucccucaagggcgccugcaagcucaagcucugcggcguccccggcauccgccucauggacggcaccugggucuccauccagaccuccgaggacaucaaguggugcccccccgaccgccucgucaaccuccacgacuuccacuccgacgagcucgagcaccucgucgucgaggagcucaucaagcgccgcgagaacugccucgacgcccucgaguccaucaugaccaccaaguccgucuccuuccgccgccucucccaccuccgcaagcucguccccggcuucggcaaggccuacaccaucuucaacaagacccucauggaggccgacgcccacuacaaguccgucaagaccuggaacgaggucauccccuccaagggcugccucgaggucggcggccgcugccacccccccgucaacggcgucuucuucaacggcaucauccucggccccgacggcaacguccucauccccgagaugcaguccucccuccuccagcagcacauggagcuccucgaguccuccgucaucccccucaugcacccccucgccgaccccuccaccgucuucaaggagggcgacgaggccgaggacuucgucgagguccaccuccccgacguccacaagcaggucuccgacgucgaccucggccuccccuccuggggcaaguaccuccucauguccgccggcgcccucgccauccucauccucgccaucguccucaucaucugcugccgccgcgucaacaagaccggcuccacccagcgcggccaccgcgagucccgcggcaagauguccgucgccccccagaacggcaagaucaucuccuccugggagcucuacaagcgcgaguccgagaccggccucuga

SEQ ID NO: 127392 - RNA, 1575 nt, Artificial Sequence
  derived and/or modified CDS sequence (opt2) from glycoprotein__RABV__JQ686000.1
augaucccccaggcccuccucuucgucccccuccucauccccucccucugccucggcaaguuccccaucuacaccauccccgacaagcucggccccuggucccccaucgacauccaccaccucuccugccccaacaaccucgucgucgaggacgagggcugcaccucccucuccggcuucuccuacauggagcucaaggucggcuacaucuccgccaucaaggucaacggcuucaccugcaccggcgucgucaccgaggccgagaccuacaccaacuucgucggcuacgucaccaccaccuucaagcgcaagcacuuccgccccaugcccgacgccugccgcgccgcccacgacuggaagaucgccggcgacccccgcuacgaggacucccuccagaaccccuaccccgacuaccacuggcuccgcaccgucaagaccaccaaggagucccucgucaucaucucccccuccgucgccgagcucgaccccuacgacaagucccuccacucccgcgucuuccccuccggcaagugccucggcaucaccgucuccuccaccuacugcuccaccaaccacgacuacaccaucuggaugcccgucgaggcccgccucggcaccuccugcgacaucuucaccaacucccgcggcaagaaggccuccaagggcggccgcaccugcggcuucgucgacgagcgcggccucuacaagucccucaagggcgccugcaagcucaagcucugcggcguccccggccuccgccucauggacggcaccugggucuccauccagaccuccgacgacaucaaguggugcccccccgaccagcucgucaaccuccacgacuuccacuccgacgagaucgagcaccucgucgucgaggagcucaucaagaagcgcgagggcugccucgacgcccucgaguccaucaugaccaccaaguccgucuccuuccgccgccucucccaccuccgcaagcucguccccggcuucggcaaggccuacaccaucuucaacaacacccucauggaggccgacgcccacuacaaguccguccgcaccuggaacgaggucauccccuccaagggcugccucaaggucggcggccgcugccacccccccgucaacggcgucuucuucaacggcaucauccucggccccgacggcaacguccucauccccgagaugcaguccucccuccuccagcagcacauggagcuccucgaguccuccgucaucccccucaugcacccccucgccgaccccuccaccgucuucaaggacggcgacgaggccgaggacuucgucgagguccaccuccccgacguccacaagcaggucuccgacgucgaccucggccuccccuccuggggcaaguaccuccucauguccgccggcgcccucgccacccucucccucgccaucuuccucaucaccugcugccgccgcgccaaccgcaccgaguccacccagcgcggccaccgcgaguccggcggcaaggucuccgucgccccccagaacggcaagaucaucuccuccugggagcucuacaaguccgaguccgagaccggcauguga

SEQ ID NO: 127393 - RNA, 1575 nt, Artificial Sequence
  derived and/or modified CDS sequence (opt2) from glycoprotein__RABV__JQ686001.1
augaucccccaggcccuccucuucgucccccuccucauccccucccucugccucggcaaguuccccaucuacaccauccccgacaagcucggccccuggucccccaucgacauccaccaccucuccugccccaacaaccucgucgccgaggacgagggcugcaccucccucuccggcuucuccuacauggagcucaaggucggcuacaucuccgccaucaaggucaacggcuucaccugcaccggcgucgucaccgaggccgagaccuacaccaacuucgucggcuacgucaccaccaccuucaagcgcaagcacuuccgccccaugcccgacgccugccgcgccgcccacgacuggaagauggccggcgacccccgcuacgaggacucccuccagaaccccuaccccgacuaccacuggcuccgcaccgucaagaccaccaaggagucccucgucaucaucucccccuccgucgccgaccucgaccccuacgacaagucccuccacucccgcgucuuccccuccggcaagugccucggcaucaccgucuccuccaccuacugcuccaccaaccacgacuacaccaucuggaugcccgucgaggcccgccucggcaccuccugcgacaucuucaccaacuccaagggcaagaaggccuccaagggcggccgcaccugcggcuucgucgacgagcgcggccucuacaagucccucaagggcgccugcaagcucaagcucugcggcguccccggccuccgccucauggacggcaccugggucuccauccagaccuccgacgacaucaaguggugcccccccgaccagcucgucaaccuccacgacuuccacuccgacgagaucgagcaccucgucgucgaggagcucaucaagaagcgcgagggcugccucgacgcccucgaguccaucaugaccaccaaguccgucuccuuccgccgccucucccaccuccgcaagcucguccccggcuucggcaaggccuacaccaucuucaacaacacccucauggaggccgacgcccacuacaaguccguccgcaccuggaacgaggucauccccuccaagggcugccucaaggucggcggccgcugccacccccccgucaacggcgucuucuucaacggcaucauccucggccccgacggcaacguccucauccccgagaugcaguccucccuccuccagcagcacauggagcuccucgaguccuccgucaucccccucaugcacccccucgccgaccccuccaccgucuucaaggacggcgacgaggccgaggacuucgucgagguccaccuccccgacguccacaagcaggucuccgagaucgaccucggccuccccuccuggggcaaguaccuccucauguccgccggcguccucgccacccucauccucgccaucuuccucaucaccugcugccgccgcgccaaccgcaccgaguccacccagcgcggccgccgcgaguccggcggcaaggucuccgucgccccccagaacggcaagaucaucuccuccugggagcucuacaaguccgaguccgagaccggccucuga

SEQ ID NO: 127394 - RNA, 1575 nt, Artificial Sequence
  derived and/or modified CDS sequence (opt2) from glycoprotein__RABV__JQ686002.1
augaucccccaggcccuccucuuccuccccuuccucuuccccucccucugccucggcaaguuccccaucuacaccauccccgagaagcucggccccuggucccccaucgacauccaccaccucuccugccccaacaaccucgucgucgaggacgagggcugcgacucccucuccggcuucuccuacauggagcucaaggucggcuacaucuccgccaucaaggucaacggcuucaccugcaccggcgucgucaccgaggccgagaccuacaccaacuucgucggcuacgucaccaccaccuucaagcgcaagcacuuccgccccaugcccgacgccugccgcgccgccuacaacuggaagaccgccggcgacccccgcuacgaggagucccuccacaaccccuaccccgacuaccacuggcuccgcaccgucaagaccaccaaggagucccucaucaucaucucccccuccgucgccgaccucgaccccuacgacaagucccuccacucccgcgucuuccccggcggcaagugccucggcaucaccgucuccuccaccuacugcuccaccaaccacgacuacaccaucuggaugcccgaggaggcccgccucggcaccuccugcgacaucuucaccaacuccaagggcaagcgcgccuccaagggcggccgcaccugcggcuucgucgacgagcgcggccucuacaagucccucaagggcgccugcaagcucaagcucugcggcguccccggccuccgccucauggacggcaccugggucgccauccagacccccggcgagaccaaguggugcucccccgaccagcucgucaaccuccacgacuuccgcuccgacgagaucgagcaccucgucgucgaggagcucaucaagaagcgcgaggagugccucgacgcccucgaguccaucaugaccaccaaguccgucuccuuccgccgccucuccaaccuccgcaagcucguccccggcuucggcaaggccuacaccaucuucaacaagacccucauggaggccgacgcccacuacaaguccguccgcaccugggacgagaucauccccuccaagggcugccuccgcgucggcggccgcugccacccccacgucaacggcgucuucuucaacggcaucauccucggccccgacggccacguccucauccccgagaugcaguccucccuccuccagcagcacauggagcuccucgaguccuccgucaucccccucauccacccccucgccgaccccuccaccgucuucaaggacggcgacgaggccgaggacuucgucgagguccaccuccccgacguccacaagcaggucuccggcgucgaccucggccuccccaacuggggcaaguacguccucaugggcgccggcguccucgccaccgucauccucaccauccuccuccucaccugcugccgccgcgucaaccgcaccaagcccaagcagcagucccucgaggaguccggccgcaaggucuccgucaccccccagaacggcaaggucauguccuccugggaguacuacaaguccgagggccgcaccucccucuga

SEQ ID NO: 127395 - RNA, 1575 nt, Artificial Sequence; identical to SEQ ID NO: 127330
  derived and/or modified CDS sequence (opt2) from glycoprotein__RABV__JQ686003.1

SEQ ID NO: 127396 - RNA, 1575 nt, Artificial Sequence
  derived and/or modified CDS sequence (opt2) from glycoprotein__RABV__JQ686004.1
augaucccccaggcccuccucuucgucccccuccucauccccucccucugccucggcaaguuccccaucuacaccauccccgacaagcucggccccuggucccccaucgacauccaccaccucuccugccccaacaaccucgucgccgaggacgagggcugcaccucccucuccggcuucuccuacauggagcucaaggucggcuacaucuccgccaucaaggucaacggcuucaccugcaccggcgucgucaccgaggccgagaccuacaccaacuucgucggcuacgucaccaccaccuucaagcgcaagcacuuccgccccaugcccgacgccugccgcgccgcccacgacuggaagauggccggcgacccccgcuacgaggacucccuccagaaccccuaccccgacuaccacuggcuccgcaccgucaagaccaccaaggagucccucgucaucaucucccccuccgucgccgaccucgaccccuacgacaagucccuccacucccgcgucuuccccuccggcaagugccucggcaucaccgucuccuccaccuacugcuccaccaaccacgacuacaccaucuggaugcccgucgaggcccgccucggcaccuccugcgacaucuucaccaacuccaagggcaagaaggccuccaagggcggccgcaccugcggcuucgucgacgagcgcggccucuacaagucccucaagggcgccugcaagcucaagcucugcggcguccccggccuccgccucauggacggcaccugggccuccauccagaccuccgacgacaucaaguggugcccccccgaccagcucgucaaccuccacgacuuccacuccgacgagaucgagcaccucgucgucgaggagcucaucaagaagcgcgagggcugccucgacgcccucgaguccaucaugaccaccaaguccgucuccuuccgccgccucucccaccuccgcaagcucguccccggcuucggcaaggccuacaccaucuucaacaacacccucauggaggccgacgcccacuacaaguccguccgcaccuggaacgaggucauccccuccaagggcugccucaaggucggcggccgcugccacccccccgucaacggcgucuucuucaacggcaucauccucggccccgacggcaacguccucauccccgagaugcaguccucccuccuccagcagcacauggagcuccucgaguccuccgucaucccccucaugcacccccucgccgaccccuccaccgucuucaaggacggcgacgaggccgaggacuucgucgagguccaccuccccgacguccacaagcaggucuccgagaucgaccucggccuccccuccuggggcaaguaccuccucauguccgccggcguccucgccacccucauccucgccaucuuccucaucaccugcugccgccgcgccaaccgcaccgaguccacccagcgcggccgccgcgaguccggcggcaaggucuccgucgccccccagaacggcaagaucaucuccuccugggagcucuacaaguccgagcgcgagaccggccucuga

SEQ ID NO: 127397 - RNA, 1575 nt, Artificial Sequence
  derived and/or modified CDS sequence (opt2) from glycoprotein__RABV__JQ686005.1
augaucccccaggcccuccucucccuccuccuccucaucuccucccucugccucggcaaguuccccaucuacaccauccccgacaagcucggccccuggucccccaucgacauccaccaccucuccugccccaacaaccucgucgucgaggacgagggcugcaccucccucuccggcuucuccuacauggagcucaaggucggcuacaucuccgccaucaaggucaacggcuucaccugcaccggcgucgucaccgaggccgagaccuacaccaacuucgucggcuacgucaccaccaccuucaagcgcaagcacuuccgccccaugcccgacgccugccgcgccgcccacgaguggaagauggccggcgacccccgcuacgaggacucccuccagaaccccuaccccgacuaccacuggcuccgcaccgucaagaccaccaaggagucccucaucaucaucucccccuccgucgccgaccucgaccccuacgacaagucccuccacucccgcgucuuccccggcggcaacugccucggcaucaccaucuccuccaccuacugcuccaccaaccacgacuacaccaucuggaugcccgaggaggcccgccucggcaccuccugcgacaucuucaccaacucccgcggcaagcgcgccuccaagggcggcaagaucugcggcuucgucgacgagcgcggccucuacaagucccucaagggcgccugcaagcucaagcucugcggcguccccggccuccgccucauggacggcaccugggucuccauccagaccuccgacgagaccaaguggugcccccccgaccagcucgucaacguccacgacuuccacuccgacgagaucgagcaccucaucgucgaggagcucgucaagaagcgcgaggagugccucgacgcccucgaguccaucaugaccaccaaguccgucuccuuccgccgccucucccaccuccgcaagcucguccccggcuucggcaaggccuacaccaucuucaacaagacccucauggaggccgacgcccacuacaaguccguccgcaccuggaacgagaucauccccuccaagggcugccucaaggucggcggcaugugccacccccacgucggcggcgucuucuucaacggcaucauccucggccccgacggcaccguccucauccccgagaugcaguccucccuccuccagcagcacauggagcuccucgaguccuccgucaucccccucaugcacccccucgccgaccccuccaccgucuucaaggagggcgacgaggccgaggacuucgucgagauccaccuccccgacguccacaagcagaucuccggcgucgaccucggccuccccuccuggggcaaguaccuccucaucuccgccggcgcccucgccacccucauccucaccaucuuccucaucaccugcugccgcaaggucaaccgcaccgaguccguccagcgcggccaccgcgaguccgagcgcaagguccccgucuccccccagaacggccgcgucaucuccuccugggagcucuacaaguccggcggcgagaccaaccucuga

SEQ ID NO: 127398 - RNA, 1575 nt, Artificial Sequence
  derived and/or modified CDS sequence (opt2) from glycoprotein__RABV__JQ686006.1
augaucccccaggcccuccucuucgucccccuccucaucuccucccucugcuucggcaaguuccccaucuacaccauccccgagaagcucggccccuggucccccaucgacauccaccaccucuccugccccaacaaccucgucgccgaggacgagggcugcaacucccucuccggcuucuccuacauggagcucaaggucggcuacaucuccgccaucaaggucaacggcuucaccugcaccggcgucgucaccgaggccgagaccuacaccaacuucgucggcuacgucaccaccaccuucaagcgcaagcacuuccgccccacccccgacgccugccgcgccgccuacaacuggaagauggccggcgacccccgcuacgaggagucccuccacaaccccuaccccgacuaccacuggcuccgcaccgucaagaccaccaaggagucccucgucaucaucucccccuccgucgccgaccucgaccccuacgacaagucccuccacucccgcgucuuccccgacggcaagugccucggcaucaccaucuccuccaccuacugcuccaccaaccacgacuacaccaucuggaugcccgaggaggcccgccucggcaccuccugcgacaucuucaccaccuccaagggcaagcgcgccuccaagggcgacaagaucugcggcuucgucgacgagcgcggccucuacaagucccucaagggcgccugcaagcucaagcucugcggcguccucggccuccgccucauggacggcaccugggucuccauccagacccccggcgagaccaaguggugcucccccgaccagcucgucaaccuccacgacuuccacuccgacgagaucgagcaccucgucgccgaggagcucgucaagaagcgcgaggagugccucgacgcccucgaguccaucaugaccaccaaguccgucuccuuccgccgccucucccaccuccgcaagcucguccccggcuucggcaaggccuacaccaucuucaacaagacccucauggaggccgacgcccacuacaaguccguccgcaccuggaacgaggucauccccuccaagggcugccucuccgucggcggccgcugccacccccacgucaacggcgucuucuucaacggcaucauccucggccccgacggcuccguccucauccccgagaugcaguccucccuccuccagcagcacauggagcuccucgaguccuccgucaucccccucaugcacccccucgccgaccccuccaccgucuucaaggacggcgacgaggccgagaacuucgucgagguccaccuccccgacguccacaagcaggucuccggcgucgaccucggccuccccaacuggggcaaguaccuccucaugaucgccggcgcccucgccacccucaugcucaccaucuuccucaugaccugcugccgccgcaccaagcgcgccgaguccauccagcacggccucggcgaguccggccgcaaggucuccgucaccccccaguccggcaaggucaucuccuccugggaguccuacaaguccggcggcgagacccgccucuga

SEQ ID NO: 127399 - RNA, 1575 nt, Artificial Sequence
  derived and/or modified CDS sequence (opt2) from glycoprotein__RABV__JQ686007.1
augaucccccgcgcccuccucuucgucccccuccucauccccucccucugccucggcgaguuccccaucuacaccauccccgacaagcucggccccuggucccccaucgacauccaccaccucuccugccccaacaaccucgucgccgagaacgacggcugcaccucccucuccggcuucuccuacauggagcucaaggucggcuacaucuccgccaucaaggucaacggcuucaccugcaccggcgucgucaccgaggccgagaccuacaccaacuucgucggcuacgucaccaccaccuucaagcgcaagcacuuccgccccacccccgacgccugccgcgccgcccacgacuggaagauggccggcgacccccgcuacgaggccucccuccagaaccccuaccccgacuaccacuggcuccgcaccgucaagaccaccaaggagucccucgucaucaucucccccuccgucgccgaccucgaccccuacgacaagucccuccacucccgcgucuuccccuccggcaagugccucggcaucaccgucuccuccaccuacugcuccaccaaccacgacuacaccaucuggaugcccgucgagccccgccucggcaccuccugcgacaucuucaccaacucccgcggcaagcgcgccuccaagggcggccgcgucugcggcuucgucgacgagcgcggccucuacaagucccucaagggcgccugccgccucaagcucugcggcguccccggcauccgccuccucgacggcaccugggucuccauccagaccuccgaggacaucaaguggugcccccccgaccgccucgucaaccuccacgacuuccacuccgacgagaucgagcaccucgucgucgccgagcucaucaagcgccgcgagaacugccucgacgcccucgaguccaucaugaccaccaaguccgucuccuuccgccgccucucccaccuccgcaagcucguccccggcuucggcaaggccuacaccaucuucaacaagacccucauggaggccgacgcccacuacaaguccgucaagaccuggaacgaggucauccccuccaagggcugccucgaggucggcggccgcugccacccccacgucaacggcgucuucuucaacggcaucauccucggccccgacggcaacguccucauccccgagaugcaguccucccuccuccagcagcacauggagcuccucgaguccuccgucaucccccucaugcacccccucgccgaccccuccaccgucuucaaggagggcgacgaggccgaggacuucgucgagguccaccuccccgacguccacaagcaggucuccgacgucgaccucggccuccccuccuggggcaaguaccuccucaucuccgccggcgcccucgccauccucauccucgccaucguccucaucaucugcugccgccgcgucaacaagacccgcuccacccagcgcggccaccgcgaguccggcggcaagauguccgucgucccccagaacggcaagaucaucuccuccugggagcucuacaaguccgaguccgagaccggccucuga

SEQ ID NO: 127400 - RNA, 1575 nt, Artificial Sequence
  derived and/or modified CDS sequence (opt2) from glycoprotein__RABV__JQ686008.1
augaucucccaggccuuccucuucguccccuuccucaucuccucccucugcuucggcaaguuccccaucuacaccauccccgacaagaucggccccuggucccccaucgacauccaccaccucuccugccccaacaaccucgucgucgaggacgagggcugcaccucccucuccggcuucuccuacauggagcucaaggucggcuacaucuccgccaucaaggucaacggcuucaccugcaccggcgucgucaccgaggccgagaccuacaccaacuucgucggcuacgucaccaccaccuucaagcgcaagcacuuccgccccaugcccgacgccugccgcgccgccuacaacuggaagauggccggcgacccccgcuacgaggagucccuccagaaccccuaccccgacuacaacuggcuccgcaccgucaagaccaccaaggagucccucaucaucaucucccccuccgucgccgaccucgaccccuacgacaagucccuccacucccgcgucuuccccaacggcaagugccucggcaucaccgucuccuccaccuacugcuccaccaaccacgacuacaccaucuggaugcccgaggaggcccgccucggcaccuccugcgacaucuucaccaacuccaagggcaagcgcgccuccaagggcggcaagaccugcggcuucgucgacgagcgcggccucuacaagucccuccgcggcgccugcaagcucaagcucugcggcguccccggccuccgccucauggacggcaccugggucuccauccagaccuccgacgagaccaaguggugcccccccgaccagcucgucaacguccacgacuuccacuccgacgagaucgagcaccucgucgucgaggagcucguccgcaagcgcgaggagugccucgacgcccucgaguccaucaugaccaccaaguccgucuccuuccgccgccucucccaccuccgcaagcucguccccggcuucggcaaggccuacaccaucuucaacaagacccucauggaggccgacgcccacuacaaguccauccagaccuggaacgagaucauccccuccaagggcugccucaaggucggcggcaugugccacccccaccucgacggcgucuucuucaacggcaucauccucggccccgacggcaacguccucauccccgagaugcaguccucccuccuccagcagcacauggagcuccucgaguccuccgucaucccccucaugcacccccucgccgaccccuccaccgucuucaaggacggcgacgaggccgaggacuucgucgagguccaccuccccgacauccacaagcaggucuccggcaucgaccucggccuccccgacuggggcaaguaccuccucauguccgccggcgcccucgccauccuccuccucaccaucuuccucaugaccugcugccgccgcgucaaccgcaccgaguccgcccagcgcgaccccggcgaguccggccgcaaggucuccgucaccccccagaacggcaaggucaucuccuccugggagcucuacaaguccggcggcgacacccgccucuga

SEQ ID NO: 127401 - RNA, 1575 nt, Artificial Sequence
  derived and/or modified CDS sequence (opt2) from glycoprotein__RABV__JQ686009.1
augaucccccaggcccuccucuucgucccccuccucauccccucccucugccucggcaaguuccccaucuacaccauccccgacaagcucggccccuggucccccaucgacauccaccaccucuccugccccaacaaccucgucgucgaggacgagggcugcaccucccucuccggcuucuccuacauggagcucaaggucggcuacaucuccgccaucaaggucaacggcuucaccugcaccggcgucgucaccgaggccgagaccuacaccaacuucgucggcuacgucaccaccaccuucaagcgcaagcacuuccgccccaugcccgacgccugccgcgccgcccacgacuggaagaucgccggcgacccccgcuacgaggacucccuccagaaccccuaccccgacuaccacuggcuccgcaccgucaagaccaccaaggagucccucgucaucaucucccccuccgucgccgaccucgaccccuacgacaagucccuccacucccgcgucuuccccuccggcaagugccucggcaucaccgucuccuccaccuacugcuccaccaaccacgacuacaccaucuggaugcccgucgaggcccgccucggcaccuccugcgacaucuucaccaacucccgcggcaagaaggccuccaagggcggccgcaccugcggcuucgucgacgagcgcggccucuacaagucccucaagggcgccugcaagcucaagcucugcggcguccccggccuccgccucauggacggcaccugggucuccauccagaccuccgacgacaucaaguggugcccccccgaccagcucgucaaccuccacgacuuccacuccgacgagaucgagcaccucgucgucgaggagcucaucaagaagcgcgagggcugccucgacgcccucgaguccaucaugaccaccaaguccgucuccuuccgccgccucucccaccuccgcaagcucguccccggcuucggcaaggccuacaccaucuucaacaacacccucauggaggccgacgcccacuacaaguccguccgcaccuggaacgaggucauccccuccaagggcugccucaaggucggcggccgcugccacccccccgucaacggcgucuucuucaacggcaucauccucggccccgacggcaacguccucauccccgagaugcaguccucccuccuccagcagcacauggagcuccucgaguccuccgucaucccccucaugcacccccucgccgaccccuccaccgucuucaaggacggcgacgaggccgaggacuucgucgagguccaccuccccgacguccacaagcaggucuccgacgucgaccucggccuccccuccuggggcaaguaccuccucauguccgccggcgcccucgccacccucauccucgccaucuuccucaucaccugcugccgccgcgccaaccgcaccgaguccacccagcgcggccaccgcgaguccggcggcaaggucuccgucgccccccagaacggcaagaucaucuccuccugggagcucuacaaguccgaguccgagaccggcauguga

SEQ ID NO: 127402 - RNA, 1575 nt, Artificial Sequence; identical to SEQ ID NO: 127370
  derived and/or modified CDS sequence (opt2) from glycoprotein__RABV__JQ686011.1

SEQ ID NO: 127403 - RNA, 1575 nt, Artificial Sequence
  derived and/or modified CDS sequence (opt2) from glycoprotein__RABV__JQ699230.1
auggucccccagguccuccucuucgucccccuccucgucuucuccuccugcuucggcaaguuccccaucuacaccauccccgacaagcucggccccuggucccccaucgacauccgccaccucuccugccccaacaaccucgucgucgaggacgagggcugcaccaaccucuccggcuucuccuacauggagcucaaggucggcuacaucuccgccaucaaggucaacggcuucaccugcaccggcgucgucaccgaggccgagaccuacaccaacuucgucggcuacgucaccaccaccuucaagcgcaagcacuuccgccccaugcccgacgccugccgcgccgccuacaacuggaagauggccggcgacccccgcuacgaggagucccuccacaaccccuaccccgacuaccacuggcuccgcaccgucaagaccaccaaggagucccucgucaucaucucccccuccgucgccgaccucgaccccuacgacaagucccuccacucccgcgucuuccccggcggcaagugcuccggcaucaccgucuccuccaccugcugcuccaccaaccacgacuacaccaucuggaugcccgagaacccccgccucggcaccuccugcgacaucuucaccaacucccgcggcaagcgcgccuccaagggcggcaagaccugcggcuucgucgacgagcgcggccucuacaagucccucaagggcgccugcaagcucaagcucugcggcguccucggccuccgccucauggacggcaccugggucgccauccagaccuccgacgagaucaaguggugcucccccgaccagcucgucaaccuccacgacuuccacuccgacgagaucgagcaccucgucgucgaggagcucgucaagaagcgcgaggagugccucgacgcccucgagaccaucaugaccaccaaguccgucuccuuccgccgccucucccaccuccgcaagcucguccccggcuucggcaaggccuacaccaucuucaacaagacccucauggaggccgacgcccacuacaaguccauccgcaccuggaacgagaucauccccuccaagggcugccuccgcgucggcggccgcugccacccccacgucaacggcgucuucuucaacggcaucauccucggccccgacggccacguccucauccccgagaugcaguccucccuccuccaccagcacauggagcuccucgaguccuccgucaucccccucaugcacccccucgccgaccccuccaccgucuucaaggacggcgacgaggccgaggacuucgucgagguccaccuccccgacguccacaagcagaucuccggcgucgaccucggccuccccaacuggggcaaguacguccucaucuccgccggcgcccucaccgcccucaugcucaugaucuuccucaugaccugcugccgcaaggccaaccgcgccgaguccauccagcacaaccccggcgagaccggccgcaaggucuccgucaccucccacaacggccgcgucaucuccuccugggaguccuacaaguccggcggcgagaccaagcucuga

SEQ ID NO: 127404 - RNA, 1575 nt, Artificial Sequence
  derived and/or modified CDS sequence (opt2) from glycoprotein__RABV__JQ699231.1
auggucccccagguccuccucuucgucccccuccucgucuucuccuccugcuucggcaaguuccccaucuacaccauccccgacaagcucggccccuggucccccaucgacauccaccaccucuccugccccaacaaccucgucgucgaggacgagggcugcaccaaccucuccggcuucuccuacauggagcucaaggucggcuacaucuccgccaucaaggucaacggcuucaccugcaccggcgucgucaccgaggccgagaccuacaccaacuucgucggcuacgucaccaccaccuucaagcgcaagcacuuccgccccaugcccgacgccugccgcgccgccuacaacuggaagauggccggcgacccccgcuacgaggagucccuccacaaccccuaccccgacuaccacuggcuccgcaccgucaagaccaccaaggagucccucgucaucaucucccccuccgucgccgaccucgaccccuacgacaagucccuccacucccgcgucuuccccggcggcaagugcuccggcaucaccgucuccuccaccugcugcuccaccaaccacgacuacaccaucuggaugcccgagaacccccgccucggcaccuccugcgacaucuucaccaacucccgcggcaagcgcgccuccaagggcggcaagaccugcggcuucgucgacgagcgcggccucuacaagucccucaagggcgccugcaagcucaagcucugcggcguccucggccuccgccucauggacggcaccugggucgccauccagaccuccgacgagaucaaguggugcucccccgaccagcucgucaaccuccacgacuuccacuccgacgagaucgagcaccucgucgucgaggagcucgucaagaagcgcgaggagugccucgacgcccucgagaccaucaugaccaccaaguccgucuccuuccgccgccucucccaccuccgcaagcucguccccggcuucggcaaggccuacaccaucuucaacaagacccucauggaggccgacgcccacuacaaguccauccgcaccuggaacgagaucauccccuccaagggcugccuccgcgucggcggccgcugccacccccacgucaacggcgucuucuucaacggcaucauccucggccccgacggccacguccucauccccgagaugcaguccucccuccuccaccagcacauggagcuccucgaguccuccgucaucccccucaugcacccccucgccgaccccuccaccgucuucaaggacggcgacgaggccgaggacuucgucgagguccaccuccccgacguccacaagcucaucuccggcgucgaccucggccuccccaacuggggcaaguacguccucaucuccgccggcgcccucaccgcccucaugcucaugaucuuccucaugaccugcugccgcaaggccaaccgcgccgaguccauccagcacaaccccggcgagaccggccgcaaggucuccgucaccucccacaacggccgcgucaucuccuccugggaguccuacaaguccggcggcgagaccaagcucuga

SEQ ID NO: 127405 - RNA, 1575 nt, Artificial Sequence; identical to SEQ ID NO: 126882
  derived and/or modified CDS sequence (opt2) from glycoprotein__RABV__JQ699255.1

SEQ ID NO: 127406 - RNA, 1575 nt, Artificial Sequence; identical to SEQ ID NO: 126882
  derived and/or modified CDS sequence (opt2) from glycoprotein__RABV__JQ699257.1

SEQ ID NO: 127407 - RNA, 1575 nt, Artificial Sequence
  derived and/or modified CDS sequence (opt2) from glycoprotein__RABV__JQ699258.1
augaucccccagguccuccucuucgucacccuccucgucuucuccuccugcuucggcaaguuccccaucuacaccauccccgacaagcucggccccuggucccccaucgacauccaccaccucuccugccccaacaaccucgucgucgaggacgagggcugcaccaaccucuccggcuucuccuacauggagcucaaggucggcuacaucuccgccaucaaggucaacggcuucaccugcaccggcgucgucaccgaggccgagaccuacaccaacuucgucggcuacgucaccaccaccuucaagcgcaagcacuuccgccccaugcccgacgccugccgcgccgccuacaacuggaagauggccggcgacccccgcuacgaggagucccuccacaaccccuaccccgacuaccacuggcuccgcaccgucaagaccaccaaggagucccucgucaucaucucccccuccgucgccgaccucgaccccuacgacaagucccuccacucccgcgucuuccccggcggcaagugcuccggcaucaccgucuccuccaccugcugcuccaccaaccacgacuacaccaucuggaugcccgaguccccccgccucggcaccuccugcgacaucuucaccaacucccgcggcaagcgcgccuccaagggcggcaagaccugcggcuucgucgacgagcgcggccucuacaagucccucaagggcgccugcaagcucaagcucugcggcguccucggccuccgccucauggacggcaccugggucgccauccagaccuccgacgagaucaaguggugcccccccgaccagcucgucaaccuccacgacuuccacuccgacgagaucgagcaccucgucgucgaggagcucgucaagaagcgcgaggagugccucgacgcccucgagaccaucaugaccaccaaguccgucuccuuccgccgccucucccaccuccgcaagcucguccccggcuucggcaaggccuacaccaucuucaacaagacccucauggaggccgacgcccacuacaaguccauccgcaccuggaacgagaucauccccuccaagggcugccuccgcgucggcggccgcugccacccccacgucaacggcgucuucuucaacggcaucauccucggccccgacggccacguccucauccccgagaugcaguccucccuccuccaccagcacauggagcuccucgaguccuccgucaucccccucaugcacccccucgccgaccccuccaccgucuucaaggacggcgacgaggccgaggacuucgucgagguccaccuccccgacguccacaagcagaucuccggcgucgaccucggccuccccaacuggggcaaguacguccucaucuccgccggcgcccucaccgcccucaugcucaccaucuuccucaugaccugcugccgcaagaccaacggcgccggcuccauccagcacucccccggcgagaccggccgcaaggucuccgucaccucccacaacggccgcgucaucuccuccugggaguccuacaaguccggcuccgagaccaagcucuga

SEQ ID NO: 127408 - RNA, 1575 nt, Artificial Sequence
  derived and/or modified CDS sequence (opt2) from glycoprotein__RABV__JQ699259.1
augaucccccaggcccuccucuucgucccccuccucgucuucuccuccugcuucggcaaguuccccaucuacaccauccccgacaagcucggccccuggucccccaucgacauccaccaccucuccugccccaacaaccucgucgucgaggacgagggcugcaccaaccucuccggcuucuccuacauggagcucaaggucggcuacaucuccgccaucaaggucaacggcuucaccugcaccggcgucgucaccgaggccgagaccuacaccaacuucgucggcuacgucaccaccaccuucaagcgcaagcacuuccgccccaugcccgacgccugccgcuccgccuacaacuggaagauggccggcgacccccgcuacgaggagucccuccacaaccccuaccccgacuaccacuggcuccgcaccgucaagaccaccaaggagucccucgucaucaucucccccuccgucgccgaccucgaccccuacgacaagucccuccacucccgcgucuucccccgcggcaagugcuccggcaucaccgucuccuccaccugcugcuccaccaaccacgacuacaccaucuggaugcccgagaacccccgccucggcaccuccugcgacaucuucaccaacucccgcggcaagcgcgccuccaagggcuccaagaccugcggcuucgucgacgagcgcggccucuacaagucccucaagggcgccugcaagcucaagcucugcggcguccucggccuccgccucauggacggcaccugggucgccauccagaccuccaacgagaucaaguggugcccccccgaccagcucgucaaccuccacgacuuccacuccgacgagaucgagcaccucgucgucgaggagcucgucaagaagcgcgaggagugccucgacgcccucgagaccaucaugaccaccaaguccgucuccuuccgccgccucucccaccuccgcaagcucguccccggcuucggcaaggccuacaccaucuucaacaagacccucauggaggccgacgcccacuacaaguccauccgcaccuggaacgagaucauccccuccaagggcugccuccgcgucggcggccgcugccacccccacgucaacggcgucuucuucaacggcaucauccucggccccgacggccacguccucauccccgagaugcaguccucccuccuccaccagcacauggagcuccucgaguccuccgucaucccccucaugcacccccucgccgaccccuccaccgucuucaaggacggcgacgaggccgaggacuucgucgagguccaccuccccgacguccacaagcagaucuccggcgucgaccucggccuccccaacuggggcaaguacguccucaucuccgccggcgcccucaccgcccucaugcucaccaucuuccucaucaccugcugccgcaagaccaaccgcgccggcuccauccagcacucccccggcgagaccggccgcaaggucuccgucaccucccacaacggccgcgucaucuccuccugggaguccuacaaguccggcuccgagaccaagcucuga

SEQ ID NO: 127409 - RNA, 1575 nt, Artificial Sequence
  derived and/or modified CDS sequence (opt2) from glycoprotein__RABV__JQ699260.1
auggucccccaggccuuccucuucguccccuuccucgccgucccccucugcuucggcaaguuccccaucuacaccauccccgacaagcucggccccuggucccccaucgacauccaccaccucuccugccccaacaaccucgucgucgaggacgagggcugcaccaaccucuccggcuucuccuacauggagcucaaggucggcuacaucuccgccaucaaggucaccggcuucaccugcaccggcgucgucaccgaggccgagaccuacaccaacuucgucggcuacgucaccaccaccuucaagcgcaagcacuuccgccccacccccgacgccugccgcuccgccuacaacuggaagaucgccggcgacccccgcuacgaggagucccuccacaaccccuaccccgacuaccacuggcuccgcaccgucaagaccaccaaggaguccuucgucaucaucucccccuccgucgccgaccucgaccccuacgacaagucccuccacucccgcgucuucccccgcggcaagugcuccggcaucaccgucuccuccaccuacugcuccaccaaccacgacuacaccaucuggaugcccgagaacccccgccucggcaccuccugcgacaucuucaccaacucccgcggcaagcgcgccuccaagggcuccaagaccugcggcuucgucgacgagcgcggccucuacaagucccucaagggcgccugcaagcucaagcucugcggcguccucggccuccgccucauggacggcaccugggucgccauccagaccuccgacgagaccaaguggugcccccccgaccagcucgucaaccuccacgacuuccacuccgacgagaucgagcaccucgucgucgaggagcucgucaagaagcgcgaggagugccucgacgcccucgaguccaucaugaccaccaaguccgucuccuuccgccgccucucccaccuccgcaagcucguccccggcuucggcaaggccuacaccaucuucaacaagacccucauggaggccgacgcccacuacaaguccguccgcaccuggaacgagaucauccccuccaagggcugccuccgcgucggcggccgcugccacccccacgucaacggcgucuucuucaacggcaucauccucggccccgacggccacguccucauccccgagaugcaguccucccuccuccagcagcacauggagcuccucgaguccuccgucaucccccucaugcacccccucgccgaccccuccaccgucuucaaggacggcgacgaggccgaggacuucgucgagguccaccuccccgacguccacaagcaggucuccggcgucgaccucggccuccccuccuggggcaaguacguccucauguccgccggcauccucaccgcccucaugcucaugaucuuccucaugaccugcugccgccgcaccaaccgcgccgaguccauccagcacucccucggcgagaccggccgcaaggucuccgucaccucccagaacggccgcgucaucuccuccugggaguccuacaaguccggcggcgagaccaagcucuga

SEQ ID NO: 127410 - RNA, 1575 nt, Artificial Sequence
  derived and/or modified CDS sequence (opt2) from glycoprotein__RABV__JQ699262.1
auggucccccaggcccuccucuucgucccccuccucgccgucccccucugcuucggcaaguuccccaucuacaccauccccgacaagcucggccccuggucccccaucgacauccaccaccucuccugccccaacaaccucgucgucgaggacgagggcugcaccaaccucuccggcuucuccuacauggagcucaaggucggcuacaucuccgccaucaaggucaccggcuucaccugcaccggcgucgucaccgaggccgagaccuacaccaacuucgucggcuacgucaccaccaccuucaagcgcaagcacuuccgccccacccccgacgccugccgcuccgccuacaacuggaagaucgccggcgacccccgcuacgaggagucccuccacaaccccuaccccgacuaccacuggcuccgcaccgucaagaccaccaaggaguccuucgucaucaucucccccuccgucgccgaccucgaccccuacgacaagucccuccacucccgcgucuucccccgcggcaagugcuccggcaucaccgucuccuccaccuacugcuccaccaaccacgacuacaccaucuggaugcccgagaacccccgccucggcaccuccugcgacaucuucaccaacucccgcggcaagcgcgccuccaagggcuccaagaccugcggcuucgucgacgagcgcggccucuacaagucccucaagggcgccugcaagcucaagcucugcggcguccucggccuccgccucauggacggcaccugggucgccauccagaccuccgacgagaccaaguggugcccccccgaccagcucgucaaccuccacgacuuccacuccgacgagaucgagcaccucgucgucgaggagcucgucaagaagcgcgaggagugccucgacgcccucgaguccaucaugaccaccaaguccgucuccuuccgccgccucucccaccuccgcaagcucguccccggcuucggcaaggccuacaccaucuucaacaagacccucauggaggccgacgcccacuacaaguccguccgcaccuggaacgagaucauccccuccaagggcugccuccgcgucggcggccgcugccacccccacgucaacggcgucuucuucaacggcaucauccucggccccgacggccacguccucauccccgagaugcaguccucccuccuccagcagcacauggagcuccucgaguccuccgucaucccccucaugcacccccucgccgaccccuccaccgucuucaaggacggcgacgaggccgaggacuucgucgagguccaccuccccgacguccacaagcaggucuccggcgucgaccucggccuccccuccuggggcaaguacguccucauguccgccggcauccucaccgcccucaugcucaugaucuuccucaugaccugcugccgccgcaccaaccgcgccgaguccauccagcacucccucggcgagaccggccgcaaggucuccgucaccucccagaacggccgcgucaucuccuccugggaguccuacaaguccggcggcgagaccaagcucuga

SEQ ID NO: 127411 - RNA, 1575 nt, Artificial Sequence
  derived and/or modified CDS sequence (opt2) from glycoprotein__RABV__JQ699264.1
auggucccccaggcccuccucuucgucccccuccucgccgucccccucugcuucggcaaguuccccaucuacaccauccccgacaagcucggccccuggucccccaucgacauccaccaccucuccugccccaacaaccucgucgucgaggacgagggcugcaccaaccucuccggcuucuccuacauggagcucaaggucggcuacaucuccgccaucaaggucaacggcuucaccugcaccggcgucgucaccgaggccgagaccuacaccaacuucgucggcuacgucaccaccaccuucaagcgcaagcacuuccgccccacccccgacgccugccgcuccgccuacaacuggaagauggccggcgacccccgcuacgaggagucccuccacaaccccuaccccgacuaccacuggcuccgcaccgucaagaccaccaaggaguccuucgucaucaucucccccuccgucgccgaccucgaccccuacgacaagucccuccacucccgcgucuucccccgcggcaagugcuccggcaucaccgucuccuccaccuacugcuccaccaaccacgacuacaccaucuggaugcccgagaacccccgccucggcaccuccugcgacaucuucaccaacucccgcggcaagcgcgccuccaagggcuccaagaccugcggcuucgucgacgagcgcggccucuacaagucccucaagggcgccugcaagcucaagcucugcggcguccucggccuccgccucauggacggcaccugggucgccauccagaccuccgacgagaccaaguggugcccccccgaccagcucgucaaccuccacgacuuccacuccgacgagaucgagcaccucgucgucgaggagcucgucaagaagcgcgaggagugccucgacgcccucgaguccaucaugaccaccaaguccgucuccuuccgccgccucucccaccuccgcaagcucguccccggcuucggcaaggccuacaccaucuucaacaagacccucauggaggccgacgcccacuacaaguccauccgcaccuggaacgagaucauccccuccaagggcugccuccgcgucggcggccgcugccacccccacgucaacggcgucuucuucaacggcaucauccucggccccgacggccacguccucauccccgagaugcaguccucccuccuccagcagcacauggagcuccucgaguccuccgucaucccccucaugcacccccucgccgaccccuccaccgucuucaaggacggcgacgaggccgaggacuucgucgagguccaccuccccgacguccacaagcaggucuccggcgucgaccucggccuccccuccuggggcaaguacguccucauguccgccggcauccucaccgcccucaugcucaugaucuuccucaugaccugcugccgccgcaccaaccgcgccgaguccauccagcacucccucggcgagaccggccgcaaggucuccgucaccucccagaacggccgcgucaucuccuccugggaguccuacaaguccggcggcgagaccaagcucuga

SEQ ID NO: 127412 - RNA, 1575 nt, Artificial Sequence; identical to SEQ ID NO: 127089
  derived and/or modified CDS sequence (opt2) from glycoprotein__RABV__JQ699267.1

SEQ ID NO: 127413 - RNA, 1575 nt, Artificial Sequence; identical to SEQ ID NO: 126563
  derived and/or modified CDS sequence (opt2) from glycoprotein__RABV__JQ699272.1

SEQ ID NO: 127414 - RNA, 1575 nt, Artificial Sequence
  derived and/or modified CDS sequence (opt2) from glycoprotein__RABV__JQ730682.1
augaucccccagacccuccucuucgucccccuccucgucuucucccucugcuucggcaaguuccccaucuacaccauccccgacaagcucggccccuggucccccaucgacauccaccaccucuccugccccaacaaccucgucgucgaggacgagggcugcaccaaccucuccggcuucuccuacauggagcucaaggucggcuacaucuccgccaucaaggucaacggcuucaccugcaccggcgucgucaccgaggccgagaccuacaccaacuucgucggcuacgucaccaccaccuucaagcgcaagcacuuccgccccacccccgacgccugccgcgccgccuacaacuggaagauggccggcgacccccgcuacgaggagucccuccacaaccccuaccccgacuaccacuggcuccgcaccgucaagaccaccaaggagucccucgucaucaucucccccuccgucuccgaccucgaccccuacgacaagucccuccacucccgcgucuuccccuccggcaagugcuccggcaucaccgucuccuccaccuacugccccaccaaccacgacuacaccaucuggaugcccgagaacccccgccucggcaccuccugcgacaucuucaccaacucccgcggcaagcgcgccuccaagggcuccaagaccugcggcuucgucgacgagcgcggccucuacaagucccucaagggcgccugcaagcucaagcucugcggcguccucggccuccgccucauggacggcaccugggccgccauccagaccuccgacgaggccaaguggugcccccccgaccagcucgucaacauccacgacuuccgcuccgacgagaucgagcaccucgucgucgaggagcucgucaagaagcgcgaggagugccucgacgcccucgaguccaucaugaccaccaaguccgucuccuuccgccgccucucccaccuccgcaagcucguccccggcuucggcaaggccuacaccaucuucaacaagacccucauggaggccgacgcccacuacaaguccguccgcaccuggaacgagaucauccccuccaagggcugccuccgcgucggcggccgcugccacccccacgucaacggcgucuucuucaacggcaucauccucggccccgacggccacguccucauccccgagaugcaguccucccuccuccagcagcacauggagcuccucgaguccuccgucaucccccucaugcacccccucgccgaccccuccaccgucuucaaggacggcgacgaggccgaggacuucgucgagguccaccuccccgacguccacaagcaggucuccggcgucgaccucggccuccccuccuggggcaaguacguccucauguccgucggcacccucaucgcccucaugcucaugauccuccucaccaccugcugccgcaaggccaacggcgccgaguccauccagcaccgccucggcgagaccggccgcaaggucuccgucaccucccagaacggccgcgucaucuccuccugggaguccuacaaguccggcggcgagaccaagcucuga

SEQ ID NO: 127415 - RNA, 1575 nt, Artificial Sequence
  derived and/or modified CDS sequence (opt2) from glycoprotein__RABV__JQ824889.1
augaucccccacgcccuccucuccgucccccuccucaucuccucccucugcuucggcaaguuccccaucuacaccauccccgagaagcucggccccuggucccccaucgacauccaccaccucuccugccccaacaaccucgucgucgaggacgagggcugcaacucccucuccggcuucuccuacauggagcucaaggucggcuacaucuccgccaucaaggucaacggcuucaccugcaccggcgucgucaccgaggccgagaccuacaccaacuucgucggcuacgucaccaccaccuucaagcgcaagcacuuccgccccaugcccgacgccugccgcgccgccuacaacuggaagaccgccggcgacccccgcuacgaggagucccuccacaaccccuaccccgacuaccacuggcuccgcaccgucaagaccaccaaggagucccucaucaucaucucccccuccgucgccgaccucgaccccuacgacaagucccuccacucccgcaucuuccccggcggcaagugccucggcaucaccaucuccuccaccuacugcuccaccaaccacgacuacaccaucuggaugcccgaggaggcccgccucggcaccuccugcgacaucuucaccaacuccaagggcaagcgcgccuccaagggcggccgcaccugcggcuucgucgacgagcgcggccucuacaagucccucaagggcgccugcaagcucaagcucugcggcguccccggccuccgccucauggacggcaccugggucgccauccagacccccaacgagaccaaguggugcucccccgaccagcucgucaacguccacgacuuccgcuccgacgagaucgagcaccucgucgucgaggagcucauccgcaagcgcgaggagugccucgacgcccucgaguccaucaugaccaccaaguccgucuccuuccgccgccucuccaaccuccgcaagcucguccccggcuucggcaaggccuacaccaucuucaacaagacccucauggaggccgacgcccacuacaaguccguccgcaccuggaacgagaucauccccucccgcggcugccucaaggucggcggccgcugccacccccacgucaacggcgucuucuucaacggcaucauccucggccccgacggccacauccucauccccgagaugcaguccucccuccuccagcagcacauggagcuccucgaguccuccgucaucccccucauccacccccucgccgaccccuccaccgucuucaaggacggcgacgaggccgaggacuucgucgagguccaccuccccgacguccaccagcaggucuccggcgucgaccucggccuccccgacuggggcaaguacguccucauguccgccggcgcccucgccaccgucaugcucaccaucuuccucaucaccugcugccgccgcgucaagcgcaccgaguccguccagcagggccucggcgaguccggccgcaaggucuccgucgccccccagaacggcaaggucauguccuccugggaguacuacaaguccggcggcggcacccgccucuga

SEQ ID NO: 127416 - RNA, 1575 nt, Artificial Sequence
  derived and/or modified CDS sequence (opt2) from glycoprotein__RABV__JQ944704.1
auggacccccaggcccuccuccucgucccccuccucggcuucucccucugcuucggcaaguuccccaucuacaccauccccgacaagcucggccccuggauccccaucgacauccaccaccucuccugccccaacaaccucgucgucgaggacgagggcugcaccaaccucuccggcuucuccuacauggagcucaaggucggcuacaucuccuccaucaaggucaacggcuucaccugcaccggcgucgucaccgaggccgagaccuacaccaacuucgucggcuacgucaccaccaccuuccgccgcaagcacuuccgccccacccccgacgccugccgcgccgccuacaacuggaagauggccggcgacccccgcuacgaggagucccuccacaaccccuaccccgacuaccacuggcuccgcaccgucaagaccaccaaggagucccucgucaucaucucccccuccgucgccgaccucgaccccuacgacaagucccuccacucccgcgucuuccccuccggcaagugcuccggcaucaccgucuccuccaccuacugcuccaccaaccacgacuacaccaucuggaugcccgagaaccuccgccucggcaccuccugcgacaucuucaccaacucccgcggcaagcgcgccuccaagggcuccaagaccugcggcuucgucgacgagcgcggccucuacaagucccucaagggcgccugcaagcucaagcucugcggcguccucggccuccgccucauggacggcaccugggucgccaugcagaccuccgacgagaccaaguggugcccccccgaccagcucgucaaccuccacgacuuccgcuccgacgagaucgagcaccucgucgucgaggagcucgucaagaagcgcgaggagugccucgacgcccucgaguccaucaugaccaccaaguccgucuccuuccgccgccucucccaccuccgcaagcucguccccggcuucggcaaggccuacaccaucuucaacaagacccucauggaggccgacgcccacuacaaguccguccgcaccuggaacgaggucauccccucccgcggcugccuccgcgucggcggccgcugccacccccacgucaacggcgucuucuucaacggcaucauccucggccccgacggccacguccucauccccgagaugcaguccucccuccuccagcagcacaucgagcuccucgaguccuccgucaucccccucaugcacccccucgccgaccccuccaccgucuucaaggacggcgacgaggccgaggacuucgucgagguccaccuccccgacguccacaagcaggucuccggcgucgaccucggccuccccaacuggggcaaguacguccuccucuccgccggcgcccucaucgcccucaugcucaucaucuuccucaucaccugcugccgccgcgucaaccgccccgaguccacccagcgcucccuccgcggcgccggccgcaaggucuccaucaccucccaguccggcaaggucaucuccuccugggaguccuacaaguccggcggcgagacccgccucuga

SEQ ID NO: 127417 - RNA, 1575 nt, Artificial Sequence
  derived and/or modified CDS sequence (opt2) from glycoprotein__RABV__JQ944705.1
auggucccccaggucuuccucuucgucccccuccucgucuucccccucugcuccggcaaguuccccaucuacaccauccccgacaagcucggccccuggucccccaucgacauccaccaccucuccugccccaacaaccucgucgucgaggacgagggcugcaccaaccucuccggcuucuccuacauggagcucaaggucggcuacaucuccgccaucaaggucaacggcuucaccugcaccggcgucgucaccgaggccgagaccuacaccaacuucgucggcuacgucaccaccaccuuccgccgcaagcacuuccgccccacccccgacgccugccgcgccgccuacaacuggaagauggccggcgacccccgcuacgaggagucccuccacaaccccuaccccgacuaccacuggcuccgcaccgucaagaccaccaaggagucccucgucaucaucucccccuccgucgccgaccucgaccccuacgacaagucccuccacucccgcgucuuccccuccggcaagugccucggcaucaccgucuccuccacccacugcuccaccaaccacgacuacaccaucuggaugcccgagaacccccgccccggcaccuccugcgacaucuucaccaacucccgcggcaagcgcgccuccaagggcuccaagaccugcggcuucgucgacgagcgcggccucuacaagucccucaagggcgccugcaagcucaagcucugcggcguccucggccuccgccucauggacggcaccugggucgccaugcagaccuccgacgagaccaaguggugcccccccgaccagcucgucaaccuccacgacuuccgcuccgacgagaucgagcaccucgucgucgaggagcucgucaagaagcgcgaggagugccucgacgcccucgaguccaucaugaccaccaaguccgucuccuuccgccgccucucccaccuccgcaagcucguccccggcuucggcaaggccuacaccaucuucaacaagacccucauggaggccgacgcccacuacaaguccguccgcaccuggaacgagaucauccccuccaagggcugccuccgcgucggcggccgcugccacccccacgucaacggcgucuucuucaacggcaucauccucggccccgacggccacguccucauccccgagaugcaguccucccuccuccagcagcacauggagcuccucgaguccuccgucaucccccucaugcacccccucgccgaccccuccaccgucuucaaggacggcgacgaggccgaggacuucgucgagguccaccuccccgacguccacaagcaggucuccggcgucgaccucggccuccccaacuggggcaaguacguccuccucuccgccggcgcccucaucgcccucaugcucaugaucuuccucaugaccugcugccgcaaggucaaccgccccgaguccacccagcgcucccucggcggcaccggccgcaaggucuccaucaccucccaguccggcaaggucaucuccuccugggaguccuacaaguccggcggcgagacccgccucuga

SEQ ID NO: 127418 - RNA, 1575 nt, Artificial Sequence
  derived and/or modified CDS sequence (opt2) from glycoprotein__RABV__JQ944706.1
auggccccccaggcccuccucuucgucccccuccucgucuucccccucugcuucggcaaguuccccaucuacaccauccccgacaagcucggccccuggucccccaucgacauccaccaccucuccugccccaacaaccucgucgucgaggacgagggcugcaccaaccucuccggcuucuccuacauggagcucaaggucggcuacaucuccgccaucaaggucaacggcuucaccugcaccggcgucgucaccgaggccgagaccuacaccaacuucgucggcuacgucaccaccaccuucaagcgcaagcacuuccgccccauccccgacgccugccgcgccgccuacaacuggaagauggccggcgacccccgcuacgaggagucccuccacaaccccuaccccgacuaccacuggcuccgcaccgucaagaccaccaaggagucccucgucaucaucucccccuccgucgccgaccucgaccccuacgacaagucccuccacucccgcgucuuccccuccggcaagugcuccggcaucaccgucuccuccaccuacugcuccaccaaccacgacuacaccaucuggaugcccgagaacccccgccucggcaccuccugcgacaucuucgccaacucccgcggcaagcgcgccuccaagggcuccaagaccugcggcuucgucgacgagcgcggccucuacaagucccucaagggcgccugcaagcucaagcucugcggcguccucggccuccgccucauggacggcaccugggucgccaugcagaccuccgacgagaccaaguggugcccccccgaccagcucgucaaccuccacgacuuccgcuccgacgagaucgagcaccucgucgucgaggagcucgucaagaagcgcgaggagugccucgacgcccucgaguccaucaugaccaccaaguccgucuccuuccgccgccucucccaccuccgcaagcucguccccggcuucggcaaggccuacaccaucuucaacaagacccucauggaggccgacgcccacuacaaguccguccgcaccuggaacgagaucauccccuccaagggcugccuccgcgucggcggccgcugccacccccacgucaacggcgucuucuucaacggcaucauccucggccccgacggccacguccucauccccgagaugcaguccucccuccuccagcagcacauggagcuccucgaguccuccgucaucccccucaugcacccccucgccgaccccuccaccgucuucaaggacggcgacgaggccgaggacuucgucgagguccaccuccccgacguccacaagcaggucuccggcgucgaccucggccuccccaacuggggcaaguacguccuccucuccgccggcgcccucaucgcccucaugcucaucaucuuccucaugaccugcugccgccgcgucaaccgccccgaguccacccagcgcugccucggcggcaccggccgcaaggucuccgucaccucccaguccggcaaggucaucuccuccugggaguccuacaaguccggcggcgagacccgccucuga

SEQ ID NO: 127419 - RNA, 1575 nt, Artificial Sequence
  derived and/or modified CDS sequence (opt2) from glycoprotein__RABV__JQ944707.1
augaucccccaggcccuccucuucgucccccuccucgccuuccccaugugcuucggcaaguuccccaucuacaccauccccgacaagcucggccccuggucccccaucgacauccaccaccucuccugccccaacaaccucgucgucgaggacgagggcugcaccaaccucuccggcuucuccuacauggagcucaaggucggcuacaucuccgccaucaaggucaacggcuucaccugcaccggcgucaucaccgaggccgagaccuacaccaacuucgucggcuacgucaccaccaccuucaagcgcaagcacuuccgccccacccccgacgccugccgcgccgccuacaacuggaagauggccggcgacccccgcuacgaggagucccuccacaaccccuaccccgacuaccacuggcuccgcaccgucaagaccaccaaggagucccucaucaucaucucccccuccgucgccgaccucgaccccuacgacaagucccuccacucccgcgucuuccccuccggcaagugccucggcaucaccaucuccuccaccuacugcuccaccaaccacgacuacaccaucuggaugcccgagaaccuccgccucggcaccuccugcgacaucuucaccaacucccgcggcaagcgcgccuccaagggcuccaagaccugcggcuucgucgacgagcgcggccucuacaagucccucaagggcgccugcaagcucaagcucugcggcguccucggccuccgccucauggacggcaccugggucgccaugcagaccuccgacgagaccaaguggugcccccccgaccagcucgucaaccuccacgacuuccgcuccgacgagaucgagcaccucgucgucgaggagcucgucaagaagcgcgaggagugccucgacgcccucgaguccaucaugaccaccaaguccgucuccuuccgccgccucucccaccuccgcaagcucguccccggcuucggcaaggccuacaccaucuucaacaagacccucauggaggccgacgcccacuacaaguccguccgcaccuggaacgagaucauccccuccaagggcugccuccgcgucggcggccgcugccacccccacgucaacggcgucuucuucaacggcaucauccucggccccgacggccacguccucauccccgagaugcaguccucccuccuccagcagcacauggagcuccucgaguccuccgucaucccccucaugcacccccucgccgaccccuccaccgucuucaaggacggcgacgaggccgaggacuucgucgagguccaccuccccgacguccacaagcagaucuccggcgucgaccucggccuccccaacuggggcaaguacguccucaucaucgccggcguccucaucgccaugauccucaccaucuuccucaugaccugcugcggccgcggcaaccgccccaaguccacccagcacucccucggcggcaucggccgcaaggucuccgccaccucccaguccggcaaggucaucuccuccugggaguccuacaaguccggcggcgagacccgccucuga

SEQ ID NO: 127420 - RNA, 1575 nt, Artificial Sequence
  derived and/or modified CDS sequence (opt2) from glycoprotein__RABV__JQ944708.1
auggucccccaggcccuccucuucgucccccuccucgucuucccccucugcuucggcaaguuccccaucuacaccauccccgacaagcucggccccuggucccccaucgacauccaccaccucuccugccccaacaaccucgucgucgaggacgagggcugcaccaaccucuccggcuucuccuacauggagcucaaggucggcuacaucuccgccaucaaggucaacggcuucaccugcaccggcgucgucaccgaggccgagaccuacaccaacuucgucggcuacgucaccaccaccuucaagcgcaagcacuuccgccccacccccgacgccugccgcgccgccuacaacuggaagaccgccggcgacccccgcuacgaggagucccuccacaaccccuaccccgacuaccacuggcuccgcaccgucaagaccaccaaggagucccucgucaucaucucccccuccgucgccgaccucgaccccuacgacaagucccuccacucccgcgucuuccccuccggcaagugcuccggcaucaccgucuccuccaccuacugcuccaccaaccacgacuacaccaucuggaugcccgagaaccuccgccucggcaccuccugcgacaucuucaucaacucccgcggcaagcgcgccuccaagggcucccagaccugcggcuucaucgacgagcgcggccucuacaagucccucaagggcgccugcaagcucaagcucugcggcguccucggccuccgccucauggacggcaccugggucgccaugcagaccucccacgagaccaaguggugcccccccgaccagcucgucaaccuccacgacuuccgcuccgacgagaucgagcaccucgucgucgaggagcucgucaagaagcgcgaggagugccucgacgcccucgaguccaucaugaccaccaaguccgucuccuuccgccgccucucccaccuccgcaagcucguccccggcuucggcaaggccuacaccaucuucaacaagacccucauggaggccgacgcccacuacaaguccguccgcaccuggaacgagaucauccccuccaagggcugccuccgcgucggcggccgcugccacccccacgucaacggcgucuucuucaacggcaucauccucggccccgagggccacguccucauccccgagaugcaguccucccuccuccagcagcacauggagcuccucgaguccuccgucaucccccucaugcacccccucgccgaccccuccaccgucuucaaggagggcgacgaggccgagaacuucgucgagguccaccuccccgacguccacaagcaggucuccggcgucgaccucggccuccccaacuggggcaaguacguccuccucuccuccggcgcccucaucgcccucaugcucaucaucuuccuccucaccugcugccgccgcgucaaccgccccgaguccacccagcacucccucggcggcaagcgccgcaaggucuccaucaccucccaguccggcaaggucaucuccuccugggaguccuacaaguccggcggcgagacccgccucuga

SEQ ID NO: 127421 - RNA, 1575 nt, Artificial Sequence
  derived and/or modified CDS sequence (opt2) from glycoprotein__RABV__JQ944709.1
auggucccccagguccuccucuucgucccccuccucggcuucucccucugcuucggcaaguuccccaucuacaccauccccgacgagcucggccccuggucccccaucgacauccaccaccucuccugccccaacaaccucgucgucgaggacgagggcugcaccaaccucuccgaguucuccuacauggagcucaaggucggcuacaucuccgccaucaaggucaacggcuucaccugcaccggcgucgucaccgaggccgagaccuacaccaacuucgucggcuacgucaccaccaccuucaagcgcaagcacuuccgccccacccccgacgccugccgcgccgccuacaacuggaagauggccggcgacccccgcuacgaggagucccuccacaaccccuaccccgacuaccacuggcuccagaccguccgcaccaccaaggagucccucaucaucaucucccccuccgucaccgaccucgaccccuacgacaagucccuccacucccgcgucuuccccggcggcaagugcuccggcaucaccgucuccuccaccuacugcuccaccaaccacgacuacaccaucuggaugcccgagaacccccgcccccgcacccccugcgacaucuucaccaacucccgcggcaagcgcgccuccaagggcaacaagaccugcggcuucgucgacgagcgcggccucuacaagucccucaagggcgccugccgccucaagcucugcggcguccucggccuccgccucauggacggcaccugggucgccaugcagaccuccgacgagaccaaguggugcccccccgaccagcucgucaaccuccacgacuuccgcuccgacgagaucgagcaccucgucgucgaggagcucgucaagaagcgcgaggagugccucgacgcccucgaguccaucaugaccaccaaguccgucuccuuccgccgccucucccaccuccgcaagcucguccccggcuucggcaaggccuacaccaucuucaacaagacccucauggaggccgacgcccacuacaaguccguccgcaccuggaacgagaucauccccuccaagggcugccucaaggucggcggccgcugccacccccacgucaacggcgucuucuucaacggcaucauccucggccccgacggccacguccucauccccgagaugcaguccucccuccuccagcagcacauggagcuccucgaguccuccgucaucccccucaugcacccccucgccgaccccuccaccgucuucaaggagggcgacgaggccgaggacuucgucgagguccaccuccccgacgucuacaagcagaucuccggcgucgaccucggccuccccaacuggggcaaguacguccucaugaccgccggcgccaugaucggccucguccucaucuucucccucaugaccuggugccgccgcgccaaccgccccgaguccaagcagcgcuccuucggcggcaccggccgcaacgucuccgucaccucccaguccggcaaggucauccccuccugggaguccuacaaguccggcggcgagauccgccucuga

SEQ ID NO: 127422 - RNA, 1575 nt, Artificial Sequence
  derived and/or modified CDS sequence (opt2) from glycoprotein__RABV__JQ950447.1
augaucccccaggccuuccucuucgucccccuccucgucgucccccucugcuucggcaaguuccccaucuacaccauccccgacaagcucggccccuggucccccaucgacauccaccaccucuccugccccaacaaccucgucgucgaggacgagggcugcaccaaccucuccggcuucuccuacauggagcucaaggucggcuacaucuccgccaucaaggucaacggcuucaccugcaccggcgucgucaccgaggccgagaccuacaccaacuucgucggcuacgucaccaccaccuucaagcgcaagcacuuccgccccacccccgacgccugccgcuccgccuacaacuggaagauggccggcgacccccgcuacgaggagucccuccacaaccccuaccccgacuaccacuggcuccgcaccgucaagaccaccaaggaguccuucgucaucaucucccccuccgucgccgaccucgaccccuacgacaagucccuccacucccgcgucuucccccgcggcaagugcuccggcaucaccgucuccuccaccuacugccccaccaaccacgacuacaccaucuggaugcccgagaacccccgccucggcaccuccugcgacaucuucaccaacucccgcggcaagcgcgccuucaagggcuccaagaccugcggcuucgucgacgagcgcggccucuacaagucccucaagggcgccugcaagcucaagcucugcggcguccucggccuccgccucauggacggcaccugggucgccauccagaccuccgacgagaccaaguggugcccccccgaccagcucgucaaccuccacgacuuccacuccgacgagaucgagcaccucgucgucgaggagcucgucaagaagcgcgaggagugccucgacgcccucgaguccaucaugaccaccaaguccgucuccuuccgccgccucucccaccuccgcaagcucguccccggcuucggcaaggccuacaccaucuucaacaagacccucauggaggccgacgcccacuacaaguccguccgcaccuggaacgagaucauccccuccaagggcugccuccgcgucggcggccgcugccacccccacgucaacggcgucuucuucaacggcaucauccucggccccgacggccacguccucauccccgagaugcaguccucccuccuccagcagcacauggagcuccucgaguccuccgucaucccccucaugcacccccucgccgaccccuccaccgucuucaagaacggcgacgaggccgaggacuucgucgagguccaccuccccgacguccacaagcaggucuccggcgucgaccucggccuccccuccuggggcaaguacguccucauguccgccggcauccucaccgcccucaugcucaugaucuuccucaugaccugcugccgccgcaccaaccgcuccgaguccauccagcacucccucggcgagaccggccgcaaggucuccgucaccucccaguccggccgcgucaucuccuccugggaguccuacaaguccggcggcgagaccaagcucuga

SEQ ID NO: 127423 - RNA, 1575 nt, Artificial Sequence
  derived and/or modified CDS sequence (opt2) from glycoprotein__RABV__JQ950449.1
augaucccccaggccuuccucuucgucccccuccucgucgucccccucugcuucggcaaguuccccaucuacaccauccccgacaagcucggccccuggucccccaucgacauccaccaccucuccugccccaacaaccucgucgucgaggacgagggcugcaccaaccucuccggcuucuccuacauggagcucaaggucggcuacaucuccgccaucaaggucaacggcuucaccugcaccggcgucgucaccgaggccgagaccuacaccaacuucgucggcuacgucaccaccaccuucaagcgcaagcacuuccgccccacccccgacgccugccgcuccgccuacaacuggaagauggccggcgacccccgcuacgaggagucccuccacaaccccuaccccgacuaccacuggcuccgcaccgucaagaccaccaaggaguccuucgucaucaucucccccuccgucgccgaccucgaccccuacgacaagucccuccacucccgcgucuucccccgcggcaagugcuccggcaugaccgucuccuccaccuacugccccaccaaccacgacuacaccaucuggaugcccgagaacccccgccucggcaccuccugcgacaucuucaccaacucccgcggcaagcgcgccuucaagggcuccaagaccugcggcuucgucgacgagcgcggccucuacaagucccucaagggcgccugcaagcucaagcucugcggcguccucggccuccgccucauggacggcaccugggucgccauccagaccuccgacgagaccaaguggugcccccccgaccagcucgucaaccuccacgacuuccacuccgacgagaucgagcaccucgucgucgaggagcucgucaagaagcgcgaggagugccucgacgcccucgaguccaucaugaccaccaaguccgucuccuuccgccgccucucccaccuccgcaagcucguccccggcuucggcaaggccuacaccaucuucaacaagacccucauggaggccgacgcccacuacaaguccguccgcaccuggaacgagaucauccccuccaagggcugccuccgcgucggcggccgcugccacccccacgucaacggcgucuucuucaacggcaucauccucggccccgacggccacguccucauccccgagaugcaguccucccuccuccagcagcacauggagcuccucgaguccuccgucaucccccucaugcacccccucgccgaccccuccaccgucuucaagaacggcgacgaggccgaggacuucgucgagguccaccuccccgacguccacaagcaggucuccggcgucgaccucggccuccccuccuggggcaaguacguccucauguccgccggcauccucaccgcccucaugcucaugaucuuccucaugaccugcugccgccgcaccaaccgcuccgaguccauccagcacucccucggcgagaccggccgcaaggucuccgucaccucccaguccggccgcgucaucuccuccugggaguccuacaaguccggcggcgagaccaagcucuga

SEQ ID NO: 127424 - RNA, 1575 nt, Artificial Sequence
  derived and/or modified CDS sequence (opt2) from glycoprotein__RABV__JX088694.1
auggucccccaggcccuccucuucgucccccuccucgccgucccccucugcuucggcaaguuccccaucuacaccauccccgacaagcucggccccuggucccccaucgacauccaccaccucuccugccccaacaaccucgucgucgaggacgagggcugcaccaaccucuccggcuucuccuacauggagcucaaggucggcuacaucuccgccaucaaggucaacggcuucaccugcaccggcgucgucaccgaggccgagaccuacaccaacuucgucggcuacgucaccaccgccuucaagcgcaagcacuuccgccccacccccgacgccugccgcuccgccuacaacuggaagauggccggcgacccccgcuacgaggagucccuccacaaccccuaccccgacuaccacuggcuccgcaccgucaagaccaccaaggaguccuucgucaucaucucccccuccgucgccgaccucgaccccuacgacaagucccuccacucccgcgucuucccccgcggcaagugcuccggcaucaccgucuccuccaccuacugcuccaccaaccacgacuacaccaucuggaugcccgagaacccccgccucggcaccuccugcgacaucuucaccaacucccgcggcaagcgcgccuccaagggcuccaagaccugcggcuucgucgacgagcgcggccucuacaagucccucaagggcgccugcaagcucaagcucugcggcguccucggccuccgccucauggacggcaccugggucgccauccagaccuccgacgagaccaaguggugcccccccgaccagcucgucaaccuccacgacuuccacuccgacgagaucgagcaccucgucgucgaggagcucgucaagaagcgcgaggagugccucgacgcccucgaguccaucaugaccaccaaguccgucuccuuccgccgccucucccaccuccgcaagcucguccccggcuucggcaaggccuacaccaucuucaacaagacccucauggaggccgacgcccacuacaaguccguccgcaccuggaacgagaucauccccuccaagggcugccuccgcgucggcggccgcugccacccccacgucaacggcgucuucuucaacggcaucauccucggccccgacggccacguccucauccccgagaugcaguccucccuccuccagcagcacauggagcuccucgaguccuccgucaucccccucaugcacccccucgccgaccccuccaccgucuucaaggacggcgacgaggccgaggacuucgucgagguccaccuccccgacguccacaagcaggucuccggcgucgaccucggccuccccuccuggggcaaguacguccucauguccgccggcauccucaccgcccucaugcucaugaucuuccucaugaccugcugccgccgcaccaaccgcgccgaguccauccagcacucccucggcgagaccggccgcaaggucuccgucaccucccagaacggccgcgucaucuccuccugggaguccuacaaguccggcggcgagaccaagcucuga

SEQ ID NO: 127425 - RNA, 1575 nt, Artificial Sequence
  derived and/or modified CDS sequence (opt2) from glycoprotein__RABV__JX473838.1
auggucccccaggcccuccucuucaucccccuccucgucuucccccucugccucggcaaguuccccaucuacaccauccccgacaagcucggccccuggucccccaucgacauccaccaccucuccugccccaacaaccucgucgucgaggacgagggcugcaccaaccucuccggcuucuccuacauggagcucaaggucggcuacaucuccgccaucaaggucaacggcuucaccugcaccggcgucgucaccgaggccgagaccuacaccaacuucgucggcuacgucaccaccaccuucaagcgcaagcacuuccgccccauccccgacgccugccgcgccgccuacaacuggaagauggccggcgacccccgcuacgaggagucccuccacaaccccuaccccgacuaccacuggcuccgcaccgucaagaccaccaaggagucccucgucaucaucucccccuccgucgccgaccucgaccccuacgacaagucccuccacucccgcaucuuccccuccggcaagugcuccggcaucaccgucuccuccaccuacugcuccaccaaccacgacuacaccaucuggaugcccgagaacccccgccucggcaccuccugcgacaucuucgccaacucccgcggcaagcgcgccuccaagggcggcaagaccugcggccucgucgacgagcgcggccucuacaagucccucaagggcgccugcaagcucaagcucugcggcguccucggccuccgccucauggacggcaccugggucgccaugcagaccuccgacgagaccaaguggugcccccccgaccagcucgucaacaugcacgacuuccgcuccgacgagaucgagcaccucgucgucgaggagcucgucaagaagcgcgaggagugccucgacgcccucgaguccaucaugaccaccaaguccgucuccuuccgccgccucucccaccuccgcaagcucguccccggcuucggcaaggccuacaccaucuucaacaagacccucauggaggccgacgcccacuacaaguccguccgcaccuggaacgagaucauccccuccaagggcugccuccgcgucggcggccgcugccacccccacgucaacggcgucuucuucaacggcaucauccucggccccgacggccacguccucauccccgagaugcaguccucccuccuccagcagcacauggagcuccucgaguccuccgucaucccccucaugcacccccucgccgaccccuccaccgucuucaaggacggcgacgaggccgaggacuucgucgagguccaccuccccgacguccacaagcaggucuccggcgucgaccucggccuccccaacuggggcaaguacguccuccucuccgccggcacccucaucgcccucaugcucaucaucuuccucaugaccugcugccgccgcgucaaccgccccgaguccacccagcgcucccucggcggcgccggccgccgcgucuccgucaccucccaguccggcaaggucaucuccuccugggaguccuacaaguccggcggcgagacccgccucuga

SEQ ID NO: 127426 - RNA, 1575 nt, Artificial Sequence; identical to SEQ ID NO: 127425
  derived and/or modified CDS sequence (opt2) from glycoprotein__RABV__JX473839.1

SEQ ID NO: 127427 - RNA, 1575 nt, Artificial Sequence
  derived and/or modified CDS sequence (opt2) from glycoprotein__RABV__JX473840.1
auggucccccgcgcccuccucuucaucccccuccucgucuucucccucugcuucggcaaguuccccaucuacaccauccccgacaagcucggccccuggaaccccaucgacauccaccaccucuccugccccaacaaccucgucgucgaggacgagggcugcaccaaccucuccggcuucuccuacauggagcucaaggucggcuacaucuccgccaucaaggucaacggcuucaccugcaccggcgucgucaccgaggccgagaccuacaccaacuucgucggcuacgucaccaccaccuucaagcgcaagcacuuccgccccauccccgacaccugccgcgccgccuacaacuggaagauggccggcgacccccgcuacgaggagucccuccacaaccccuaccccgacuaccacuggcuccgcaccgucaagaccaccaaggagucccucgucaucaucucccccuccgucgccgaccucgaccccuacgacaagucccuccacucccgcaucuuccccuccggcaagugcuccggcaucaccgucuccuccaccuacugcuccaccucccacgacuacaccaucuggaugcccgagaacccccgccucggcaccuccugcgacaucuucgccaacucccgcggcaagcgcgccuccaagggcggcaagaccugcggccucgucgacgagcgcggccucuacaagucccucaagggcgccugcaagcucaagcucugcggcguccucggccuccgccucauggacggcaccugggucgccaugcagaccuccgacgagaccaaguggugcccccccgaccagcucgucaacaugcacgacuuccgcuccgacgagaucgagcaccucgucgucgaggagcucgucaagaagcgcgaggagugccucgacgcccucgaguccaucaugaccaccaaguccgucuccuuccgccgccucucccaccuccgcaagcucguccccggcuucggcaaggccuacaccaucuucaacaagacccucauggaggccgacgcccacuacaaguccguccgcaccuggaacgagaucauccccuccaagggcugccuccgcgucggcggccgcugccacccccacgucaacggcgucuucuucaacggcaucauccucggccccgacggccacguccucauccccgagaugcaguccucccuccuccagcagcacauggagcuccucgaguccuccgucaucccccucaugcacccccucgccgaccccuccaccgucuucaaggacggcgacgaggccgaggacuucgucgagguccaccuccccgacguccacaagcaggucuccggcgucgaccucggccuccccaacuggggcaaguacguccuccucuccgccggcacccucaucgcccucaugcucaugaucuuccucaugaccugcugccgccgcgucaaccgccccgaguccacccagcgcucccucggcggcgccggccgccgcgucuccgucaccucccaguccggcaaggucaucuccuccugggaguccuacaaguccggcggcgagacccgccucuga

SEQ ID NO: 127428 - RNA, 1575 nt, Artificial Sequence
  derived and/or modified CDS sequence (opt2) from glycoprotein__RABV__JX473841.1
auggucccccaggcccuccucuucaucccccuccucgucuucucccucugcuucggcaaguuccccaucuacaccauccccgacaagcucggccccuggaaccccaucgacauccaccaccucuccugccccaacaaccucgucgucgaggacgagggcugcaccaaccucuccggcuucuccuacauggagcucaaggucggcuacaucuccgccaucaaggucaacggcuucaccugcaccggcgucgucaccgaggccgagaccuacaccaacuucgucggcuacgucaccaccaccuucaagcgcaagcacuuccgccccauccccgacaccugccgcgccgccuacaacuggaagauggccggcgacccccgcuacgaggagucccuccacaaccccuaccccgacuaccacuggcuccgcaccgucaagaccaccaaggagucccucgucaucaucucccccuccgucgccgaccucgaccccuacgacaagucccuccacucccgcaucuuccccuccggcaagugcuccggcaucaccgucuccuccaccuacugcuccaccucccacgacuacaccaucuggaugcccgagaacccccgccucggcaccuccugcgacaucuucgccaacucccgcggcaagcgcgccuccaagggcggcaagaccugcggccucgucgacgagcgcggccucuacaagucccucaagggcgccugcaagcucaagcucugcggcguccucggccuccgccucauggacggcaccugggucgccaugcagaccuccgacgagaccaaguggugcccccccgaccagcucgucaacaugcacgacuuccgcuccgacgagaucgagcaccucgucgucgaggagcucgucaagaagcgcgaggagugccucgacgcccucgaguccaucaugaccaccaaguccgucuccuuccgccgccucucccaccuccgcaagcucguccccggcuucggcaaggccuacaccaucuucaacaagacccucauggaggccgacgcccacuacaaguccguccgcaccuggaacgagaucauccccuccaagggcugccuccgcgucggcggccgcugccacccccacgucaacggcgucuucuucaacggcaucauccucggccccgacggccacguccucauccccgagaugcaguccucccuccuccagcagcacauggagcuccucgaguccuccgucaucccccucaugcacccccucgccgaccccuccaccgucuucaaggacggcgacgaggccgaggacuucgucgagguccaccuccccgacguccacaagcaggucuccggcgucgaccucggccuccccaacuggggcaaguacguccuccucuccgccggcacccucaucgcccucaugcucaugaucuuccucaugaccugcugccgccgcgucaaccgccccgaguccacccagcgcucccucggcggcgccggccgccgcgucuccgucaccucccaguccggcaaggucaucuccuccugggaguccuacaaguccggcggcgagacccgccucuga

SEQ ID NO: 127429 - RNA, 1575 nt, Artificial Sequence
  derived and/or modified CDS sequence (opt2) from glycoprotein__RABV__JX871837.1
augaucccccaggcccuccucuucgucccccuccucauccccucccucugccucggcaaguuccccaucuacaccauccccgacaagcucggccccuggucccccaucgacauccaccaccucuccugccccaacaaccucgucgucgaggacgagggcugcaccucccucuccggcuucuccuacauggagcucaaggucggcuacaucuccgccaucaaggucaacggcuucaccugcaccggcgucgucaccgaggccgagaccuacaccaacuucgucggcuacgucaccaccaccuucaagcgcaagcacuuccgccccaugcccgacgccugccgcgccgcccacgacuggaagaucgccggcgacccccgcuacgaggacucccuccagaaccccuaccccgacuaccacuggcuccgcaccgucaagaccaccaaggagucccucgucaucaucucccccuccgucgccgagcucgaccccuacgacaagucccuccacucccgcgucuuccccuccggcaagugccucggcaucaccgucuccuccaccuacugcuccaccaaccacgacuacaccaucuggaugcccgucgaggcccgccucggcaccuccugcgacaucuucaccaacucccgcggcaagaaggccuccaagggcggccgcaccugcggcuucgucgacgagcgcggccucuacaagucccucaagggcgccugcaagcucaagcucugcggcguccccggccuccgccucauggacggcaccugggucuccauccagaccuccgacgacaucaaguggugcccccccgaccagcucgucaaccuccacgacuuccacuccgacgagaucgagcaccucgucgucgaggagcucaucaagaagcgcgagggcugccucgacgcccucgaguccaucaugaccaccaaguccgucuccuuccgccgccucucccaccuccgcaagcucguccccggcuucggcaaggccuacaccaucuucaacaacacccucauggaggccgacgcccacuacaaguccguccgcaccuggaacgaggucauccccuccaagggcugccucaaggucggcggccgcugccacccccccgucaacggcgucuucuucaacggcaucauccucggccccgacggcaacguccucauccccgagaugcaguccucccuccuccagcagcacauggagcuccucgaguccuccgucaucccccucaugcacccccucgccgaccccuccaccgucuucaaggacggcgacgaggccgaggacuucgucgagguccaccuccccgacguccacaagcaggucuccgacgucgaccucggccuccccuccuggggcaaguaccuccucauguccgccggcguccucgccacccucauccucgccaucuuccucaucaccugcugccgccgcgccaaccgcaccgaguccacccagcgcggccaccgcgaguccggcggcaaggucuccgucgccccccagaacggcaagaucaucuccuccugggagcucuacaaguccgaguccgagaccggcauguga

SEQ ID NO: 127430 - RNA, 1575 nt, Artificial Sequence; identical to SEQ ID NO: 127285
  derived and/or modified CDS sequence (opt2) from glycoprotein__RABV__JX871838.1

SEQ ID NO: 127431 - RNA, 1575 nt, Artificial Sequence; identical to SEQ ID NO: 127285
  derived and/or modified CDS sequence (opt2) from glycoprotein__RABV__JX871839.1

SEQ ID NO: 127432 - RNA, 1575 nt, Artificial Sequence
  derived and/or modified CDS sequence (opt2) from glycoprotein__RABV__JX871840.1
augaucucccagacccuccucuucgucccccuccucaucuccucccucugcuucggcgaguuccccaucuacaccauccccgagaagcucggccccuggucccccaucgacauccaccaccucuccugccccaacaaccucgucgucgaggacgagggcugcaacucccucuccggcuucuccuacauggagcucaaggucggcuacaucuccuccaucaaggucaacggcuucaccugcaccggcgucgucaccgaggccgagaccuacaccaacuucgucggcuacgucaccaccaccuucaagcgcaagcacuuccgccccaugcccgacgccugccgcgccgccuacaacuggaagauguccggcgacccccgcuacgaggagucccuccacaaccccuaccccgacuaccacuggcuccgcaccgucaagaccaccaaggagucccucgucaucaucucccccuccgucgccgaccucgaccccuacgacaagucccuccacucccgcgucuucuccggcggcaagugccucggcaucaccaucuccuccaccuacugcuccaccaaccacgacuacacccucuggaugcccgaggaggcccgccucggcaccuccugcgacaucuucaucaacuccaagggcaagcgcgccuccaagggcggccgcaccugcggcuucgucgacgagcgcggccucuacaagucccucaagggcgccugcaagcucaagcucugcggcguccccggccuccgccucauggacggcaccugggucuccauccagaccuccgacgagaccaaguggugcccccccgaccagcucgucaacauccacgacuuccgcuccgacgagaucgagcaccucgucgucgaggagcucgucaagaagcgcgaggagugccucgacgcccucgacuccaucaugaccaccaaguccgucuccuuccgccgccucucccaccuccgcaagcucguccccggcuucggcaaggccuacaccaucuucaacaagacccucauggaggccgacgcccacuacaaguccguccgcaccuggaacgaggucauccccuccaagggcugccucuccgucggcggccgcugccacccccacgucgacggcgucuucuucaacggcaucauccucggccccgacggcuccguccucauccccgagaugcaguccucccuccuccagcagcacauggagcuccucgaguccuccgucaucccccucaugcacccccucgccaaccccuccaccgucuucaaggacggcgacgaggccgaggacuucgucgagguccaccuccccgacguccaggagcaggucuccggcgucgaccucggccuccccaacuggggcaaguacaugcucauguccgccggcgcccucgccauccuccuccucaccaucuuccucaugaccugcugccgccgcgccaaccgcaccaaguccauccgccagggccccgaggagucccgccgcaaggucuccguccccccccaguccggcaaggucaucuccuccugggaguccuucaaguccggcggcgagaccggccucuga

SEQ ID NO: 127433 - RNA, 1575 nt, Artificial Sequence
  derived and/or modified CDS sequence (opt2) from glycoprotein__RABV__JX871841.1
augaucccccaggcccuccucuucgucccccuccucauccccucccucugccucggcgaguuccccaucuacaccauccccgacaagcucggccccuggucccccaucgacauccaccaccucuccugccccaacaaccucgucgccgagaacgacggcugcaccucccucuccggcuucuccuacauggagcucaaggucggcuacaucuccgccaucaaggucaacggcuucaccugcaccggcgucgucaccgaggccgagaccuacaccaacuucgucggcuacgucaccaccaccuucaagcgcaagcacuuccgccccacccccgacgccugccgcgccgcccacgacuggaagauggccggcgacccccgcuacgaggccucccuccagaaccccuaccccgacuaccacuggcuccgcaccgucaagaccaccaaggagucccucgucaucaucucccccuccgucgccgaccucgaccccuacgacaagucccuccacucccgcgucuuccccuccggcaagugccucggcaucaccgucuccuccaccuacugcuccaccaaccacgacuacaccaucuggaugcccgucgagccccgccucggcaccuccugcgacaucuucaccaacucccgcggcaagcgcgccuccaagggcggccgcgucugcggcuucgucgacgagcgcggccucuacaagucccucaagggcgccugccgccucaagcucugcggcguccccggcauccgccuccucgacggcaccugggucuccauccagaccuccgaggacaucaaguggugcccccccgaccgccucgucaaccuccacgacuuccacuccgacgagaucgagcaccucgucgucgccgagcucaucaagcgccgcgagaacugccucgacgcccucgaguccaucaugaccaccaaguccgucuccuuccgccgccucucccaccuccgcaagcucguccccggcuucggcaaggccuacaccaucuucaacaagacccucauggaggccgacgcccacuacaaguccgucaagaccuggaacgaggucauccccuccaagggcugccucgaggucggcggccgcugccacccccacgucaacggcgucuucuucaacggcaucauccucggccccgacggcaacguccucauccccgagaugcaguccucccuccuccagcagcacauggagcuccucgaguccuccgucaucccccucaugcacccccucgccgaccccuccaccgucuucaaggagggcgacgaggccgaggacuucgucgagguccaccuccccgacguccacaagcaggucuccgacgucgaccucggccuccccuccuggggcaaguaccuccucaucuccgccggcgcccucgccauccucauccucgccaucguccucaucaucugcugccgcaaggucaacaagaccggcuccacccagcgcggccaccgcgaguccggcggcaagauguccgucgucccccagaacggcaagaucaucuccuccugggagcucuacaaguccgaguccgagaccggccucuga

SEQ ID NO: 127434 - RNA, 1575 nt, Artificial Sequence
  derived and/or modified CDS sequence (opt2) from glycoprotein__RABV__JX871842.1
augaucccccaggcccuccucuucguccccuuccucuuccccucccucugccucggcaaguuccccaucuacaccauccccgagaagcucggccccuggucccccaucgacauccaccaccucuccugccccaacaaccucgucgucgaggacgagggcugcgacucccucuccggcuucuccuacauggagcucaaggucggcuacaucuccgccaucaaggucaacggcuucaccugcaccggcgucgucaccgaggccgagaccuacaccaacuucgucggcuacgucaccaccaccuucaagcgcaagcacuuccgccccaugcccgacgccugccgcgccgccuacaacuggaagaccgccggcgacccccgcuacgaggagucccuccacaaccccuaccccgacuaccacuggcuccgcaccgucaagaccaccaaggagucccucaucaucaucucccccuccgucgccgaccucgaccccuacgacaagucccuccacucccgcgucuuccccggcggcaagugccucggcaucaccgucuccuccaccuacugcuccaccaaccacgacuacaccaucuggaugcccgaggaggcccgccucggcaccuccugcgacaucuucaccaacuccaagggcaagcgcgccuccaagggcggccgcaccugcggcuucgucgacgagcgcggccucuacaagucccucaagggcgccugcaagcucaagcucugcggcguccccggccuccgccucauggacggcaccugggucgccauccagacccccggcgagaccaaguggugcucccccgaccagcucgucaaccuccacgacuuccgcuccgacgagaucgagcaccucgucgucgaggagcucaucaagaagcgcgaggagugccucgacgcccucgacuccaucaugaccaccaagucccucuccuucggccgccucuccaaccuccgcaagcucguccccggcuucggcaaggccuacaccaucuucaacaagacccucauggaggccgacgcccacuacaaguccuuccgcaccugggacgagaucauccccuccaagggcugccuccgcgucggcggccgcugccacccccacgucaacggcgucuucuucaacggcaucauccucggccccgacggccacguccucauccccgagaugcaguccucccuccuccagcagcacauggagcuccucgaguccuccgucaucccccucauccacccccucgccgaccccuccaccgucuucaaggacggcgacgaggccgaggacuucgucgagguccaccuccccgacguccacaagcaggucuccggcgucgaccucggccuccccaacuggggcaaguacguccucaugggcgccggcguccucgccaccgucauccucaccaucuuccuccucaccugcugccgccgcgucaaccgcaccaagcccaagcagcagucccucgaggaguccggccgcaaggucuccgucaccccccagaacggcaaggucauguccuccugggaguacuacaaguccgagggccgcaccucccucuga

SEQ ID NO: 127435 - RNA, 1575 nt, Artificial Sequence
  derived and/or modified CDS sequence (opt2) from glycoprotein__RABV__JX871844.1
augaucccccaggcccuccucuucgucccccuccucauccccucccucugccucggcaaguuccccaucuacaccauccccgacaagcucggccccuggucccccaucgacauccaccaccucuccugccccaacaaccucgucgucgaggacgagggcugcaccucccucuccggcuucuccuacauggagcucaaggucggcuacaucuccgccaucaaggucaacggcuucaccugcaccggcgucgucaccgaggccgagaccuacaccaacuucgucggcuacgucaccaccaccuucaagcgcaagcacuuccgccccaugcccgacgccugccgcgccgcccacgacuggaagaucgccggcgacccccgcuacgaggacucccuccagaaccccuaccccgacuaccacuggcuccgcaccgucaagaccaccaaggagucccucgucaucaucucccccuccgucgccgaccucgaccccuacgacaagucccuccacucccgcgucuuccccuccggcaagugccucggcaucaccgucuccuccaccuacugcuccaccaaccacgacuacaccaucuggaugcccgucgaggcccgccucggcaccuccugcgacaucuucaccaacucccgcggcaagaaggccuccaagggcggccgcaccugcggcuucgucgacgagcgcggccucuacaagucccucaagggcgccugcaagcucaagcucugcggcguccccggccuccgccucauggacggcaccugggucuccauccagaccuccgacgacaucaaguggugcccccccgaccagcucgucaaccuccacgacuuccacuccgacgagaucgagcaccucgucgucgaggagcucaucaagaagcgcgagggcugccucgacgcccucgaguccaucaugaccaccaaguccgucuccuuccgccgccucucccaccuccgcaagcucguccccggcuucggcaaggccuacaccaucuucaacaacacccucauggaggccgacgcccacuacaaguccguccgcaccuggaacgaggucauccccuccaagggcugccucaaggucggcggccgcugccacccccccgucaacggcgucuucuucaacggcaucauccucggccccgacggcaacguccucauccccgagaugcaguccucccuccuccagcagcacauggagcuccucgaguccuccgucaucccccucaugcaccccuccgccgaccccuccaccgucuucaaggacggcgacgaggccgaggacuucgucgagguccaccuccccgacguccacaagcaggucuccgacgucgaccucggccuccccuccuggggcaaguaccuccucauguccgccggcgcccucgccacccucauccucgccaucuuccucaucaccugcugccgccgcgccaaccgcaccgaguccacccagcgcggccaccgcgaguccggcggcaaggucuccgucgccccccagaacggcaagaucaucuccuccugggagcucuacaaguccgaguccgagaccggcauguga

SEQ ID NO: 127436 - RNA, 1575 nt, Artificial Sequence; identical to SEQ ID NO: 127315
  derived and/or modified CDS sequence (opt2) from glycoprotein__RABV__JX871846.1

SEQ ID NO: 127437 - RNA, 1575 nt, Artificial Sequence
  derived and/or modified CDS sequence (opt2) from glycoprotein__RABV__JX871847.1
augaucccccaggcccuccucuucgucccccuccucauccccucccucugccucggcgaguuccccaucuacaccauccccgacaagcucggccccuggacccccaucgacauccaccaccucuccugccccaacaaccucgucgccgagaacgacggcugcaccucccucuccggcuucuccuacauggagcucaaggucggcuacaucuccgccaucaaggucaacggcuucaccugcaccggcgucgucaccgaggccgagaccuacaccaacuuccucggcuacgucaccaccaccuucaagcgcaagcacuuccgccccaugcccgacgccugccgcgccgcccacgacuggaagauggccggcgacccccgcuacgaggacucccuccagaaccccuaccccgacuaccacuggcuccgcaccgucaagaccaccaaggagucccucgucaucaucucccccuccgucgccgaccucgaccccuacgacaagucccuccacucccgcgucuuccccuccggcaagugccucggcaucaccgucuccuccaccuacugcuccaccaaccacgacuacaccaucuggaugcccgucgagccccgccucggcaccuccugcgacaucuucaccaacucccgcggcaagcgcgccuccaagggcggccgcgucugcggcuucgucgacgagcgcggccucuacaagucccucaagggcgccugcaagcucaagcucugcggcguccccggcauccgccucauggacggcaccugggucuccauccagaccuccgaggacaucaaguggugcccccccgaccgccucgucaaccuccacgacuuccacuccgacgagcucgagcaccucgucgucgaggagcucaucaagcgccgcgagaacugccucgacgcccucgaguccaucaugaccaccaaguccgucuccuuccgccgccucucccaccuccgcaagcucguccccggcuucggcaaggccuacaccaucuucaacaagacccucauggaggccgacgcccacuacaaguccgucaagaccuggaacgaggucauccccuccaagggcugccucgaggucggcggcaagugccacccccccgucaacggcgucuucuucaacggcaucauccucggccccgacggcaacguccucauccccgagaugcaguccucccuccuccagcagcacauggagcuccucgaguccuccgucaucccccucaugcacccccucgccgaccccuccaccgucuucaaggagggcgacgaggccgaggacuucgucgagguccaccuccccgacguccacaagcaggucuccgacgucgaccucggccuccccuccuggggcaaguaccuccucauguccgccggcgcccucgccauccucauccucgccaucguccucaucaucugcugcggccgcgucaacaagaccggcuccacccagcgcggccaccgcgagucccgcggcaagauguccgucgccccccagaacggcaagaucaucuccuccugggagcucuacaaguccgaguccgagaccggccucuga

SEQ ID NO: 127438 - RNA, 1575 nt, Artificial Sequence
  derived and/or modified CDS sequence (opt2) from glycoprotein__RABV__JX871848.1
augaucccccaggcccuccucuucgucccccuccucaucuccucccucugccucggcgaguuccccaucuacaccauccccgagaagcucggccccuggucccccaucgacauccaccaccucuccugccccaacaaccucgucgucgaggacgagggcugcaacucccucuccggcuucuccuacauggagcucaaggucggcuacaucuccuccaucaaggucaacggcuucaccugcaccggcgucgucaccgaggccgagaccuacaccaacuucgucggcuacgucaccaccaccuucaagcgcaagcacuuccgccccaugcccgacgccugccgcgccgccuacaacuggaagauguccggcgacccccgcuacgaggagucccuccacaaccccuaccccgacuaccacuggcuccgcaccgucaagaccaccaaggagucccucgucaucaucucccccuccgucgccgaccucgaccccuacgacaagucccuccacucccgcgucuucuccggcggcaagugccucggcaucaccgucuccuccaccuacugcuccaccaaccacgacuacaccaucuggaugcccgaggaggcccgccucggcaccuccugcgacaucuucaccaacuccaagggcaagcgcgccuccaagggcggcaagaccugcggcuucgucgacgagcgcggccucuacaagucccucaagggcgccugcaagcucaagcucugcggcguccccggccuccgccucauggacggcaccugggucuccauccagaccuccgacgagaccaaguggugcccccccgaccagcucgucaacauccacgacuuccgcuccgacgagaucgagcaccucgucgucgaggagcucgucaagaagcgcgaggagugccucgacgcccucgaguccaucaugaccaccaaguccgucuccuuccgccgccucucccaccuccgcaagcucguccccggcuucggcaaggccuacaccaucuucaacaagacccucauggaggccgacgcccacuacaaguccguccgcaccuggaacgaggucauccccuccaagggcugccucuccgucggcggccgcugccacccccacgucgacggcgucuucuucaacggcaucauccucggccccgacggcuccguccucauccccgagaugcaguccucccuccuccagcagcacauggagcuccucgaguccuccgucaucccccucaugcacccccucgccaaccccuccaccgucuucaaggacggcgacgaggccgaggacuucgucgagguccaccuccccgacguccaggagcaggucuccggcgucgaccucggccuccccaacuggggcaaguacguccucauguccgccggcgcccucgccguccuccuccucaccaucuuccucaugaccugccgccgccgcgccaaccgcaccaacuccauccagcagggccccggcgaguccggccgcaagaucuccguccccccccagaacggcaaggucaucuccuccugggaguccuucaaguccggcggcgagaccggccucuga

SEQ ID NO: 127439 - RNA, 1575 nt, Artificial Sequence
  derived and/or modified CDS sequence (opt2) from glycoprotein__RABV__JX871849.1
augaucccccaggcccuccucuccgucccccuccucaucuccucccucugcuucggcaaguuccccaucuacaccauccccgagaagcucggccccuggucccccaucgacauccaccaccucuccugccccaacaaccucgucgucgaggacgagggcugcaacucccucuccggcuucuccuacauggagcucaaggucggcuacaucuccgccaucaaggucaacggcuucaccugcaccggcgucgucaccgaggccgagaccuacaccaacuucgucggcuacgucaccaccaccuucaagcgcaagcacuuccgccccauguccgacgccugccgcgccgccuacaacuggaagaccgccggcgacccccgcuacgaggagucccuccacaaccccuaccccgacuaccacuggcuccgcaccgucaagaccaccaaggagucccucaucaucaucucccccuccgucgccgaccucgaccccuacgacaagucccuccacucccgcaucuuccccggcggcaagugccucggcaucaccaucuccuccaccuacugcuccaccaaccacgacuacaccaucuggaugcccgaggaggcccgccucggcaccuccugcgacaucuucaccaacuccaagggcaagcgcgccuccaagggcggccgcaccugcggcuucgucgacgagcgcggccucuacaagucccucaagggcgccugcaagcucaagcucugcggcguccccggccuccgccucauggacggcaccugggucgccauccagacccccaacgagaccaaguggugcucccccgaccagcucgucaacguccacgacuuccgcuccgacgagaucgagcaccucgucgucgaggagcucauccgcaagcgcgaggagugccucgacgcccucgaguccaucaugaccaccaaguccgucuccuuccgccgccucuccaaccuccgcaagcucguccccggcuucggcaaggccuacaccaucuucaacaagacccucauggaggccgacgcccacuacaaguccguccgcaccuggaacgagaucauccccucccgcggcugccucaaggucggcggccgcugccacccccacgucaacggcgucuucuucaacggcaucauccucggccccgacggccacauccucauccccgagaugcaguccucccuccuccagcagcacauggagcuccucgaguccuccgucaucccccucauccacccccucgccgaccccuccaccgucuucaaggacggcgacgaggccgaggacuucgucgagguccaccuccccgacguccaccagcaggucuccggcgucgaccucggccuccccgacuggggcaaguacguccucauguccgccggcgcccucgccaccgucaugcucaccaucuuccucaucaccugcugccgccgcgucaagcgcaccgaguccauccagcagggccucggcgaguccggccgcaaggucuccgucaccccccagaacggcaaggucauguccuccugggaguacuacaaguccggcggcggcacccgccucuga

SEQ ID NO: 127440 - RNA, 1575 nt, Artificial Sequence
  derived and/or modified CDS sequence (opt2) from glycoprotein__RABV__JX871853.1
augaucucccaggcccuccucuucgucccccuccucauccccucccucugccucggcaaguuccccaucuacaccauccccgacaagcucggccccuggucccccaucgacauccaccaccucuccugccccaacaaccucgucgucgaggacgagggcugcaccucccucuccggcuucuccuacauggagcucaaggucggcuacaucuccgccaucaaggucaacggcuucaccugcaccggcgucgucaccgaggccgagaccuacaccaacuucgucggcuacgucaccaccaccuucaagcgcaagcacuuccgccccaugcccgacgccugccgcgccgcccacgacuggaagaucgccggcgacccccgcuacgaggacucccuccagacccccuaccccgacuaccacuggcuccgcaccgucaagaccaccaaggagucccucgucaucaucucccccuccgucgccgaccucgaccccuacgacaagucccuccacucccgcgucuuccccuccggcaagugccucggcaucaccgucuccuccaccuacugcuccaccaaccacgacuacaccaucuggaugcccgucgaggcccgccucggcaccuccugcgacaucuucaccaacucccgcggcaagaaggccuccaagggcggccgcaccugcggcuucgucgacgagcgcggccucuacaagucccucaagggcgccugcaagcucaagcucugcggcguccccggccuccgccucauggacggcaccugggucuccauccagaccuccgacgacaucaaguggugcccccccgaccagcucgucaaccuccacgacuuccacuccgacgagaucgagcaccucgucgucgaggagcucaucaagaagcgcgagggcugccucgacgcccucgaguccaucaugaccaccaaguccgucuccuuccgccgccucucccaccuccgcaagcucguccccggcuucggcaaggccuacaccaucuucaacaacacccucauggaggccgacgcccacuacaaguccguccgcaccuggaacgaggucauccccuccaagggcugccucaaggucggcggccgcugccacccccccgucaacggcgucuucuucaacggcaucauccucggccccgacggcaacguccucauccccgagaugcaguccucccuccuccagcagcacauggagcuccucgaguccuccgucaucccccucaugcacccccucgccgaccccuccaccgucuucaaggacggcgacgaggccgaggacuucgucgagguccaccuccccgacguccacaagcaggucuccgacgucgaccucggccuccccuccuggggcaaguaccuccucauguccgccggcgcccucgccacccucauccucgccaucuuccucaucaccugcugccgccgcgccaaccgcaccgaguccacccagcgcggccaccgcgaguccggcggcaaggucuccgucgccccccagaacggcaagaucaucuccuccugggagcucuacaaguccgaguccgagaccggcauguga

SEQ ID NO: 127441 - RNA, 1575 nt, Artificial Sequence
  derived and/or modified CDS sequence (opt2) from glycoprotein__RABV__JX871854.1
augaucccccaggcccuccucuucguccccuuccucuuccccucccucugccucggcaaguuccccaucuacaccauccccgagaagcucggccccuggucccccaucgacauccaccaccucuccugccccaacaaccucgucgucgaggacgagggcugcgacucccucuccggcuucuccuacauggagcucaaggucggcuacaucuccgccaucaaggucaacggcuucaccugcaccggcgucgucaccgaggccgagaccuacaccaacuucgucggcuacgucaccaccaccuucaagcgcaagcacuuccgccccaugcccgacgccugccgcgccgccuacaacuggaagaccgccggcgacccccgcuacgaggagucccuccacaaccccuaccccgacuaccacuggcuccgcaccgucaagaccaccaaggagucccucaucaucaucucccccuccgucgccgaccucgaccccuacgacaagucccuccacucccgcgucuuccccggcggcaagugccucggcaucaccaucuccuccaccuacugcuccaccaaccacgacuacaccaucuggaugcccgaggaggcccgccucggcaccuccugcgacaucuucaccaacuccaagggcaagcgcgccuccaagggcggccgcaccugcggcuucgucgacgagcgcggccucuacaagucccucaagggcgccugcaagcucaagcucugcggcguccccggccuccgccucauggacggcaccugggucgccauccagacccccggcgagaccaaguggugcucccccgaccagcucgucaaccuccacgacuuccgcuccgacgagaucgagcaccucgucgucgaggagcucaucaagaagcgcgaggagugccucgacgcccucgaguccaucaugaccaccaaguccgucuccuuccgccgccucuccaaccuccgcaagcucguccccggcuucggcaaggccuacaccaucuucaacaagacccucauggaggccgacgcccacuacaaguccauccgcaccugggacgagaucauccccuccaagggcugccuccgcgucggcggccgcugccacccccacgucaacggcgucuucuucaacggcaucauccucggccccgacggccacguccucauccccgagaugcaguccucccuccuccagcagcacauggagcuccucgaguccuccgucaucccccucauccacccccucgccgaccccuccaccgucuucaaggacggcgacgaggccgaggacuucgucgagguccaccuccccgacguccacgagcaggucuccggcgucgaccucggccuccccaacuggggcaaguacguccucaucuccgccggcguccucgccaccgucauccucaccaucuuccuccucaccugcugccgccgcgucaaccgcaccaagcccaagcagcagucccucggcgaguccggccgcaaggucuccgucaccccccagaacggcaaggucauguccuccugggaguacuacaaguccgagggccgcaccucccucuga

SEQ ID NO: 127442 - RNA, 1575 nt, Artificial Sequence; identical to SEQ ID NO: 127285
  derived and/or modified CDS sequence (opt2) from glycoprotein__RABV__JX871855.1

SEQ ID NO: 127443 - RNA, 1575 nt, Artificial Sequence
  derived and/or modified CDS sequence (opt2) from glycoprotein__RABV__JX871856.1
augaucccccaggcccuccucuucguccccuuccucuuccccucccucugccucggcaaguuccccaucuacaccauccccgagaagcucggccccuggucccccaucgacauccaccaccucuccugccccaacaaccucgucgucgaggacgagggcugcgacucccucuccggcuucuccuacauggagcucaaggucggcuacaucuccgccaucaaggucaacggcuucaccugcaccggcgucgucaccgaggccgagaccuacaccaacuucgucggcuacgucaccaccaccuucaagcgcaagcacuuccgccccaugcccgacgccugccgcgccgccuacaacuggaagaccgccggcgacccccgcuacgaggagucccuccacaaccccuaccccgacuaccacuggcuccgcaccgucaagaccaccaaggagucccucaucaucaucucccccuccgucgccgaccucgaccccuacgacaagucccuccacucccgcgucuuccccggcggcaagugccucggcaucaccgucuccuccaccuacugcuccaccaaccacgacuacaccaucuggaugcccgaggaggcccgccucggcaccuccugcgacaucuucaccaacuccaagggcaagcgcgccuccaagggcggccgcaccugcggcuucgucgacgagcgcggccucuacaagucccucaagggcgccugcaagcucaagcucugcggcguccccggccuccgccucauggacggcaccugggucgccauccagacccccggcgagaccaaguggugcucccccgaccagcucgucaaccuccacgacuuccgcuccgacgagaucgagcaccucgucgucgaggagcucaucaagaagcgcgaggagugccucgacgcccucgaguccaucaugaccaccaaguccgucuccuuccgccgccucuccaaccuccgcaagcucguccccggcuucggcaaggccuacaccaucuucaacaagacccucauggaggccgacgcccacuacaaguccguccgcaccugggacgagaucauccccuccaagggcugccuccgcgucggcggccgcugccacccccacgucaacggcgucuucuucaacggcaucauccucggccccgacggccacguccucauccccgagaugcaguccucccuccuccagcagcacauggagcuccucgaguccuccgucaucccccucauccacccccucgccgaccccuccaccgucuucaaggacggcgacgaggccgaggacuucgucgagguccaccuccccgacguccacaagcaggucuccggcgucgaccucggccuccccaacuggggcaaguacguccucauguccgccggcguccucgccaccgucauccucaccaucuuccuccucaccugcugccgccgcgucaaccgcaccaagcccaagcagcagucccucggcgaguccggccgcaaggucuccgucaccccccagaacggcaaggucauguccuccugggaguacuacaaguccgagggccgcaccucccucuga

SEQ ID NO: 127444 - RNA, 1575 nt, Artificial Sequence; identical to SEQ ID NO: 127285
  derived and/or modified CDS sequence (opt2) from glycoprotein__RABV__JX871857.1

SEQ ID NO: 127445 - RNA, 1575 nt, Artificial Sequence
  derived and/or modified CDS sequence (opt2) from glycoprotein__RABV__JX871858.1
augaucccccaggcccuccucuucgucccccuccucauccccucccucugccucggcaaguuccccaucuacaccauccccgacaagcucggccccuggucccccaucgacauccaccaccucuccugccccaacaaccucgucgucgaggacgagggcugcaccucccucuccggcuucuccuacauggagcucaaggucggcuacaucuccgccaucaaggucaacggcuucaccugcaccggcgucgucaccgaggccgagaccuacaccaacuucgucggcuacgucaccaccaccuucaagcgcaagcacuuccgccccaugcccgacgccugccgcgccgcccacgacuggaagaucgccggcgacccccgcuacgaggacucccuccagaaccccuaccccgacuaccacuggcuccgcaccgucaagaccaccaaggagucccucgucaucaucucccccuccgucgccgagcucgaccccuacgacaagucccuccacucccgcgucuuccccggcggcaagugccucggcaucaccgucuccuccaccuacugcuccaccaaccacgacuacaccaucuggaugcccgucgaggcccgccucggcaccuccugcgacaucuucaccaacucccgcggcaagaaggccuccaagggcggccgcaccugcggcuucgucgacgagcgcggccucuacaagucccucaagggcgccugcaagcucaagcucugcggcguccccggccuccgccucauggacggcaccugggucuccauccagaccuccgacgacaucaaguggugcccccccgaccagcucgucaaccuccacgacuuccacuccgacgagaucgagcaccucgucgucgaggagcucaucaagaagcgcgagggcugccucgacgcccucgaguccaucaugaccaccaaguccgucuccuuccgccgccucucccaccuccgcaagcucguccccggcuucggcaaggccuacaccaucuucaacaacacccucauggaggccgacgcccacuacaaguccguccgcaccuggaacgaggucauccccuccaagggcugccucaaggucggcggccgcugccacccccccgucaacggcgucuucuucaacggcaucauccucggccccgacggcaacguccucauccccgagaugcaguccucccuccuccagcagcacauggagcuccucgaguccuccgucaucccccucaugcacccccucgccgaccccuccaccgucuucaaggacggcgacgaggccgaggacuucgucgagguccaccuccccgacguccacaagcaggucuccgacgucgaccucggccuccccuccuggggcaaguaccuccucauguccgccggcgcccucgccacccucauccucgccaucuuccucaucaccugcugccgccgcgccaaccgcaccgaguccacccagcgcggccaccgcgaguccggcggcaaggucuccgucgccccccagaacggcaagaucaucuccuccugggagcucuacaaguccgaguccgagaccggcauguga

SEQ ID NO: 127446 - RNA, 1575 nt, Artificial Sequence
  derived and/or modified CDS sequence (opt2) from glycoprotein__RABV__JX871859.1
augaucccccaggcccuccucuccgucccccuccucaucuccucccucugcuucggcaaguuccccaucuacaccauccccgagaagcucggccccuggucccccaucgacauccaccaccucuccugccccaacaaccucgucgucgaggacgagggcugcaacucccucuccggcuucuccuacauggagcucaaggucggcuacaucuccgccaucaaggucaacggcuucaccugcaccggcgucgucaccgaggccgagaccuacaccaacuucgucggcuacgucaccaccaccuucaagcgcaagcacuuccgccccaugcccgacgccugccgcgccgccuacaacuggaagaccgccggcgacccccgcuacgaggagucccuccacaaccccuaccccgacuaccacuggcuccgcaccgucaagaccaccaaggagucccucaucaucaucucccccuccgucgccgaccucgaccccuacgacaagucccuccacucccgcaucuuccccggcggcaagugccucggcaucaccaucuccuccaccuacugcuccaccaaccacgacuacaccaucuggaugcccgaggaggcccgccucggcaccuccugcgacaucuucaccaacuccaagggcaagcgcgccuccaagggcggccgcaccugcggcuucgucgacgagcgcggccucuacaagucccucaagggcgccugcaagcucaagcucugcggcguccccggccuccgccucauggacggcaccugggucgccauccagacccccaacgagaccaaguggugcucccccgaccagcucgucaacguccacgacuuccgcuccgacgagaucgagcaccucgucgucgaggagcucauccgcaagcgcgaggagugccucgacgcccucgaguccaucaugaccaccaaguccgucuccuuccgccgccucuccaaccuccgcaagcucguccccggcuucggcaaggccuacaccaucuucaacaagacccucauggaggccgacgcccacuacaaguccguccgcaccuggaacgagaucauccccucccgcggcugccucaaggucggcggccgcugccacccccacgucaacggcgucuucuucaacggcaucauccucggccccgacggccacauccucauccccgagaugcaguccucccuccuccagcagcacauggagcuccucgaguccuccgucaucccccucauccacccccucgccgaccccuccaccgucuucaaggacggcgacgaggccgaggacuucgucgagguccaccuccccgacguccaccagcaggucuccggcgucgaccucggccuccccgacuggggcaaguacguccucauguccgccggcgcccucgccaccgucaugcucaccaucuuccucaucaccugcugccgccgcgucaagcgcaccgaguccauccagcagggccucggcgaguccggccgcaaggucuccgucaccccccagaacggcaaggucauguccuccugggaguacuacaaguccggcggcggcacccgccucuga

SEQ ID NO: 127447 - RNA, 1575 nt, Artificial Sequence; identical to SEQ ID NO: 127393
  derived and/or modified CDS sequence (opt2) from glycoprotein__RABV__JX871860.1

SEQ ID NO: 127448 - RNA, 1575 nt, Artificial Sequence; identical to SEQ ID NO: 127308
  derived and/or modified CDS sequence (opt2) from glycoprotein__RABV__JX871862.1

SEQ ID NO: 127449 - RNA, 1575 nt, Artificial Sequence
  derived and/or modified CDS sequence (opt2) from glycoprotein__RABV__JX871863.1
augaucccccaggcccuccucuucgucccccuccucaucuccucccucugcuucggcaaguuccccaucuacaccauccccgagaagcucggccccuggucccccaucgacauccaccaccucuccugccccaacaaccucgucgccgaggacgagggcugcaacucccucuccggcuucuccuacauggagcucaaggucggcuacaucuccgccaucaaggucaacggcuucaccugcaccggcgucgucaccgaggccgagaccuacaccaacuucgucggcuacgucaccaccaccuucaagcgcaagcacuuccgccccacccccgacgccugccgcgccgccuacaacuggaagauggccggcgacccccgcuacgaggagucccuccacaaccccuaccccgacuaccacuggcuccgcaccgucaagaccaccaaggagucccucgucaucaucucccccuccgucgccgaccucgaccccuacgacaagucccuccacucccgcgucuuccccgacggcaagugccucggcaucaccaucuccuccaccuacugcuccaccaaccacgacuacaccaucuggaugcccgaggaggcccgccucggcaccuccugcgacaucuucaccaccuccaagggcaagcgcgccuccaagggcgacaagaucugcggcuucgucgacgagcgcggccucuacaagucccucaagggcgccugcaagcucaagcucugcggcguccucggccuccgccucauggacggcaccugggucuccauccagacccccggcgagaccaaguggugcucccccgaccagcucgucaaccuccacgacuuccacuccgacgagaucgagcaccucgucgccgaggagcucgucaagaagcgcgaggagugccucgacgcccucgaguccaucaugaccaccaaguccgucuccuuccgccgccucucccaccuccgcaagcucguccccggcuucggcaaggccuacaccaucuucaacaagacccucauggaggccgacgcccacuacaaguccguccgcaccuggaacgaggucauccccuccaagggcugccucuccgucggcggccgcugccacccccacgucaacggcgucuucuucaacggcaucauccucggccccgacggcuccguccucauccccgagaugcaguccucccuccuccagcagcacauggagcuccucgaguccuccgucaucccccucaugcacccccucgccgaccccuccaccgucuucaaggacgacgacgaggccgagaacuucgucgagguccaccuccccgacguccacaagcaggucuccggcgucgaccucggccuccccaacuggggcaaguaccuccucaugaucgccggcgcccucgccacccucaugcucaccaucuuccucaugaccugcugccgccgcaccaagcgcaccgaguccauccagcagggccucggcgaguccggccgcaaggucuccgucaccccccaguccggcaaggucaucuccuccugggaguccuacaaguccggcggcgagacccgccucuga

SEQ ID NO: 127450 - RNA, 1575 nt, Artificial Sequence
  derived and/or modified CDS sequence (opt2) from glycoprotein__RABV__JX871864.1
augaucccccaggcccuccucuucgucccccuccucauccccucccucugccucggcgaguuccccaucuacaccauccccgacaagcucggccccuggucccccaucgacauccaccaccucuccugccccaacaaccucgucgccgagaacgacggcugcaccucccucuccggcuucuccuacauggagcucaaggucggcuacaucuccgccaucaaggucaacggcuucaccugcaccggcgucgucaccgaggccgagaccuacaccaacuucgucggcuacgucaccaccaccuucaagcgcaagcacuuccgccccacccccgacgccugccgcgccgcccacgacuggaagauggccggcgacccccgcuacgaggccucccuccagaaccccuaccccgacuaccacuggcuccgcaccgucaagaccaccaaggagucccucgucaucaucucccccuccgucgccgaccucgaccccuacgacaagucccuccacucccgcgucuuccccuccggcaagugccucggcaucaccgucuccuccaccuacugcuccaccaaccacgacuacaccaucuggaugcccgucgagccccgccucggcaccuccugcgacaucuucaccaacucccgcggcaagcgcgccuccaagggcggccgcgucugcggcuucgucgacgagcgcggccucuacaagucccucaagggcgccugccgccucaagcucugcggcguccccggcauccgccuccucgacggcaccugggucuccauccagaccuccgaggacaucaaguggugcccccccgaccgccucgucaaccuccacgacuuccacuccgacgagaucgagcaccucgucgucgccgagcucaucaagcgccgcgagaacugccucgacgcccucgaguccaucaugaccaccaaguccgucuccuuccgccgccucucccaccuccgcaagcucguccccggcuucggcaaggccuacaccaucuucaacaagacccucauggaggccgacgcccacuacaagcucgucaagaccuggaacgaguucauccccuccaagggcugccucgaggucggcggccgcugccacccccacgucaacggcgucuucuucaacggcaucauccucggccccgacggcaacguccucauccccgagaugcaguccucccuccuccagcagcacauggagcuccucgaguccuccgucaucccccucaugcacccccucgccgaccccuccaccgucuucaaggagggcgacgaggccgaggacuucgucgagguccaccuccccgacguccacaagcaggucuccgacgucgaccucggccuccccuccuggggcaaguaccuccucaucuccgccggcgcccucgccauccucauccucgccaucguccucaucaucugcugccgccgcgucaacaagaccggcuccacccagcgcggccaccgcgaguccggcggcaagauguccgucgucccccagaacggcaagaucaucuccuccugggagcucuacaaguccgaguccgagaccggccucuga

SEQ ID NO: 127451 - RNA, 1575 nt, Artificial Sequence
  derived and/or modified CDS sequence (opt2) from glycoprotein__RABV__JX871865.1
augaucccccaggcccuccucuccgucccccuccucaucuccucccucugcuucggcaaguuccccaucuacaccauccccgagaagcucggccccuggucccccaucgacauccaccaccucuccugccccaacaaccucgucgucgaggacgagggcugcaacucccucuccggcuucuccuacauggagcucaaggucggcuacaucuccgccaucaaggucaacggcuucaccugcaccggcgucgucaccgaggccgagaccuacaccaacuucgucggcuacgucaccaccaccuucaagcgcaagcacuuccgccccauggccgacgccugccgcgccgccuacaacuggaagaccgccggcgacccccgcuacgaggagucccuccacaaccccuaccccgacuaccacuggcuccgcaccgucaagaccaccaaggagucccucaucaucaucucccccuccgucgccgaccucgaccccuacgacaagucccuccacucccgcaucuuccccggcggcaagugccucggcaucaccaucuccuccaccuacugcuccaccaaccacgacuacaccaucuggaugcccgaggaggcccgccucggcaccuccugcgacaucuucaccaacuccaagggcaagcgcgccuccaagggcggccgcaccugcggcuucgucgacgagcgcggccucuacaagucccucaagggcgccugcaagcucaagcucugcggcguccccggccuccgccucauggacggcaccugggucgccauccagacccccaacgagaccaaguggugcucccccgaccagcucgucaacguccacgacuuccgcuccgacgagaucgagcaccucgucgucgaggagcucauccgcaagcgcgaggagugccucgacgcccucgaguccaucaugaccaccaaguccgucuccuuccgccgccucuccaaccuccgcaagcucguccccggcuucggcaaggccuacaccaucuucaacaagacccucauggaggccgacgcccacuacaaguccguccgcaccuggaacgagaucauccccucccgcggcugccucaaggucggcggccgcugccacccccacgucaacggcgucuucuucaacggcaucauccucggccccgacggccacauccucauccccgagaugcaguccucccuccuccagcagcacauggagcuccucgaguccuccgucaucccccucauccacccccucgccgaccccuccaccgucuucaaggacggcgacgaggccgaggacuucgucgagguccaccuccccgacguccaccagcaggucuccggcgucgaccucggccuccccgacuggggcaaguacguccucauguccgccggcgcccucgccaccgucaugcucaccaucuuccucaucaccugcugccgccgcgucaagcgcaccgaguccauccagcagggccccggcgaguccggccgcaaggucuccgucaccccccagaacggcaaggucauguccuccugggaguacuacaaguccggcggcggcacccgccucuga

SEQ ID NO: 127452 - RNA, 1575 nt, Artificial Sequence
  derived and/or modified CDS sequence (opt2) from glycoprotein__RABV__JX871866.1
augaucccccaggccauccucuucgucccccuccucauccccucccucugccucggcgaguuccccaucuacaccauccccgacaagcucggccccuggucccccaucgacauccaccaccucuccugccccaacaaccucgucgccgagaacgacggcugcaccucccucuccggcuucuccuacauggagcucaaggucggcuacaucuccgccaucaaggucaacggcuucaccugcaccggcgucgucaccgaggccgagaccuacaccaacuucgucggcuacgucaccaccaccuucaagcgcaagcacuuccgccccacccccgacgccugccgcgccgcccacgacuggaagauggccggcgacccccgcuacgaggccucccuccagaaccccuaccccgacuaccacuggcuccgcaccgucaagaccaccaaggagucccucgucaucaucucccccuccgucgccgaccucgaccccuacgacaagucccuccacucccgcgucuuccccuccggcaagugccucggcaucaccgucuccuccaccuacugcuccaccaaccacgacuacaccaucuggaugcccgucgagccccgccucggcaccuccugcgacaucuucaccaacucccgcggcaagcgcgccuccaagggcggccgcgucugcggcuucgucgacgagcgcggccucuacaagucccucaagggcgccugccgccucaagcucugcggcguccccggcauccgccuccucgacggcaccugggucuccauccagaccuccgaggacaucaaguggugcccccccgaccgccucgucaaccuccacgacuuccacuccgacgagaucgagcaccucgucgucgccgagcucaucaagcgccgcgagaacugccucgacgcccucgaguccaucaugaccaccaaguccgucuccuuccgccgccucucccaccuccgcaagcucguccccggcuucggcaaggccuacaccaucuucaacaagacccucauggaggccgacgcccacuacaaguccgucaagaccuggaacgaggucauccccuccaagggcugccucgaggucggcggccgcugccacccccacgucaacggcgucuucuucaacggcaucauccucggccccgacggcaacguccucauccccgagaugcaguccucccuccuccagcagcacauggagcuccucgaguccuccgucaucccccucaugcacccccucgccgaccccuccaccgucuucaaggagggcgacgaggccgaggacuucgucgagguccaccuccccgacguccacaagcaggucuccgacgucgaccucggccuccccuccuggggcaaguaccuccucaucuccgccggcgcccucgccauccucauccucgccaucguccucaucaucugcugccgccgcgucaacaagaccggcuccacccagcgcggccaccgcgaguccggcggcaagauguccgucgucccccagaacggcaagaucaucuccuccugggagcucuacaaguccgaguccgagaccggccucuga

SEQ ID NO: 127453 - RNA, 1575 nt, Artificial Sequence; identical to SEQ ID NO: 127285
  derived and/or modified CDS sequence (opt2) from glycoprotein__RABV__JX871867.1

SEQ ID NO: 127454 - RNA, 1575 nt, Artificial Sequence
  derived and/or modified CDS sequence (opt2) from glycoprotein__RABV__JX871868.1
augaucccccaggccuuccucuucgucccccuccucauccccucccucugccucggcaaguuccccaucuacaccauccccgacaagcucggccccuggucccccaucgacauccaccaccucuccugccccaacaaccucgucgucgaggacgagggcugcaccucccucuccggcuucuccuacauggagcucaaggucggcuacaucuccgccaucaaggucaacggcuucaccugcaccggcgucgucaccgaggccgagaccuacaccaacuucgucggcuacgucaccaccaccuucaagcgcaagcacuuccgccccaugcccgacgccugccgcgccgcccacgacuggaagaucgccggcgacccccgcuacgaggacucccuccagaaccccuaccccgacuaccacuggcuccgcaccgucaagaccaccaaggagucccucgucaucaucucccccuccgucgccgaccucgaccccuacgacaagucccuccacucccgcgucuuccccuccggcaagugccucggcaucaccgucuccuccaccuacugccccaccaaccacgacuacaccaucuggaugcccgucgaggcccgccucggcaccuccugcgacaucuucaccaacucccgcggcaagaaggccuccaagggcggccgcaccugcggcuucgucgacgagcgcggccucuacaagucccucaagggcgccugcaagcucaagcucugcggcguccccggccuccgccucauggacggcaccugggucuccauccagaccuccgacgacgucaaguggugcccccccgaccagcucgucaaccuccacgacuuccacuccgacgagaucgagcaccucgucgucgaggagcucaucaagaagcgcgagggcugccucgacgcccucgaguccaucaugaccaccaaguccgucuccuuccgccgccucucccaccuccgcaagcucguccccggcuucggcaaggccuacaccaucuucaacaacacccucauggaggccgacgcccacuacaaguccguccgcaccuggaacgaggucauccccuccaagggcugccucaaggucggcggccgcugccacccccccgucaacggcgucuucuucaacggcaucauccucggccccgacggcaacguccucauccccgagaugcaguccucccuccuccagcagcacauggagcuccucgaguccuccgucaucccccucaugcacccccucgccgaccccuccaccgucuucaaggacggcgacgaggccgaggacuucgucgagguccaccuccccgacguccacaagcaggucuccgacgucgaccucggccuccccuccuggggcaaguaccuccucauguccgccggcgcccucgccacccucauccucgccaucuuccucaucaccugcugccgccgcgccaaccgcaccaaguccacccagcgcggccaccgcgaguccggcggcaaggucuccgucgccccccagaacggcaagaucaucuccuccugggagcucuacaaguccgaguccgagaccggcauguga

SEQ ID NO: 127455 - RNA, 1575 nt, Artificial Sequence; identical to SEQ ID NO: 127446
  derived and/or modified CDS sequence (opt2) from glycoprotein__RABV__JX871869.1

SEQ ID NO: 127456 - RNA, 1575 nt, Artificial Sequence
  derived and/or modified CDS sequence (opt2) from glycoprotein__RABV__JX871870.1
augaucuuccaggcccuccucuucgucccccuccucaucuccucccucugccucggcaaguuccccaucuacaccauccccgacaagcucggccccuggucccccaucgacauccaccaccucuccugccccaacaaccucgucgucgaggacgagggcugcaccucccucuccggcuucuccuacauggagcucaaggucggcuacaucuccgccaucaaggucaacggcuucaccugcaccggcgucgucaccgaggccgagaccuacaccaacuucgucggcuacgucaccaccaccuucaagcgcaagcacuuccgccccauccccgacgccugccgcgccgccuacaacuggaagaucgccggcgacccccgcuacgaggagucccuccagaaccccuaccccgacuaccacuggcuccgcaccgucaagaccaccaaggagucccucaucaucaucucccccuccgucgccgaccucgaccccuacgacaagucccuccacucccgccucuuccccggcggcaagugccucggcaucaccaucuccuccaccuacugcuccaccaaccacgacuacaccaucuggaugcccgaggagccccgccucggcaccuccugcgacaucuucaccaacuccaagggcaagaaggccuccaagggcggcaaggucugcggcuucgucgacgagcgcggccucuacaagucccucaagggcgccugcaagcucaagcucugcggcgucuccggccuccgccucauggacggcaccugggucaccauccagaccuccgacgagaucaaguggugcccccccgaccagcucgucaaccuccacgacuuccacuccgacgagaucgagcaccucgucgucgaggagcucgucaagaagcgcgaggagugccucgacgcccucgaguccaucaugaccaccaaguccgucuccuuccgccgccucuccuaccuccgcaagcucguccccggcuucggcaaggccuacaccaucuucaacaagacccucauggaggccgacgcccacuacaaguccguccgcaccuggaacgagaucauccccuccaagggcugccucaaggucuccgaccgcugccacccccacgucgacggcgucuucuucaacggcaucauccucggccccgacggcaacguccucauccccgagaugcaguccucccuccuccagcagcacauggagcuccucgaguccuccgucaucccccucaugcacccccucgccgaccccuccaccgucuucaaggacggcgacgaggccgaggacuucgucgagguccaccuccccgacguccacaagcagaucuccggcgucgaccucggccuccccuccuggggcaaguaccuccucaugaucgccggcggccucgccacccucguccucaucaucuuccucauggccugcugccgccgcaccaagcgcaccgagucccgccgccgcggcuccggcgaguccggcgagaagguccucgccaccccccagcccaagaaggucgucuccuccugggagcucuacaagcgcgagggcgacgcccgccucuga

SEQ ID NO: 127457 - RNA, 1575 nt, Artificial Sequence
  derived and/or modified CDS sequence (opt2) from glycoprotein__RABV__JX871871.1
augaucccccaggcccuccucuucgucccccuccucauccccucccucugccucggcgaguuccccaucuacaccauccccgacaagcucggccccuggucccccaucgacauccaccaccucuccugccccaacaaccucgucgccgagaacgacggcugcaccucccucuccggcuucuccuacauggagcucaaggucggcuacaucuccgccaucaaggucaacggcuucaccugcaccggcgucgucaccgaggccgagaccuacaccaacuucgucggcuacgucaccaccaccuucaagcgcaagcacuuccgccccacccccgacgccugccgcgccgcccacgacuggaagauggccggcgacccccgcuacgaggccucccuccagaaccccuaccccgacuaccacuggcuccgcaccgucaagaccaccaaggagucccucgucaucaucucccccuccgucgccgaccucgaccccuacgacaagucccuccacucccgcgucuuccccuccggcaagugccucggcaucaccgucuccuccaccuacugcuccaccaaccacgacuacaccaucuggaugcccgucgagccccgccucggcaccuccugcgacaucuucaccaacucccgcggcaagcgcgccuccaagggcggccgcgucugcggcuucgucgacgagcgcggccucuacaagucccucaagggcgccugccgccucaagcucugcggcguccccggcauccgccuccucgacggcaccugggucuccauccagaccuccgaggacaucaaguggugcccccccgaccgccucgucaaccuccacgacuuccacuccgacgagaucgagcaccucgucgucgccgagcucaucaagcgccgcgagaacugccucgacgcccucgaguccaucaugaccaccaaguccgucuccuuccgccgccucucccaccuccgcaagcucguccccggcuucggcaaggccuacaccaucuucaacaagacccucauggaggccgacgcccacuacaaguccgucaagaccuggaacgaggucauccccuccaagggcugccucgaggucggcggccgcugccacccccacgucaacggcgucuucuucaacggcaucauccucggccccgacggcaacguccucauccccgagaugcaguccucccuccuccagcagcacauggagcuccucgaguccuccgucaucccccucaugcacccccucgccgaccccuccaccgucuucaaggagggcgacgaggccgaggacuucgucgagguccaccuccccgacguccacaagcaggucuccgacgucgaccucggccuccccuccuggggcaaguaccuccucaucuccgccggcgcccucgccauccucauccucgccaucguccucaucaucugcugccgccgcgucaacaagacccgcuccacccagcgcggccaccgcgaguccggcggcaagauguccgucgucccccagaacggcaagaucaucuccuccugggagcucuacaaguccgaguccgagaccggccucuga

SEQ ID NO: 127458 - RNA, 1575 nt, Artificial Sequence; identical to SEQ ID NO: 127285
  derived and/or modified CDS sequence (opt2) from glycoprotein__RABV__JX871872.1

SEQ ID NO: 127459 - RNA, 1575 nt, Artificial Sequence; identical to SEQ ID NO: 127457
  derived and/or modified CDS sequence (opt2) from glycoprotein__RABV__JX871873.1

SEQ ID NO: 127460 - RNA, 1575 nt, Artificial Sequence
  derived and/or modified CDS sequence (opt2) from glycoprotein__RABV__JX871874.1
augauccuccaggcccuccucuucguccccuuccucuuccccucccucugccucggcaaguuccccaucuacaccauccccgagaagcucggccccuggucccccaucgacauccaccaccucuccugccccaacaaccucgucgucgaggacgagggcugcgacucccucuccggcuucuccuacauggagcucaaggucggcuacaucuccgccaucaaggucaacggcuucaccugcaccggcgucgucaccgaggccgagaccuacaccaacuucgucggcuacgucaccaccaccuucaagcgcaagcacuuccgccccaugcccgacgccugccgcgccgccuacaacuggaagaccgccggcgacccccgcuacgaggagucccuccacaaccccuaccccgacuaccacuggcuccgcaccgucaagaccaccaaggagucccucaucaucaucucccccuccgucgccgaccucgaccccuacgacaagucccuccacucccgcgucuuccccggcggcaagugccucggcaucaccgucuccuccaccuacugcuccaccaaccacgacuacaccaucuggaugcccgaggaggcccgccucggcaccuccugcgacaucuucaccaacuccaagggcaagcgcgccuccaagggcggccgcaccugcggcuucgucgacgagcgcggccucuacaagucccucaagggcgccugcaagcucaagcucugcggcguccccggccuccgccucauggacggcaccugggucgccauccagacccccggcgagaccaaguggugcucccccgaccagcucgucaaccuccacgacuuccgcuccgacgagaucgagcaccucgucgucgaggagcucaucaagaagcgcgaggagugccucgacgcccucgaguccaucaugaccaccaaguccgucuccuuccgccgccucuccaaccuccgcaagcucguccccggcuucggcaaggccuacaccaucuucaacaagacccucauggaggccgacgcccacuacaaguccguccgcaccugggacgagaucauccccuccaagggcugccuccgcgucggcggccgcugccacccccacgucaacggcgucuucuucaacggcaucauccucggccccgacggccacguccucauccccgagaugcaguccucccuccuccagcagcacauggagcuccucgaguccuccgucaucccccucauccacccccucgccgaccccuccaccgucuucaaggacggcgacgaggccgaggacuucgucgagguccaccuccccgacguccacaagcaggucuccggcgucgaccucggccuccccaacuggggcaaguacguccucaugggcgccggcguccucgccaccgucauccucaccaucuuccuccucaccugcugccgccgcgucaaccgcaccaagcccaaccagcagucccucggcgaguccggccgcaaggucuccgucaccccccagaacggcaaggucauguccuccugggaguacuacaaguccgagggccgcaccucccucuga

SEQ ID NO: 127461 - RNA, 1575 nt, Artificial Sequence
  derived and/or modified CDS sequence (opt2) from glycoprotein__RABV__JX871875.1
augaucccccaggcccuccucuacgucccccuccucauccccucccucugcuucggcggcuuccccaucuacaccauccccgacaagcucggccccuggucccccaucgacauccaccaccucuccugccccaacaaccucgucgucgaggacgagggcugcaccucccucuccggcuucuccuacauggagcucaaggucggcuacaucuccgccaucaaggucaacggcuucaccugcaccggcgucgucaccgaggccgagaccuacaccaacuucgucggcuacgucaccaccaccuucaagcgcaagcacuuccgccccaugcccgacgccugccgcgccgccuacaacuggaagauggccggcgacccccgcuacgaggagucccuccagaaccccuaccccgacuacuccuggcuccgcaccgucaagaccaccaaggagucccucaucaucaucucccccuccgucgccgaccucgaccccuacgacaagucccuccacucccgcgucuuccccggcggcaagugccucggcaucaccaucuccuccaccuacugcuccaccaaccacgacuacaccaucuggaugcccgaggaggcccgccucggcaccuccugcgacaucuucaccaacucccgcggcaagcgcgccuccaagggcggcaagaccugcggcuucauggacgagcgcggccucuacaagucccucaagggcgccugcaagcucaagcucugcggcguccccggccuccgccucauggacggcaccugggucaccauccagaccuccgacgagaccaaguggugccccuccgaccagcucgucaaccuccacgacuuccacuccgacgagaucgagcaccucgucgucgaggagcucgucaagaagcgcgaggagugccucgacgcccucgaguccaucaugaccaccaaguccgucuccuuccgccgccucucccaccuccgcaagcucguccccggcuucggcaaggccuacaccaucuucaacaagacccucauggaggccgacgcccacuacaaguccauccgcaccuggaacgagaucauccccuccaagggcugccucaaggucggcggccgcugccacccccacgucgacggcgucuucuucaacggcaucauccucggccccgacggcaacguccucauccccgagaugcaguccucccuccuccagcagcacgucgagcuccucgaguccuccgucaucccccucaugcacccccucgccgaccccuccaccgucuucaaggacggcgacgaggccgaggacuucgucgagguccaccuccccgacauccacaagcaggucuccggcgucgaccucggccuccccaacuggggcaaguaccuccucauguccgccggcgcccucgccacccucaugcucaucauccuccucaugaccugcugccgccgcgccaaccgcaccgaguccauccagcgcgaccccggcgaguccggccgcaaggucuccaucaccucccccgacggcaaggucaucuccuccugggagcucuacaaguccggcggcgagacccgccucuga

SEQ ID NO: 127462 - RNA, 1575 nt, Artificial Sequence; identical to SEQ ID NO: 127304
  derived and/or modified CDS sequence (opt2) from glycoprotein__RABV__JX871876.1

SEQ ID NO: 127463 - RNA, 1575 nt, Artificial Sequence; identical to SEQ ID NO: 127456
  derived and/or modified CDS sequence (opt2) from glycoprotein__RABV__JX871877.1

SEQ ID NO: 127464 - RNA, 1575 nt, Artificial Sequence; identical to SEQ ID NO: 127285
  derived and/or modified CDS sequence (opt2) from glycoprotein__RABV__JX871879.1

SEQ ID NO: 127465 - RNA, 1575 nt, Artificial Sequence
  derived and/or modified CDS sequence (opt2) from glycoprotein__RABV__JX871880.1
augaucccccaggcccuccucuucguccccuuccucuuccccucccucugccucggcaaguuccccaucuacaccauccccgagaagcucggccccuggucccccaucgacauccaccaccucuccugccccaacaaccucgucgucgaggacgagggcugcgacucccucuccggcuucuccuacauggagcucaaggucggcuacaucuccgccaucaaggucaacggcuucaccugcaccggcgucgucaccgaggccgagaccuacaccaacuucgucggcuacgucaccaccaccuucaagcgcaagcacuuccgccccaugcccgacgccugccgcgccgccuacaacuggaagaccgccggcgacccccgcuacgaggagucccuccacaaccccuaccccgacuaccacuggcuccgcaccgucaagaccaccaaggagucccucaucaucaucucccccuccgucgccgaccucgaccccuacgacaagucccuccacucccgcgucuuccccggcggcaagugccucggcaucaccaucuccuccaccuacugcuccaccaaccacgacuacaccaucuggaugcccgaggaggcccgccucggcaccuccugcgacaucuucaccaacuccaagggcaagcgcgccuccaagggcggccgcaccugcggcuucgucgacgagcgcggccucuacaagucccucaagggcgccugcaagcucaagcucugcggcguccccggccuccgccucauggacggcaccugggucgccauccagacccccggcgagaccaaguggugcucccccgaccagcucgucaaccuccacgacuuccgcuccgacgagaucgagcaccucgucgucgaggagcucaucaagaagcgcgaggagugccucgacgcccucgaguccaucaugaccaccaaguccgucuccuuccgccgccucuccaaccuccgcaagcucguccccggcuucggcaaggccuacaccaucuucaacaagacccucauggaggccgacgcccacuacaaguccauccgcaccugggacgagaucauccccuccaagggcugccuccgcgucggcggccgcugccacccccacgucaacggcgucuucuucaacggcaucauccucggccccgacggccacguccucauccccgagaugcaguccucccuccuccagcagcacauggagcuccucgaguccuccgucaucccccucauccacccccucgccgaccccuccaccgucuucaaggacggcgacgaggccgaggacuucgucgagguccaccuccccgacguccacgagcagaucuccggcgucgaccucggccuccccaacuggggcaaguacguccucauguccgccggcguccucgccaccgucauccucaccaucuuccuccucaccugcugccgccgcgucaaccgcaccaagcccaagcagcagucccucggcgaguccggccgcaaggucuccgucaccccccagaacggcaaggucauguccuccugggaguacuacaaguccgagggccgcaccucccucuga

SEQ ID NO: 127466 - RNA, 1575 nt, Artificial Sequence
  derived and/or modified CDS sequence (opt2) from glycoprotein__RABV__JX871881.1
augaucccccaggcccuccucuccgucccccuccucaucuccucccucugcuucggcaaguuccccaucuacaccauccccgagaagcucggccccuggucccccaucgacauccaccaccucuccugccccaacaaccucgucgucgaggacgagggcugcaacucccucuccggcuucuccuacauggagcucaaggucggcuacaucuccgccaucaaggucaacggcuucaccugcaccggcgucgucaccgaggccgagaccuacaccaacuucgucggcuacgucaccaccaccuucaagcgcaagcacuuccgccccaugcccgacgccugccgcgccgccuacaacuggaagaccgccggcgacccccgcuacgaggagucccuccacaaccccuaccccgacuaccacuggcuccgcaccgucaagaccaccaaggagucccucaucaucaucucccccuccgucgccgaccucgaccccuacgacaagucccuccacucccgcaucuuccccggcggcaagugccucggcaucaccaucuccuccaccuacugcuccaccaaccacgacuacaccaucuggaugcccgaggaggcccgccucggcaccuccugcgacaucuucaccaacuccaagggcaagcgcgccuccaagggcggccgcaccugcggcuucgucgacgagcgcggccucuacaagucccucaagggcgccugcaagcucaagcucugcggcguccccggccuccgccucauggacggcaccugggucgccauccagacccccaacgagaccaaguggugcucccccgaccagcucgucaacguccacgacuuccgcuccgacgagaucgagcaccucgucgucgaggagcucauccgcaagcgcgaggagugccucgacgcccucgaguccaucaugaccaccaaguccgucuccuuccgccgccucuccaaccuccgcaagcucguccccggcuucggcaaggccuacaccaucuucaacaagacccucauggaggccgacgcccacuacaaguccguccgcaccuggaacgagaucauccccucccgcggcugccucaaggucggcggccgcugccacccccacgucaacggcgucuucuucaacggcaucauccucggccccgacggccacauccucauccccgagaugcaguccucccuccuccagcagcacauggagcuccucgaguccuccgucaucccccucauccacccccucgccgaccccuccaccgucuucaaggacggcgacgaggccgaggacuucgucgagguccaccuccccgacguccaccagcaggucuccggcgucgaccucggccuccccgacuggggcaaguacguccucauguccgccggcgcccucgccaccgucaugcucaccaucuuccucaucaccugcugccgccgcgucaagcgcaccgaguccauccagcaggaccucggcgaguccggccgcaaggucuccgucaccccccagaacggcaaggucauguccuccugggaguacuacaaguccggcggcggcacccgccucuga

SEQ ID NO: 127467 - RNA, 1575 nt, Artificial Sequence
  derived and/or modified CDS sequence (opt2) from glycoprotein__RABV__JX944575.1
auggucccccaggcccuccucuucgucccccuccucgucuucccccucugcuucggcaaguuccccaucuacaccauccccgacaagcucggccccuggucccccaucgacauccaccaccucuccugccccaacaaccucgucgucgaggacgagggcugcaccaaccucuccggcuucuccuacauggagcucaaggucggcuacaucuccgccaucaagaugaacggcuucaccugcaccggcgucgucaccgaggccgagaccuacaccaacuucgucggcuacgucaccaccaccuucaagcgcaagcacuuccgccccacccccgacgccugccgcgccgccuacaacuggaagauggccggcgacccccgcuacgaggagucccuccacaaccccuaccccgacuaccacuggcuccgcaccgucaagaccaccaaggagucccucgucaucaucucccccuccgucgccgaccucgaccccuacgaccgcucccuccacucccgcgucuuccccggcggcaacugcuccggcgucgccgucuccuccaccuacugcuccaccaaccacgacuacaccaucuggaugcccgagaacccccgccucggcauguccugcgacaucuucaccaacucccgcggcaagcgcgccuccaagggcuccgagaccugcggcuucgucgacgagcgcggccucuacaagucccucaagggcgccugcaagcucaagcucugcggcguccucggccuccgccucauggacggcaccugggucgccaugcagaccuccaacgagaccaaguggugcccccccggccagcucgucaaccuccacgacuuccgcuccgacgagaucgagcaccucgucgucgaggagcucgucaagaagcgcgaggagugccucgacgcccucgaguccaucaugaccaccaaguccgucuccuuccgccgccucucccaccuccgcaagcucguccccggcuucggcaaggccuacaccaucuucaacaagacccucauggaggccgacgcccacuacaaguccguccgcaccuggaacgagaucauccccuccaagggcugccuccgcgucggcggccgcugccacccccacgucaacggcgucuucuucaacggcaucauccucggccccgacggcaacguccucauccccgagaugcaguccucccuccuccagcagcacauggagcuccucgucuccuccgucaucccccucaugcacccccucgccgaccccuccaccgucuucaagaacggcgacgaggccgaggacuucgucgagguccaccuccccgacguccacgagcgcaucuccggcgucgaccucggccuccccaacuggggcaaguacguccuccucuccgccggcgcccucaccgcccucaugcucaucaucuuccucaugaccugcuggcgccgcgucaaccgcuccgagcccacccagcacaaccuccgcggcaccggccgcgaggucuccgucaccccccaguccggcaagaucaucuccuccugggaguccuacaaguccggcggcgagaccggccucuga

SEQ ID NO: 127468 - RNA, 1575 nt, Artificial Sequence
  derived and/or modified CDS sequence (opt2) from glycoprotein__RABV__JX944576.1
augguccaccagguccuccucuucgucccccuccucgucuucucccucugcuucggcaaguuccccaucuacaccauccccgacaagcucggccccuggucccccaucgacauccaccaccucuccugccccaacaaccucgucgucgaggacgagggcugcaccaaccucuccggcuucuccuacauggagcucaaggucggcuacaucuccgccaucaaggucaacggcuucaccugcaccggcgucgucaccgaggccgagaccuacaccaacuucgucggcuacgucaccaccaccuuccgccgcaagcacuuccgccccacccccgacgccugccgcgccgccuacaacuggaagcucgccggcgacccccgcuacgaggagucccuccacaaccccuaccccgacuaccacuggcuccgcaccgucaagaccaccaaggagucccucgucaucaucucccccuccgucgccgaccucgaccccuacgacaagucccuccacucccgcgucuuccccggcggcaagugcuccggcaucaccgucuccuccaccuacugcuccaccaaccacgacuacaccaucuggaugcccgagaacccccgccucggcaccuccugcgacaucuucgucaacucccgcggcaagcgcgccuccaagggcggcaagaccugcggcuucgucgacgagcgcggccucuacaagucccucaagggcgccugcaagcucaagcucugcggcguccccggccuccgccucauggacggcaccugggccgccauccagaccuccgacgagaccaaguggugcccccccgaccagcucgucaaccuccacgacuaccgcuccgacgagaucgagcaccucgucgucgaggagcucgucaagaagcgcgaggagugccucgacgcccucgaguccaucaugaccaccaaguccgucuccuuccgccgccucucccaccuccgcaagcucguccccggcuucggcaaggccuacaccaucuucaacaagacccucauggaggccgacgcccacuacaaguccguccgcaccuggaacgagaucauccccuccaagggcugccuccgcgucggcggccgcugccacccccacgucaacggcgucuucuucaacggcaucauccucggccccgacggccacguccucauccccgagaugcaguccucccuccuccagcagcacauggagcuccucgaguccuccgucaucccccucaugcacccccucgccgaccccuccaccgucuucaaggacggcgacgaggccgaggacuucgucgagguccaccuccccgacguccacaagcucaucuccggcgucgaccucggccuccccuccuggggcaaguacguccucauguccgccugcguccucaccgcccucaugcucaugaucuuccucaugaccugcugccgccgcggcaaccaggccggcuccaagcagcacggccucgagggcaccggccgcaaggucuccgucaccucccagaacggcaaggucaucuccuccugggaguccuacaaguccggcggcgagacccgccucuga

SEQ ID NO: 127469 - RNA, 1575 nt, Artificial Sequence; identical to SEQ ID NO: 126935
  derived and/or modified CDS sequence (opt2) from glycoprotein__RABV__JX944577.1

SEQ ID NO: 127470 - RNA, 1575 nt, Artificial Sequence
  derived and/or modified CDS sequence (opt2) from glycoprotein__RABV__JX944578.1
auggucccccagguccuccucuucgucccccuccucgucuucucccucugcuucggcaaguuccccaucuacaccauccccgacaagcucggccccuggucccccaucgacauccaccaccucuccugccccaacaaccucgucgucgaggacgagggcugcaccaaccucuccggcuucuccuacauggagcucaaggucggcuacaucuccgccaucaaggucaacggcuucaccugcaccggcgucgucaccgaggccgagaccuacaccaacuucgucggcuacgucaccaccaccuuccgccgcaagcacuuccgccccacccccgacgccugccgcgccgccuacaacuggaagcucgccggcgacccccgcuacgaggagucccuccacaaccccuaccccgacuaccacuggcuccgcaccgucaagaccaccaaggagucccucgucaucaucucccccuccgucgccgaccucgaccccuacgacaagucccuccacucccgcgucuuccccggcggcaagugcuccggcaucaccaucuccuccaccuacugcuccaccaaccacgacuacaccaucuggaugcccgagaacccccgccucggcaccuccugcgacaucuucgucaacucccgcggcaagcgcgccuccaagggcggcaagaccugcggcuucgucgacgagcgcggccucuacaagucccucaagggcgccugcaagcucaagcucugcggcguccccggccuccgccucauggacggcaccugggccgccauccagaccuccgacgagaccaaguggugcccccccgaccagcucgucaaccuccacgacuuccgcuccgacgagaucgagcaccucgucgucgaggagcucgucaagaagcgcgaggagugccucgacgcccucgaguccaucaugaccaccaaguccgucuccuuccgccgccucucccaccuccgcaagcucguccccggcuucggcaaggccuacaccaucuucaacaagacccucauggaggccgacgcccacuacaaguccguccgcaccuggaacgagaucauccccuccaagggcugccuccgcgucggcggccgcugccacccccacgucaacggcgucuucuucaacggcaucauccucggccccgacggccacguccucauccccgagaugcaguccucccuccuccagcagcacauggagcuccucgaguccuccgucaucccccucaugcacccccucgccgaccccuccaccgucuucaaggacggcgacgaggccgaggacuucgucgagguccaccuccccgacguccacaagcucaucuccggcgucgaccucggccuccccuccuggggcaaguacguccucauguccgccggcguccucaccgcccucaugcucaugaucuuccucaugaccugcugccgccgcggcaaccaggccggcuccaagcagcacggccucgagggcaccggccgcaaggucuccgucaccucccagaacggcaaggucaucuccuccugggaguccuacaaguccggcggcgagacccgccucuga

SEQ ID NO: 127471 - RNA, 1575 nt, Artificial Sequence; identical to SEQ ID NO: 126935
  derived and/or modified CDS sequence (opt2) from glycoprotein__RABV__JX944579.1

SEQ ID NO: 127472 - RNA, 1575 nt, Artificial Sequence; identical to SEQ ID NO: 126935
  derived and/or modified CDS sequence (opt2) from glycoprotein__RABV__JX944580.1

SEQ ID NO: 127473 - RNA, 1575 nt, Artificial Sequence; identical to SEQ ID NO: 126935
  derived and/or modified CDS sequence (opt2) from glycoprotein__RABV__JX944581.1

SEQ ID NO: 127474 - RNA, 1575 nt, Artificial Sequence
  derived and/or modified CDS sequence (opt2) from glycoprotein__RABV__JX944582.1
auggucccccagguccucugguucgucccccuccucgucuucuccaugugcuucggcaaguuccccaucuacaccauccccgacaagcucggccccuggucccccaucgacauccaccaccucuccugccccaacaaccucgucgucgaggacgagggcugcaccaaccucuccggcuucuccuacauggagcucaaggucggcuacaucuccgccaucaaggucaacggcuucaccugcaccggcgucgucaccgaggccgagaccuacaccaaccucgucggcuacgucaccaccaccuucaagcgcaagcacuuccgccccacccccgacgccugccgcgccgccuacaacuggaagauggccggcgacccccgcuacgaggagucccuccacaaccccuaccccgacuaccacuggcuccgcaccgucaagaccaccaaggagucccucgucaucaucucccccuccgucgccgaccucgaccccuacgacaagucccuccacucccgcgucuuccccuccggcaagugcuccggcaucaccaucuccuccaccuacugcuccaccaaccacgacuacaccaucuggaugcccgagaacccccgccucggcaccuccugcgacaucuucaccaacucccgcggcaagcgcgccuccaagggcuccaagaccugcggcuucgucgacgagcgcggccucuacaagucccucaagggcgccugcaagcucaagcucugcggcguccucggccuccgccucauggacggcaccugggucgccaugcagaccuccgacgagaccaaguggugcccccccgaccagcucgucaaccuccacgacuuccgcuccgacgagaucgagcaccucgucgucgaggagcucgucaagaagcgcgaggagugccucgacgcccucgaguccaucaugaccaccaaguccgucuccuuccgccgccucucccaccuccgcaagcucguccccggcuucggcaaggccuacaccaucuucaacaagacccucauggaggccgacgcccacuacaaguccguccgcaccuggaacgagaucauccccuccaagggcugccuccgcgucggcggccgcugccacccccacgucaacggcgucuucuucaacggcaucauccucggccccgacggccacguccucauccccgagaugcaguccucccuccuccagcagcacauggagcuccucgaguccuccgucaucccccucaugcacccccucgccgaccccuccaccgucuucaaggacggcgacgaggccgaggacuucgucgagguccaccuccccgacguccacaagcagaucuccggcgucgaccucggccuccccaacuggggcaaguacguccucgucuccgccggcguccucgucguccucaugcucgccauccucaucaugaccugcugcggccgcgucaaccgccccaaguccacccagcacucccucgagggcaccggccgcaaggucuccgucaccucccaguccggcaaggucaucuccuccugggaguccuacaaguccggcggcgagacccgccucuga

SEQ ID NO: 127475 - RNA, 1575 nt, Artificial Sequence
  derived and/or modified CDS sequence (opt2) from glycoprotein__RABV__JX944583.1
augaucccccagguccucugguucgucccccuccucgucuucuccaugugcuucggcaaguuccccaucuacaccauccccgacaagcucggccccuggucccccaucgacauccaccaccucuccugccccaacaaccucgucgucgaggacgagggcugcaccaaccucuccggcuucuccuacauggagcucaaggucggcuacaucuccgccaucaaggucaacggcuucaccugcaccggcgucgucaccgaggccgagaccuacaccaacuucgucggcuacgucaccaccaccuucaagcgcaagcacuuccgccccacccccgacgccugccgcgccgccuacaacuggaagauggccggcgacccccgcuacgaggagucccuccacaaccccuaccccgacuaccacuggcuccgcaccgucaagaccaccaaggagucccucgucaucaucucccccuccgucgccgaccucgaccccuacgacaagucccuccacucccgcgucuuccccuccggcaagugcuccggcaucaccaucuccuccaccuacugcuccaccaaccacgacuacaccaucuggaugcccgagaacccccgccucggcaccuccugcgacaucuucaccaacucccgcggcaagcgcgccuccaagggcuccaagaccugcggcuucgucgacgagcgcggccucuacaagucccucaagggcgccugcaagcucaagcucugcggcguccucggccuccgccucauggacggcaccugggucgccaugcagaccuccgacgagaccaaguggugcccccccgaccagcucgucaaccuccacgacuuccgcuccgacgagaucgagcaccucgucgucgaggagcucgucaagaagcgcgaggagugccucgacgcccucgaguccaucaugaccaccaaguccgucuccuuccgccgccucucccaccuccgcaagcucguccccggcuucggcaaggccuacaccaucuucaacaagacccucauggaggccgacgcccacuacaaguccguccgcaccuggaacgagaucauccccuccaagggcugccuccgcgucggcggccgcugccacccccacgucaacggcgucuucuucaacggcaucauccucggccccgacggccacguccucauccccgagaugcaguccucccuccuccagcagcacauggagcuccucgaguccuccgucaucccccucaugcacccccucgccgaccccuccaccgucuucaaggacggcgacgaggccgaggacuucgucgagguccaccuccccgacguccacaagcagaucuccggcgucgaccucggccuccccaacuggggcaaguacguccucgucuccgccggcguccucgucguccucaugcucgccaucuucaucaugaccugcugcggccgcgucaaccgccccaaguccacccagcacucccucgagggcaccggccgcaaggucuccgucaccucccaguccggcaaggucaucuccuccugggaguccuacaaguccggcggcgagacccgccucuga

SEQ ID NO: 127476 - RNA, 1575 nt, Artificial Sequence; identical to SEQ ID NO: 126935
  derived and/or modified CDS sequence (opt2) from glycoprotein__RABV__JX944584.1

SEQ ID NO: 127477 - RNA, 1575 nt, Artificial Sequence
  derived and/or modified CDS sequence (opt2) from glycoprotein__RABV__JX944586.1
auggucccccagguccuccucuucgucccccuccucgucuucuccaugugcuucggcaaguuccccaucuacaccauccccgacaagcucggccccuggucccccaucgacauccaccaccucuccugccccaacaaccucgucgucgaggacgagggcugcaccaaccucuccggcuucuccuacauggagcucaaggucggcuacaucuccgccaucaaggucaacggcuucaccugcaccggcgucgucaccgaggccgagaccuacaccaacuucgucggcuacgucaccaccaccuucaagcgcaagcacuuccgccccacccccgacgccugccgcgccgccuacaacuggaagauggccggcgacccccgcuacgaggagucccuccacaaccccuaccccgacuaccacuggcuccgcaccgucaagaccaccaaggagucccucgucaucaucucccccuccgucgccgaccucgaccccuacgacaagucccuccacucccgcgucuuccccuccggcaagugcuccggcaucaccaucuccuccaccuacugcuccaccaaccacgacuacaccaucuggaugcccgagaacccccgccucggcaccuccugcgacaucuucaccaacucccgcggcaagcgcgccuccaagggcggcaagaccugcggcuucgucgacgagcgcggccucuacaagucccucaagggcgccugcaagcucaagcucugcggcguccucggccuccgccucauggacggcaccugggucgccaugcagaccuccgacgagaccaaguggugcccccccgaccagcucgucaaccuccacgacuuccgcuccgacgagaucgagcaccucgucgucgaggagcucgucaagaagcgcgaggagugccucgacgcccucgaguccaucaugaccaccaaguccgucuccuuccgccgccucucccaccuccgcaagcucguccccggcuucggcaaggccuacaccaucuucaacaagacccucauggaggccgacgcccacuacaaguccauccgcaccuggaacgagaucauccccuccaagggcugccuccgcgucggcggccgcugccacccccacgucaacggcgucuucuucaacggcaucauccucggccccgacggccacguccucauccccgagaugcaguccucccuccuccagcagcacauggagcuccucgaguccuccgucaucccccucaugcacccccucgccgaccccuccaccgucuucaaggacggcgacgaggccgaggacuucgucgagguccaccuccccgacguccacaagcagaucuccggcgucgaccucggccuccccuccuggggcaaguacguccucgucuccgccggcguccucgucguccucaugcucaccaucuucaucaugaccugcugcggccgcguccgccgccccaaguccacccagcacucccucggcgagaccggccgcaaggucuccgucaccucccaguccggcaaggucaucuccuccugggaguccuacaaguccggcggcgagacccgccucuga

SEQ ID NO: 127478 - RNA, 1575 nt, Artificial Sequence; identical to SEQ ID NO: 126935
  derived and/or modified CDS sequence (opt2) from glycoprotein__RABV__JX944587.1

SEQ ID NO: 127479 - RNA, 1575 nt, Artificial Sequence
  derived and/or modified CDS sequence (opt2) from glycoprotein__RABV__JX944588.1
auggucccccagguccuccucuucgucccccuccucgucuucucccucugcuucggcaaguuccccaucuacaccauccccgacaagcucggccccuggucccccaucgacauccaccaccucuccugccccaacaaccucgucgucgaggacgagggcugcaccaaccucuccggcuucuccuacauggagcucaaggucggcuacaucuccgccaucaaggucaacggcuucaccugcaccggcgucgucaccgaggccgagaccuacaccaacuucgucggcuacgucaccaccaccuuccgccgcaagcacuuccgccccacccccgacgccugccgcgccgccuacaacuggaagcucgccggcgacccccgcuacgaggagucccuccacaaccccuaccccgacuaccacuggcuccgcaccgucaagaccaccaaggagucccucgucaucaucucccccuccgucgccgaccucgaccccuacgacaagucccuccacucccgcgucuuccccggcggcaagugcuccggcaucaccaucuccuccaccuacugcuccaccaaccacgacuacaccaucuggaugcccgagaacccccgccucggcaccuccugcgacaucuucgucaacucccgcggcaagcgcgccuccaagggcggcaagaccugcggcuucgucgacgagcgcggccucuacaagucccucaagggcgccugcaagcucaagcucugcggcguccccggccuccgccucauggacggcaccugggccgccauccagaccuccgacgagaccaaguggugcccccccaaccagcucgucaaccuccacgacuuccgcuccgacgagaucgagcaccucgucgucgaggagcucgucaagaagcgcgaggagugccucgacgcccucgaguccaucaugaccaccaaguccgucuccuuccgccgccucucccaccuccgcaagcucguccccggcuucggcaaggccuacaccaucuucaacaagacccucauggaggccgacgcccacuacaaguccguccgcaccuggaacgagaucauccccuccaagggcugccuccgcgucggcggccgcugccacccccacgucaacggcgucuucuucaacggcaucauccucggccccgacggccacguccucauccccgagaugcaguccucccuccuccagcagcacauggagcuccucgaguccuccgucaucccccucaugcacccccucgccgaccccuccaccgucuucaaggacggcgacgaggccgaggacuucgucgagguccaccuccccgacguccacaagcucaucuccggcgucgaccucggccuccccuccuggggcaaguacguccucauguccgccggcguccucaccgcccucaugcucaugaucuuccucaugaccugcugccgccgcggcaaccaggccggcuccaagcagcacggccucgagggcaccggccgcaaggucuccgucaccucccagaacggcaaggucaucuccuccugggaguccuacaaguccggcggcgagacccgccucuga

SEQ ID NO: 127480 - RNA, 1575 nt, Artificial Sequence
  derived and/or modified CDS sequence (opt2) from glycoprotein__RABV__JX944593.1
auggucccccagguccuccucuucgucccccuccucgccuucuccaugugcuucggcaaguuccccaucuacaccauccccgacaagcucggccccuggucccccaucgacauccaccaccucuccugccccaacaaccucgucgucgaggacgagggcugcaccaaccucuccggcuucuccuacauggagcucaaggucggcuacaucuccgccaucaaggucaacggcuucaccugcaccggcgucgucaccgaggccgagaccuacaccaacuucgucggcuacgucaccaccaccuucaagcgcaagcacuuccgccccacccccgacgccugccgcgccgccuacaacuggaagauggccggcgacccccgcuacgaggagucccuccacaaccccuaccccgacuaccacuggcuccgcaccgucaagaccaccaaggagucccucgucaucaucucccccuccgucgccgaccucgaccccuacgacaagucccuccacucccgcgucuuccccuccggcaagugcuccggcaucaccaucuccuccaccuacugcuccaccaaccacgacuacaccaucuggaugcccgagaacccccgccucggcaccuccugcgacaucuucaccaacucccgcggcaagcgcgccuccaagggcggcaagaccugcggcuucgucgacgagcgcggccucuacaagucccucaagggcgccugcaagcucaagcucugcggcguccucggccuccgccucauggacggcaccugggucgccaugcagaccuccgacgagaccaaguggugcccccccgaccagcucgucaaccuccacgacuuccgcuccgacgagaucgagcaccucgucgucgaggagcucgucaagaagcgcgaggagugccucgacgcccucgaguccaucaugaccaccaaguccgucuccuuccgccgccucucccaccuccgcaagcucguccccggcuucggcaaggccuacaccaucuucaacaagacccucauggaggccgacgcccacuacaaguccguccgcaccuggaacgagaucauccccuccaagggcugccuccgcgucggcggccgcugccacccccacgucaagggcgucuucuucaacggcaucauccucggccccgacggccacguccucauccccgagaugcaguccucccuccuccagcagcacauggagcuccucgaguccuccgucaucccccucaugcacccccucgccgaccccuccaccgucuucaaggacggcgacgaggccgaggacuucgucgagguccaccuccccgacguccacaagcagaucuccggcgucgaccucggccuccccuccuggggcaaguacguccucgucuccgccggcguccucgucguccucaugcucaccaucuucaucaucaccugcugcggccgcguccaccgccccaaguccacccagcacggccucggcggcaccggccgcaaggucuccgucaccucccaguccggcaaggucaucuccuccugggaguccuacaaguccggcggcgagacccgccucuga

SEQ ID NO: 127481 - RNA, 1575 nt, Artificial Sequence
  derived and/or modified CDS sequence (opt2) from glycoprotein__RABV__JX987718.1
auggucccccagguccuccucuucgucccccuccucgucuucuccaugugcuucggcaaguuccccaucuacaccauccccgacaagcucggccccuggucccccaucgacauccaccaccucuccugccccaacaaccucgucgucgaggacgagggcugcaccaaccucuccggcuucuccuacauggagcucaaggucggcuacaucuccgccaucaaggucaacggcuucaccugcaccggcgucgucaccgaggccgagaccuacaccaacuucgucggcuacgucaccaccaccuucaagcgcaagcacuuccgccccacccccgacgccugccgcgccgccuacaacuggaagauggccggcgacccccgcuacgaggagucccuccacaaccccuaccccgacuaccacuggcuccgcaccgucaagaccaccaaggagucccucgucaucaucucccccuccgucgccgaccucgaccccuacgacaagucccuccacucccgcgucuuccccuccggcaagugccucggcaucaccaucuccuccaccuacugcuccaccaaccacgacuacaccaucuggaugcccgagaacccccgccucggcaccuccugcgacaucuucaccaacucccgcggcaagcgcgccuccaagggcuccaagaccugcggcuucgucgacgagcgcggccucuacaagucccucaagggcgccugcaagcucaagcucugcggcguccucggccuccgccucauggacggcaccugggucgccaugcagaccuccgacgagaccaaguggugcccccccgaccagcucgucaaccuccacgacuuccgcuccgacgagaucgagcaccucgucgucgaggagcucgucaagaagcgcgaggagugccucgacgcccucgaguccaucaugaccaccaaguccgucuccuuccgccgccucucccaccuccgcaagcucguccccggcuucggcaaggccuacaccaucuucaacaagacccucauggaggccgacgcccacuacaaguccguccgcaccuggaacgagaucauccccuccaagggcugccuccgcgucggcggccgcugccacccccacgucaacggcgucuucuucaacggcaucauccucggccccgacggccacguccucauccccgagaugcaguccucccuccuccagcagcacauggagcuccucgaguccuccgucaucccccucaugcacccccucgccgaccccuccaccgucuucaaggagggcgacgaggccgaggacuucgucgagguccaccuccccgacguccacaagcagaucuccggcgucgaccucggccuccccuccuggggcaaguacguccucgucuccgccggcguccucgucguccucaugcucaccaucuucaucaugaccugcugcggccgcguccaccgccccaaguccacccagcacucccucggcggcaccggccgcaaggucuccgucaccucccaguccggcaaggucaucuccuccugggaguccuacaaguccggcggcgagacccgccucuga

SEQ ID NO: 127482 - RNA, 1575 nt, Artificial Sequence
  derived and/or modified CDS sequence (opt2) from glycoprotein__RABV__JX987719.1
auggucccccagguccuccucuucgucccccuccucgucuucuccaugugcuucggcaaguuccccaucuacaccauccccgacaagcucggccccuggucccccaucgacauccaccaccucuccugccccaacaaccucgucgucgaggacgagggcugcaccaaccucuccggcuucuccuacauggagcucaaggucggcuacaucuccgccaucaaggucaacggcuucaccugcaccggcgucgucaccgaggccgagaccuacaccaacuucgucggcuacgucaccaccaccuucaagcgcaagcacuuccgccccacccccgacgccugccgcgccgccuacaacuggaagcucgccggcgacccccgcuacgaggagucccuccacaaccccuaccccgacuaccacuggcuccgcaccgucaagaccaccaaggagucccucgucaucaucucccccuccgucgccgaccucgaccccuacgacaagucccuccacucccgcgucuuccccuccggcaagugccucggcaucaccaucuccuccaccuacugcuccaccaaccacgacuacaccaucuggaugcccgagaacccccgccucggcaccuccugcgacaucuucaccaacucccgcggcaagcgcgccuccaagggcuccaagaccugcggcuucgucgacgagcgcggccucuacaagucccucaagggcgccugcaagcucaagcucugcggcguccucggccuccgccucauggacggcaccugggucgccaugcagaccuccgacgagaccaaguggugcccccccgaccagcucgucaaccuccacgacuuccgcuccgacgagaucgagcaccucgucgucgaggagcucgucaagaagcgcgaggagugccucgacgcccucgaguccaucaugaccaccaaguccgucuccuuccgccgccucucccaccuccgcaagcucguccccggcuucggcaaggccuacaccaucuucaacaagacccucauggaggccgacgcccacuacaaguccauccgcaccuggaacgagaucauccccuccaagggcugccuccgcgucggcggccgcugccacccccacgucaacggcgucuucuucaacggcaucauccucggccccgacggccacguccucauccccgagaugcaguccucccuccuccagcagcacauggagcuccucgaguccuccgucaucccccucaugcacccccucgccgaccccuccaccgucuucaaggacggcgacgaggccgaggacuucgucgagguccaccuccccgacguccacaagcagaucuccggcgucgaccucggccuccccuccuggggcaaguacguccucgucuccgccggcguccucgucguccucaugcucaccaucuucaucaugaccugcugcggccgcguccgccgccccaaguccacccagcacucccucggcggcaccggccgcaaggucuccgucaccucccaguccggcaaggucaucuccuccugggaguccuacaaguccggcggcgagacccgccucuga

SEQ ID NO: 127483 - RNA, 1575 nt, Artificial Sequence; identical to SEQ ID NO: 127481
  derived and/or modified CDS sequence (opt2) from glycoprotein__RABV__JX987720.1

SEQ ID NO: 127484 - RNA, 1575 nt, Artificial Sequence
  derived and/or modified CDS sequence (opt2) from glycoprotein__RABV__JX987721.1
auggucccccagguccuccucuucgucccccuccucgucuucucccucugcuucggcaaguuccccaucuacaccauccccgacaagcucggccccuggucccccaucgacauccaccaccucuccugccccaacaaccucgucgucgaggacgagggcugcaccaaccucuccggcuucuccuacauggagcucaaggucggcuacaucuccgccaucaaggucaacggcuucaccugcaccggcgucgucaccgaggccgagaccuacaccaacuucgucggcuacgucaccaccaccuuccgccgccgccacuuccgccccacccccgacaccugccgcgccgccuacaacuggaagcucgccggcgacccccgcuacgaggagucccuccacaaccccuaccccgacuaccacuggcuccgcaccgucaagaccaccaaggagucccucgucaucaucucccccuccgucgccgaccucgaccccuacgacaagucccuccacucccgcgucuuccccggcggcaagugcuccggcaucaccgucuccuccaccuacugcuccaccaaccacgacuacaccaucuggaugcccgagaacccccgccucggcaccuccugcgacaucuucgucaacucccgcggcaagcgcgccuccaagggcggcaagaccugcggcuucgucgacgagcgcggccucuacaagucccucaagggcgccugcaagcucaagcucugcggcguccccggccuccgccucauggacggcaccugggccgccauccagaccuccgacgagaccaaguggugcccccccgaccagcucgucaaccuccacgacuuccgcuccgacgagaucgagcaccucgucgucgaggagcucgucaagaagcgcgaggagugccucgacgcccucgaguccaucaugaccaccaaguccgucuccuuccgccgccucucccaccuccgcaagcucguccccggcuucggcaaggccuacaccaucuucaacaagacccucauggaggccgacgcccacuacaaguccguccgcaccuggaacgagaucauccccuccaagggcugccuccgcgucggcggccgcugccacccccacgucaacggcgucuucuucaacggcaucauccucggccccgacggccacguccucauccccgagaugcaguccucccuccuccagcagcacauggagcuccucgaguccuccgucaucccccucaugcacccccucgccgaccccuccaccgucuucaaggacggcggcgaggccgaggacuucgucgagguccaccuccccgacguccacaagcucaucuccggcgucgaccucggccuccccuccuggggcaaguacguccucauguccgccggcguccucaccgcccucaugcucaugaucuuccucaugaccugcugccgccgcggcaaccaggccggcuccaagcagcacggccucgagggcaccggccgcaaggucuccgucaccucccagaacggcaaggucaucuccuccugggaguccuacaaguccggcggcgagacccgccucuga

SEQ ID NO: 127485 - RNA, 1575 nt, Artificial Sequence; identical to SEQ ID NO: 127481
  derived and/or modified CDS sequence (opt2) from glycoprotein__RABV__JX987723.1

SEQ ID NO: 127486 - RNA, 1575 nt, Artificial Sequence
  derived and/or modified CDS sequence (opt2) from glycoprotein__RABV__JX987724.1
auggucccccagguccuccucuucgucccccuccucgucuucucccucugcuucggcaaguuccccaucuacaccauccccgacaagcucggccccuggucccccaucgacauccaccaccucuccugccccaacaaccucgucgucgaggacgagggcugcaccaaccucuccggcuucuccuacauggagcucaaggucggcuacaucuccgccaucaaggucaacggcuucaccugcaccggcgucgucaccgaggccgagaccuacaccaacuucgucggcuacgucaccaccaccuuccgccgcaagcacuuccgccccacccccgacgccugccgcgccgccuacaacuggaagcucgccggcgacccccgcuacgaggagucccuccacaaccccuaccccgacuaccacuggcuccgcaccgucaagaccaccaaggagucccucgucaucaucucccccuccgucgccgaccucgaccccuacgacaagucccuccacucccgcgucuuccccggcggcaagugcuccggcaucaccgucuccuccaccuacugcuccaccaaccacgacuacaccaucuggaugcccgagaacccccgccucggcaccuccugcgacaucuucgucaacucccgcggcaagcgcgccuccaagggcggcaagaccugcggcuucgucgacgagcgcggccucuacaagucccucaagggcgccugcaagcucaagcucugcggcguccccggccuccgccucauggacggcaccugggccgccauccagaccuccgacgagaccaaguggugcccccccgaccagcucgucaaccuccacgacuuccgcuccgacgagaucgagcaccucgucgucgaggagcucgucaagaagcgcgaggagugccucgacgcccucgaguccaucaugaccaccaaguccgucuccuuccgccgccucucccaccuccgcaagcucguccccggcuucggcaaggccuacaccaucuucaacaagacccucauggaggccgacgcccacuacaaguccguccgcaccuggaacgagaucauccccuccaagggcugccuccgcgucggcggccgcugccacccccacgucaacggcgucuucuucaacggcaucauccucggccccgacggccacguccucauccccgagaugcaguccucccuccuccagcagcacauggagcuccucgaguccuccgucaucccccucaugcacccccucgccgaccccuccaccgucuucaaggacggcgacgaggccgaggacuucgucgagguccaccuccccgacguccacaagcucaucuccggcgucgaccucggccuccccuccuggggcaaguacguccucauguccgccggcguccucaccgcccucaugcucaugaucuuccucaugaccugcugccgccgcggcaaccaggccggcuccaagcagcacggccucgagcgcaccggccgcaaggucuccgucaccucccagaacggcaaggucaucuccuccugggaguccuacaaguccggcggcgagacccgccucuga

SEQ ID NO: 127487 - RNA, 1575 nt, Artificial Sequence
  derived and/or modified CDS sequence (opt2) from glycoprotein__RABV__JX987725.1
auggucccccagguccucugguucgucccccuccucgucuucuccaugugcuucggcaaguuccccaucuacaccauccccgacaagcucggccccuggucccccaucgaccuccaccaccucuccugccccaacaaccucgucgucgaggacgagggcugcaccaaccucuccggcuucuccuacauggagcucaaggucggcuacaucuccgccaucaaggucaacggcuucaccugcaccggcgucgucaccgaggccgagaccuacaccaacuucgucggcuacgucaccaccaccuucaagcgcaagcacuuccgccccacccccgacgccugccgcgccgccuacaacuggaagauggccggcgacccccgcuacgaggagucccuccacaaccccuaccccgacuaccacuggcuccgcaccgucaagaccaccaaggagucccucgucaucaucucccccuccgucgccgaccucgaccccuacgacaagucccuccacucccgcgucuuccccuccggcaagugcuccggcaucaccaucuccuccaccuacugcuccaccaaccacgacuacaccaucuggaugcccgagaacccccgccucggcaccuccugcgacaucuucaccaacucccgcggcaagcgcgccuccaagggcuccaagaccugcggcuucgucgacgagcgcggccucuacaagucccucaagggcgccugcaagcucaagcucugcggcguccucggccuccgccucauggacggcaccugggucgccaugcagaccuccgacgagaccaaguggugcccccccgaccagcucgucaaccuccacgacuuccgcuccgacgagaucgagcaccucgucgucgaggagcucgucaagaagcgcgaggagugccucgacgcccucgaguccaucaugaccaccaaguccgucuccuuccgccgccucucccaccuccgcaagcucguccccggcuucggcaaggccuacaccaucuucaacaagacccucauggaggccgacgcccacuacaaguccguccgcaccuggaacgagaucauccccuccaagggcugccuccgcgucggcggccgcugccacccccacgucaacggcgucuucuucaacggcaucauccucggccccgacggccacguccucauccccgagaugcaguccucccuccuccagcagcacauggagcuccucgaguccuccgucaucccccucaugcacccccucgccgaccccuccaccgucuucaaggacggcgacgaggccgaggacuucgucgagguccaccuccccgacguccacaagcagaucuccggcgucgaccucggccuccccaacuggggcaaguacguccucgucuccgccggcguccucgucguccucaugcucgccaucuucaucaugaccugcugcggccgcgucaaccgccccaaguccacccagcacucccucgagggcaccggccgcaaggucuccgucaccucccaguccggcaaggucaucuccuccugggaguccuacaaguccggcggcgagacccgccucuga

SEQ ID NO: 127488 - RNA, 1575 nt, Artificial Sequence; identical to SEQ ID NO: 126935
  derived and/or modified CDS sequence (opt2) from glycoprotein__RABV__JX987727.1

SEQ ID NO: 127489 - RNA, 1575 nt, Artificial Sequence
  derived and/or modified CDS sequence (opt2) from glycoprotein__RABV__JX987728.1
auggucccccaggcccuccucuucgucccccuccucgucuucucccucugcuucggcaaguuccccaucuacaccauccccgacaagcucggccccuggucccccaucgacauccaccaccucuccugccccaacaaccucgucgucgaggacgagggcugcaccaaccucuccggcuucuccuacauggagcucaaggucggcuacaucuccgccaucaaggucaacggcuucaccugcaccggcgucgucaccgaggccgagaccuacaccaacuucgucggcuacgucaccaccaccuucaagcgcaagcacuuccgccccacccccgacgccugccgcgccgccuacaacuggaagauggccggcgacccccgcuacgaggagucccuccacaaccccuaccccgacuaccacuggcuccgcaccgucaagaccaccaaggagucccucgucaucaucucccccuccgucgccgaccucgaccccuacgacaagucccuccacucccgcgucuuccccuccggcaagugcuccggcaucaccgucuccuccaccuacugcuccaccaaccacgacuacaccaucuggaugcccgagaacccccgccucggcaccuccugcgacaucuucaccaacucccgcggcaagcgcgccuccaagggcuccaagaccugcggcuucgucgacgagcgcggccucuacaagucccucaagggcgccugcaagcucaagcucugcggcguccucggccuccgccucauggacggcaccugggucgccaugcagaccuccgacgagaccaaguggugcccccccgaccagcucgucaaccuccacgacuuccgcuccgacgagaucgagcaccucgucgucgaggagcucgucaagaagcgcgaggagugccucgacgcccucgaguccaucaugaccaccaaguccgucuccuuccgccgccucucccaccuccgcaagcucguccccggcuucggcaaggccuacaccaucuucaacaagacccucauggaggccgacgcccacuacaaguccguccgcaccuggaacgagaucauccccuccaagggcugccuccgcgucggcggccgcugccacccccacgucaacggcgucuucuucaacggcaucauccucggccccgacggccacguccucauccccgagaugcaguccucccuccuccagcagcacauggagcuccucgaguccuccgucaucccccucaugcacccccucgccgaccccuccaccgucuucaaggacggcgacgaggccgaggacuucgucgagguccaccuccccgacguccacaagcaggucuccggcgucgaccucggccuccccaacuggggcaaguacguccuccucuccgccggcgcccucaucgcccucaugcucaugaucuuccucaugaccugcugccgccgcgucaaccgccccgaguccacccagcccucccucggcggcaccggccgcaaggucuccaucaccucccaguccggcaaggucaucuccuccugggaguccuacaaguccggcggcgagacccgccucuga

SEQ ID NO: 127490 - RNA, 1575 nt, Artificial Sequence
  derived and/or modified CDS sequence (opt2) from glycoprotein__RABV__JX987729.1
auggucccccagguccuccucuucgucccccuccucgucuucccccucugcuccggcaaguuccccaucuacaccauccccgacaagcucggccccuggucccccaucgacauccaccaccucuccugccccaacaaccucgucgucgaggacgagggcugcaccaaccucuccggcuucuccuacauggagcucaaggucggcuacaucuccgccaucaaggucaacggcuucaccugcaccggcgucgucaccgaggccgagaccuacaccaacuucgucggcuacgucaccaccaccuuccgccgcaagcacuuccgccccacccccgacgccugccgcgccgccuacaacuggaagauggccggcgacccccgcuacgaggagucccuccacaaccccuaccccgacuaccacuggcuccgcaccgucaagaccaccaaggagucccucgucaucaucucccccuccgucgccgaccucgaccccuacgacaagucccuccacucccgcgucuuccccuccggcaagugcuccggcaucaccgucuccuccaccuacugcuccaccaaccacgacuacaccaucuggaugcccgagaacccccgccucggcaccuccugcgacaucuucaccaacucccgcggcaagcgcgccuccaagggcuccaagaccugcggcuucgucgacgagcgcggccucuacaagucccucaagggcgccugcaagcucaagcucugcggcguccucggccuccgccucauggacggcaccuggaucgccaugcagaccuccgacgagaccaaguggugcccccccgaccagcucgucaaccuccacgacuuccgcuccgacgagaucgagcaccucgucgucgaggagcucgucaagaagcgcgaggagugccucgacgcccucgaguccaucaugaccaccaaguccgucuccuuccgccgccucucccaccuccgcaagcucguccccggcuucggcaaggccuacaccaucuucaacaagacccucauggaggccgacgcccacuacaaguccguccgcaccuggaacgagaucauccccuccaagggcugccuccgcgucggcggccgcugccacccccacgucaacggcgucuucuucaacggcaucauccucggccccgacggccacguccucauccccgagaugcaguccucccuccuccagcagcacauggagcuccucgaguccuccgucaucccccucaugcacccccucgccgaccccuccaccgucuucaaggacggcgacgaggccgaggacuucgucgagguccaccuccccgacguccacaagcaggucuccggcgucgaccucggccuccccaacuggggcaaguacguccuccucuccgccggcgcccucaucgcccucaugcucaugaucuuccucaugaccugcugccgcaaggucaaccgccccgaguccacccagcgcucccucggcggcaccggccgcaaggucuccaucaccucccaguccggcaaggucaucuccuccugggaguccuacaaguccggcggcgagacccgccucuga

SEQ ID NO: 127491 - RNA, 1575 nt, Artificial Sequence
  derived and/or modified CDS sequence (opt2) from glycoprotein__RABV__JX987730.1
auggucccccaggcccuccucuucgucccccuccucgccuuccccaugugcuucggcaaguuccccaucuacaccauccccgacaagcucggccccuggucccccaucgacauccaccaccucuccugccccaacaaccucgucgucgaggacgagggcugcaccaaccucuccggcuucuccuacauggagcucaaggucggcuacaucuccgccaucaaggucaacggcuucaccugcaccggcgucgucaccgaggccgagaccuacaccaacuucgucggcuacgucaccaccaccuucaagcgcaagcacuuccgccccacccccgacgccugccgcgccgccuacaacuggaagauggccggcgacccccgcuacgaggagucccuccacaaccccuaccccgacuaccacuggcuccgcaccgucaagaccaccaaggagucccucaucaucaucucccccuccgucgccgaccucgaccccuacgacaagucccuccacucccgcgucuuccccuccggcaagugccucggcaucaccaucuccuccaccuacugcuccaccaaccacgacuacaccaucuggaugcccgagaaccuccgccucggcaccuccugcgacaucuucaccaacucccgcggcaagcgcgccuccaagggcuccaagaccugcggcuucgucgacgagcgcggccucuacaagucccucaagggcgccugcaagcucaagcucugcggcguccucggccuccgccucauggacggcaccugggucgccaugcccaccuccgacgagaccaaguggugcccccccgaccagcucgucaaccuccacgacuuccgcuccgacgagaucgagcaccucgucgucgaggagcucgucaagaagcgcgaggagugccucgacgcccucgaguccaucaugaccaccaaguccgucuccuuccgccgccucucccaccuccgcaagcucguccccggcuucggcaaggccuacaccaucuucaacaagacccucauggaggccgacgcccacuacaaguccguccgcaccuggaacgagaucauccccuccaagggcugccuccgcgucggcggccgcugccacccccacgucaacggcgucuucuucaacggcaucauccucggccccgacggccacguccucauccccgagaugcaguccucccuccuccagcagcacauggagcuccucgaguccuccgucaucccccucaugcacccccucgccgaccccuccaccgucuucaaggacggcgacgaggccgaggacuucgucgagguccaccuccccgacguccacaagcagaucuccggcgucgaccucggccuccccaacuggggcaaguacguccucaucaucgccggcguccucaucgccaugauccucaccaucuuccucaugaccugcugcggccgcggcaaccgccccaaguccacccagcacucccucggcggcaucggccgcaaggucuccuccaccucccaguccggcaaggucaucuccuccugggaguccuacaaguccggcggcgagacccgccucuga

SEQ ID NO: 127492 - RNA, 1575 nt, Artificial Sequence; identical to SEQ ID NO: 127491
  derived and/or modified CDS sequence (opt2) from glycoprotein__RABV__JX987731.1

SEQ ID NO: 127493 - RNA, 1575 nt, Artificial Sequence
  derived and/or modified CDS sequence (opt2) from glycoprotein__RABV__JX987732.1
auggucccccaggcccuccucuucgucccccuccucgucuucccccucugcuucggcaaguuccccaucuacaccauccccgacaagcucggccccuggucccccaucgacauccaccaccucuccugccccaacaaccucgucgucgaggacgagggcugcaccaaccucuccggcuucuccuacauggagcucaaggucggcuacaucuccgccaucaaggucaacggcuucaccugcaccggcgucgucaccgaggccgagaccuacaccaacuucgucggcuacgucaccaccaccuucaagcgcaagcacuuccgccccacccccgacgccugccgcgccgccuacaacuggaagauggccggcgacccccgcuacgaggagucccuccacaaccccuaccccgacuaccacuggcuccgcaccgucaagaccaccaaggagucccucgucaucaucucccccuccgucgccgaccucgaccccuacgacaagucccuccacucccgcgucuuccccuccggcaagugcuccggcaucaccgucuccuccaccuacugcuccaccaaccacgacuacaccaucuggaugcccgagaacccccgccucggcaccuccugcgacaucuucaccaacucccgcggcaagcgcgccuccaagggcuccaagaccugcggcuucgucgacgagcgcggccucuacaagucccucaagggcgccugcaagcucaagcucugcggcguccucggccuccgccucauggacggcaccugggucgccaugcagaccuccgacgagaccaaguggugcccccccgaccagcucgucaaccuccacgacuuccgcuccgacgagaucgagcaccucgucgucgaggagcucgucaagaagcgcgaggagugccucgacgcccucgaguccaucaugaccaccaaguccgucuccuuccgccgccucucccaccuccgcaagcucguccccggcuucggcaaggccuacaccaucuucaacaagacccucauggaggccgacgcccacuacaaguccguccgcaccuggaacgagaucauccccuccaagggcugccuccgcgucggcggccgcugccacccccacgucaacggcgucuucuucaacggcaucauccucggccccgacggccacguccucauccccgagaugcaguccucccuccuccagcagcacauggagcuccucgaguccuccgucaucccccucaugcacccccucgccgaccccuccaccgucuucaaggacggcgacgaggccgaggacuucgucgagguccaccuccccgacguccacaagcaggucuccggcgucgaccucggccuccccaacuggggcaaguacguccuccucuccgccggcgcccucaucgcccucaugcucaucaucuuccucaugaccugcugccgccgcgucaaccgccccgaguccacccagcgcucccucggcggcaccggccgcaaggucuccgucaccucccaguccggcaaggucaucuccuccugggaguccuacaaguccggcggcgagacccgccucuga

SEQ ID NO: 127494 - RNA, 1575 nt, Artificial Sequence
  derived and/or modified CDS sequence (opt2) from glycoprotein__RABV__JX987733.1
auggucccccaggcccuccucuucgucccccuccucgccuuccccaugugcuucggcaaguuccccaucuacaccauccccgacaagcucggccccuggucccccaucgacauccaccaccucuccugccccaacaaccucgucgucgaggacgagggcugcaccaaccucuccggcuucuccuacauggagcucaaggucggcuacaucuccgccaucaaggucaacggcuucaccugcaccggcgucgucaccgaggccgagaccuacaccaacuucgucggcuacgucaccaccaccuucaagcgcaagcacuuccgccccacccccgacgccugccgcgccgccuacaacuggaagauggccggcgacccccgcuacgaggagucccuccacaaccccuaccccgacuaccacuggcuccgcaccgucaagaccaccaaggagucccucaucaucaucucccccuccgucgccgaccucgaccccuacgacaagucccuccacucccgcgucuuccccuccggcaagugccucggcaucaccaucuccuccaccuacugcuccaccaaccacgacuacaccaucuggaugcccgagaaccuccgccucggcaccuccugcgacaucuucaccaacucccgcggcaagcgcgccuccaagggcuccaagaccugcggcuucgucgacgagcgcggccucuacaagucccucaagggcgccugcaagcucaagcucugcggcguccucggccuccgccucauggacggcaccugggucgccaugcagaccuccgacgagaccaaguggugcccccccgaccagcucgucaaccuccacgacuuccgcuccgacgagaucgagcaccucgucgucgaggagcucgucaagaagcgcgaggagugccucgacgcccucgaguccaucaugaccaccaaguccgucuccuuccgccgccucucccaccuccgcaagcucguccccggcuucggcaaggccuacaccaucuucaacaagacccucauggaggccgacgcccacuacaaguccguccgcaccuggaacgagaucauccccuccaagggcugccuccgcgucggcggccgcugccacccccacgucaacggcgucuucuucaacggcaucauccucggccccgacggccacguccucauccccgagaugcaguccucccuccuccagcagcacauggagcuccucgaguccuccgucaucccccucaugcacccccucgccgaccccuccaccgucuucaaggacggcgacgaggccgaggacuucgucgagguccaccuccccgacguccacaagcagaucuccggcgucgaccucggccuccccaacuggggcaaguacguccucaucaucgccggcguccucaucgccaugauccucaccaucuuccucaugaccugcugcggccgcggcaaccgccccgaguccacccagcacucccucggcggcaucggccgcaaggucuccgccaccucccaguccggcaaggucaucuccuccugggaguccuacaaguccggcggcgagacccgccucuga

SEQ ID NO: 127495 - RNA, 1575 nt, Artificial Sequence
  derived and/or modified CDS sequence (opt2) from glycoprotein__RABV__JX987734.1
auggucccccaggcccucuccuucgucccccuccucgucuucccccucugcuucggcaaguuccccaucuacaccauccccgacaagcucggccccuggucccccaucgacauccaccaccucuccugccccaacaaccucgucgucgaggacgagggcugcaccaaccucuccggcuucuccuacauggagcucaaggucggcuacaucuccgccaucaaggucaacggcuucaccugcaccggcgucgucaccgaggccgagaccuacaccaacuucgucggcuacgucaccaccaccuucaagcgcaagcacuuccgccccacccccgacgccugccgcgccgccuacaacuggaagauggccggcgacccccgcuacgaggagucccuccacaaccccuaccccgacuaccacuggcuccgcaccgucaagaccaccaaggagucccucgucaucaucucccccuccgucgccgaccucgaccccuacgacaagucccuccacucccgcgucuuccccuccggcaagugccucggcaucaccgucuccuccaccuacugcuccaccaaccacgacuacaccaucuggaugcccgagaacccccgccucggcaccuccugcgacaucuucaccaacucccgcggcaagcgcgccuccaagggcuccaagaccugcggcuucgucgacgagcgcggccucuacaagucccucaagggcgccugcaagcucaagcucugcggcguccucggccuccgccucauggacggcaccugggucgccaugcagaccuccgacgagaccaaguggugcccccccgaccagcucgucaacauccacgacuuccgcuccgacgagaucgagcaccucgucgucgaggagcucgucaagaagcgcgaggagugccucgacgcccucgaguccaucaugaccaccaaguccgucuccuuccgccgccucucccaccuccgcaagcucguccccggcuucggcaaggccuacaccaucuucaacaagacccucauggaggccgacgcccacuacaaguccguccgcaccuggaacgagaucauccccuccaagggcugccuccgcgucggcggccgcugccacccccacgucaacggcgucuucuucaacggcaucauccucggccccgacggccacguccucauccccgagaugcaguccucccuccuccagcagcacauggagcuccucgaguccuccgucaucccccucaugcacccccucgccgaccccuccaccgucuucaaggacggcgacgaggccgaggacuucgucgagguccaccuccccaacguccacaagcaggucuccggcgucgaccucggccuccccaacuggggcaaguacguccuccucuccgccggcgcccucaucgcccucaugcucaucaucuuccucaugaccugcugccgccgcgucaaccgcuccgaguccacccagcgcucccucggcggcgccggccgcaaggucuccaucaccucccagggcggcaaggucaucuccuccugggaguccuacaaguccggcggcgagacccgccucuga

SEQ ID NO: 127496 - RNA, 1575 nt, Artificial Sequence; identical to SEQ ID NO: 127374
  derived and/or modified CDS sequence (opt2) from glycoprotein__RABV__JX987749.1

SEQ ID NO: 127497 - RNA, 1575 nt, Artificial Sequence
  derived and/or modified CDS sequence (opt2) from glycoprotein__RABV__KC169986.1
augaucccccagguccuccucuucgucccccuccucgucuucuccuccugcuucggcaaguuccccaucuacaccauccccgacaagcucggccccuggucccccaucgacauccaccaccucuccugccccaacaaccucgucgucgaggacgagggcugcaccaaccucuccggcuucuccuacauggagcucaaggucggcuacaucuccgccaucaaggucaacggcuucaccugcaccggcgucgucaccgaggccgagaccuacaccaacuucgucggcuacgucaccaccaccuucaagcgcaagcacuuccgccccaugcccggcgccugccgcgccgccuacaacuggaagauggccggcgacccccgcuacgaggagucccuccacaaccccuaccccgacuaccacuggcuccgcaccgucaagaccaccaaggagucccucgucaucaucucccaguccgucgccgaccucgaccccuacgacaagucccuccacucccgcgucuuccccggcggcaagugcuccggcaucaccgucuccuccaccugcugcuccaccaaccacgacuacaccaucuggaugcccgagaacccccgccucggcaccuccugcgacaucuucaccaacucccgcggcaagcgcgccuccaagggcggcaagaccugcggcuucgucgacgagcgcggccucuacaagucccucaagggcgccugcaagcucaagcucugcggcguccucggccuccgccucauggacggcaccugggucgccauccagaccuccgacgagaucaaguggugcucccccgaccagcucgucaaccuccacgacuuccacuccgacgagaucgagcaccucgucgucgaggagcucgucaagaagcgcgaggagugccucgacgcccucgagaccaucaugaccaccaaguccgucuccuuccgccgccucucccaccuccgcaagcucguccccggcuucggcaaggccuacaccaucuucaacaagacccucauggaggccgacgcccacuacaaguccauccgcaccugggacgagaucauccccuccaagggcugccuccgcgucggcggccgcugccacccccacgucaacggcgucuucuucaacggcaucauccucggccccgacggccacguccucauccccgagaugcaguccucccuccuccaccagcacauggagcuccucgaguccuccgucaucccccucaugcacccccucgccgaccccuccgccgucuucaaggacggcgacgaggccgaggacuucgucgagguccaccuccccgacguccacaagcagaucuccggcgucgaccucggccuccccaacuggggcaaguacguccucaucuccgccggcgcccucaccgccuccaugcucaugaucuuccucaugaccugcugccgcaaggccaaccgcgccgaguccauccagcacaaccccggcgagaccggccgcaaggucuccgucaccucccacaacggccgcgucaucuccuccugggaguccuacaaguccggcggcgagaccaagcucuga

SEQ ID NO: 127498 - RNA, 1575 nt, Artificial Sequence
  derived and/or modified CDS sequence (opt2) from glycoprotein__RABV__KC171643.1
auggucccccaggcccuccucuucgucccccuccucgucuucuccaugugcuucggcaaguuccccaucuacaccauccccgacaagcucggccccuggucccccaucgacauccaccaccucuccugccccaacaaccucgucgucgaggacgagggcugcaccaaccucuccggcuucuccuacauggagcucaaggucggcuacaucuccgccaucaaggucaacggcuucaccugcaccggcgucgucaccgaggccgagaccuacaccaacuucgucggcuacgucaccaccaccuucaagcgcaagcacuuccgccccacccccgacgccugccgcgccgccuacaacuggaagauggccggcgacccccgcuacgaggagucccuccacaaccccuaccccgacuaccacuggcuccgcaccgucaagaccaccaaggagucccucgucaucaucucccccuccgucgccgaccucgaccccuacgacaagucccuccacucccgcgucuuccccaacggcaagugcuccggcaucaccaucuccuccaccuacugccccaccaaccacgacuacaccaucuggcuccccgagaacccccgccucggcaccuccugcgacaucuucaccaacucccgcggcaagcgcgccuccaagggcuccaagaccugcggcuucgucgacgagcgcggccucuacaagucccucaagggcgccugcaagcucaagcucugcggcguccucggccuccgccucauggacggcaccugggucgccaugcaggccuccgacgagaccaaguggugcccccccgaccagcucgucaaccuccacgacuuccgcuccgacgagaucgagcaccucgucgucgaggagcucgucaagaagcgcgaggagugccucgacgcccucgaguccaucaugaccaccaaguccgucuccuuccgccgccucucccaccuccgcaagcucguccccggcuucggcaaggccuacaccaucuucaacaagacccucauggaggccgacgcccacuacaaguccguccgcaccuggaacgagaucauccccuccaagggcugccuccgcgucggcggccgcugccacccccacgucaacggcgucuucuucaacggcaucauccucggccccgacggccacguccucauccccgagaugcaguccucccuccuccagcagcacauggagcuccucgaguccuccgucgucccccucaugcacccccucgccgaccccuccaccguccucaaggacggcgacgaggccgagaacuucgucgagguccaccuccccgacguccacaagcagaucuccggcgucgaccucggccuccccaacuggggcaaguacguccucgucuccgccggcguccucaucgcccucaugcucaucaucuuccucaugaccugcugcggccgcgucaaccgccccaaguccacccagcacaaccucggcggcaccggccgcaaggucuccgucaccccccaguccggcaaggucaucuccuccugggaguccuacaaguccggcggcggcacccgccucuga

SEQ ID NO: 127499 - RNA, 1575 nt, Artificial Sequence; identical to SEQ ID NO: 126850
  derived and/or modified CDS sequence (opt2) from glycoprotein__RABV__KC171644.1

SEQ ID NO: 127500 - RNA, 1575 nt, Artificial Sequence; identical to SEQ ID NO: 126855
  derived and/or modified CDS sequence (opt2) from glycoprotein__RABV__KC171645.1

SEQ ID NO: 127501 - RNA, 1575 nt, Artificial Sequence
  derived and/or modified CDS sequence (opt2) from glycoprotein__RABV__KC252633.1
auggucccccucguccuccucuucgucccccuccucgucuucccccucugcuccggcaaguuccccaucuacaccauccccgacaagcucggccccuggucccccaucgacauccaccaccucuccugccccaacaaccucgucgucgaggacgagggcugcgccaaccucuccggcuucuccuacauggagcucaaggucggcuacaucuccgccaucaaggucaacggcuucaccugcaccggcgucgucaccgaggccgagaccuacaccaacuucgucggcuacgucaccaccaccuuccgccgcaagcacuuccgccccacccccgacgccugccgcgccgccuacaacuggaagauggccggcgacccccgcuacgaggagucccuccacaaccccuaccccgacuaccacuggcuccgcaccgucaagaccaccaaggagucccucgucaucaucucccccuccgucgccgaccucgaccccuacgacaagucccuccacucccgcgucuuccccuccggcaagugcuccggcaucaccgucuccuccaccuacugcuccaccaaccacgacuacaccaucuggaugcccgagaaccuccgccucggcaccuccugcgacaucuucaccaacucccgcggcaagcgcgccuccaagggcuccaagaccugcggcuucgucgacgagcgcggccucuacaagucccucaagggcgccugcaagcucaagcucugcggcguccucggccuccgccucauggacggcaccugggucgccaugcagaccuccggcgagaccaaguggugcccccccgaccagcucgucaaccuccacgacuuccgcuccgacgagaucgagcaccucgucgucgaggagcucgucaagaagcgcgaggagugccucgacgcccucgaguccaucaugaccaccaaguccgucuccuuccgccgccucucccaccuccgcaagcucguccccggcuucggcaaggccuacaccaucuucaacaagacccucauggaggccgacgcccacuacaaguccguccgcaccuggaacgagaucauccccuccaagggcugccuccgcgucggcggccgcugccacccccacgucaacggcgucuucuucaacggcaucauccucggccccgacggccacguccucauccccgagaugcaguccucccuccuccagcagcacauggagcuccucgaguccuccgucaucccccucaugcacccccucgccgaccccuccaccgucuucaaggacggcgacgaggccgaggacuucgucgagguccaccuccccgacguccacaagcaggucuccggcgucgaccucggccuccccaacuggggcaaguacauccuccucuccgccggcgcccucaucgcccucaugcucaugaucuuccucaugaccugcugccgcaaguucaaccgccccgaguccacccagcgcucccucggcggcaccggccgcaaggucuccaucaccucccagggcggcaaggucaucuccuccugggaguccuacaaguccggcggcgagacccgccucuga

SEQ ID NO: 127502 - RNA, 1575 nt, Artificial Sequence
  derived and/or modified CDS sequence (opt2) from glycoprotein__RABV__KC737850.1
auggucccccaggcccuccucuucgucccccuccucgccgucuccuucugcuucggcaaguuccccaucuacaccauccccgacaagcucggccccuggucccccaucgacauccaccaccucuccugccccaacaaccucgucgucgaggacgagggcugcaccaaccucuccggcuucuccuacauggagcucaaggucggcuacaucuccgccaucaaggucaacggcuucaccugcaccggcgucgucaccgaggccgagaccuacaccaacuucgucggcuacgucaccaccaccuucaagcgcaagcacuuccgccccacccccgacgccugccgcuccgccuacaacuggaagauggccggcgacccccgcuacgaggagucccuccacaaccccuaccccgacuaccacuggcuccgcaccgucaagaccaccaaggagucccucgucaucaucucccccuccgucgccgaccucgaccccuacgacaagucccuccacucccgcgucuuccccuccggcaagugcuccggcaucaccgucuccuccaccuacugcuccaccaaccacgacuacaccaucuggcuccccgagaacccccgccucggcaccuccugcgacaucuucaccaacucccgcggcaagcgcgccuccaagggcuccaagaccugcggcuucgucgacgagcgcggccucuacaagucccucaagggcgccugcaagcucaagcucugcggcguccucggccuccgccucauggacggcaccugggucgccaugcagaccuccgacgagaccaaguggugcccccccgaccagcucgucaaccuccacgacuuccgcuccgacgagaucgagcaccucgucgucgaggagcucgucaagaagcgcgaggagugccucgacgcccucgaguccaucaugaccaccaaguccgucuccuuccgccgccucucccaccuccgcaagcucguccccggcuucggcaaggccuacaccaucuucaacaagacccucauggaggccgacgcccacuacaaguccguccgcaccuggaacgagaucauccccuccaagggcugccuccgcgucggcggccgcugccacccccacgucaacggcgucuucuucaacggcaucauccucggccccgacggccacguccucauccccgagaugcaguccucccuccuccagcagcacauggagcuccucgaguccuccgucaucccccucaugcacccccucgccgaccccuccaccgucuucaaggacggcgacgaggccgaggacuucgucgagguccaccuccccgacguccacaagcaggucuccggcgucgaccucggccuccccaacuggggcaaguacguccucaccuccgccggcguccucaucgcccucaugcucaucaucuuccucaugaccugcugccgccgcgucaaccgcuccgacuccacccagcgcucccucggccgcaccggccgcaaggucuccgucaccucccaguccggcaaggucaucuccuccugggaguccuacaaguccggcggcgagacccgccucuga

SEQ ID NO: 127503 - RNA, 1575 nt, Artificial Sequence
  derived and/or modified CDS sequence (opt2) from glycoprotein__RABV__KC762941.1
augauccuccagauccuccucuucgucccccuccucgucuucuccuccugcuucggcaaguuccccaucuacaccauccccgacaagcucggccccuggucccccaucgacauccaccaccucuccugccccaacaaccucgucgucgaggacgagggcugcaccaaccucuccggcuucuccuacauggagcucaaggucggcuacaucuccgccaucaaggucaacggcuucaccugcaccggcgucgucaccgaggccgagaccuacaccaacuucgucggcuacgucaccaccaccuucaagcgcaagcacuuccaccccaugcccgacgccugccgcgccgccuacaacuggaagauggccggcgacccccgcuacgaggagucccuccacaaccccuaccccgacuaccacuggcuccgcaccgucaagaccaccaaggagucccucgucaucaucucccccuccgucgccgaccucgaccccuacgacaagucccuccacucccgcgucuuccccggcggcaagugcuccggcaucaccgucuccuccaccugcugcuccaccaaccacgacuacaccaucuggaugcccgagaacccccgccucggcaccuccugcgacaucuucaccaacucccgcggcaagcgcgccuccaagggcggcaagaccugcggcuucgucgacgagcgcggccucuacaagucccucaagggcgccugcaagaugaagcucugcggcguccucggccuccgccucauggacggcaccugggucgccauccagaccuccgacgaggucaaguggugcucccccgaccagcucgucaaccuccacgacuuccacuccgacgagaucgagcaccucgucgucgaggagcucgucaagaagcgcgaggagugccucgacgcccucgagaccaucaugaccaccaaguccgucuccuuccgccgccucucccaccuccgcaagcucguccccggcuucggcaaggccuacaccaucuucaacaagacccucauggaggccgacgcccacuacaaguccauccagaccuggaacgagaucauccccuccaagggcugccuccgcgucggcggccgcugccacccccacgucaacggcgucuucuucaacggcaucauccucggccccgacggccacguccucauccccgagaugcaguccucccuccuccaccagcacauggagcuccucgaguccuccgucaucccccucaugcacccccucgccgaccccuccaccgucuucaaggacggcgacgaggccgaggacuucgucgagguccaccuccccgagguccacaagcagaucuccggcgucgaccucggccuccccaacuggggcaaguacguccucaucuccgccggcgcccucaccgcccucaugcucaugaucuuccucaugaccugcugccgcaagaccaaccgccccgaguccauccagcacucccccggcgagaccgagcgcaaggucuccgucaccucccacaacggccgcgucaucuccuccugggaguccuacaaguccggcggcgagaccaagcucuga

SEQ ID NO: 127504 - RNA, 1575 nt, Artificial Sequence
  derived and/or modified CDS sequence (opt2) from glycoprotein__RABV__KC792172.1
auggucccccaggcccuccucuucgucccccuccucgccuuccccaugugcuucggcaaguuccccaucuacaccauccccgacaagcucggccccuggucccccaucgacauccaccaccucuccugccccaacaaccucgucgucgaggacgagggcugcaccaaccucuccggcuucuccuacauggagcucaaggucggcuacaucuccgccaucaaggucaacggcuucaccugcaccggcgucgucaccgaggccgagaccuacaccaacuucgucggcuacgucaccaccaccuucaagcgcaagcacuuccgccccacccccgacgccugccgcgccgccuacaacuggaagauggccggcgacccccgcuacgaggagucccuccacaaccccuaccccgacuaccacuggcuccgcaccgucaagaccaccaaggagucccucaucaucaucucccccuccgucgccgaccucgaccccuacgacaagucccuccacucccgcgucuuccccuccggcaagugccucggcaucaccaucuccuccaccuacugcuccaccaaccacgacuacaccaucuggaugcccgagaacguccgccucggcaccuccugcgacaucuucaccaacucccgcggcaagaaggccuccaagggcuccaagaccugcggcuucgucgacgagcgcggccucuacaagucccucaagggcgccugcaagcucaagcucugcggcguccucggccuccgccucauggacggcaccugggucgccaugcccaccuccgacgagaccaaguggugcccccccgaccagcucgucaaccuccacgacuuccgcuccgacgagaucgagcaccucgucgucgaggagcucguccgcaagcgcgaggagugccucgacgcccucgaguccaucaugaccaccaaguccgucuccuuccgccgccucucccaccuccgcaagcucguccccggcuucggcaaggccuacaccaucuucaacaagacccucauggaggccgacgcccacuacaaguccguccgcaccuggaacgagaucauccccuccaagggcugccuccgcgucggcggccgcugccacccccacgucaacggcgucuucuucaacggcaucauccucggccccgacggccacguccucauccccgagaugcaguccucccuccuccagcagcacauggagcuccucgaguccuccgucaucccccucaugcacccccucgccgaccccuccaccgucuucaaggacggcgacgaggccgaggacuucgucgagguccaccuccccgacguccacaagcagaucuccggcgucgaccucggccuccccaacuggggcaaguacguccucaucaucgccggcguccucaucgccaugauccucaccaucuuccucaugaccugcugcggccgcggcaaccgccccaaguccacccagcacucccucggcggcaucggccgcaaggucuccuccaccucccaguccggcaaggucaucuccuccugggaguccuacaaguccggcggcgagacccgccucuga

SEQ ID NO: 127505 - RNA, 1575 nt, Artificial Sequence
  derived and/or modified CDS sequence (opt2) from glycoprotein__RABV__KC792173.1
auggucccccaggcccuccucuucgucccccuccucgccuuccccaugugcuucggcaaguuccccaucuacaccauccccgacaagcucggccccuggucccccaucgacauccaccaccucuccugccccaacaaccucgucgucgaggacgagggcugcaccaaccucuccggcuucuccuacauggagcucaaggucggcuacaucuccgccaucaaggucaacggcuucaccugcaccggcgucgucaccgaggccgagaccuacaccaacuucgucggcuacgucaccaccaccuucaagcgcaagcacuuccgccccacccccgacgccugccgcgccgccuacaacuggaagauggccggcgacccccgcuacgaggagucccuccacaaccccuaccccgacuaccacuggcuccgcaccgucaagaccaccaaggagucccucaucaucaucucccccuccgucgccgaccucgaccccuacgacaagucccuccacucccgcgucuuccccuccggcaagugccucggcaucaccaucuccuccaccuacugcuccaccaaccacgacuacaccaucuggaugcccgagaaccuccgccucggcaccuccugcgacaucuucaccaacucccgcggcaagcgcgccuccaagggcuccaagaccugcggcuucgucgacgagcgcggccucuacaagucccucaagggcuccugcaagcucaagcucugcggcguccucggccuccgccucauggacggcaccugggucgccaugcagaccuccgacgagaccaaguggugcccccccgaccagcucgucaaccuccacgacuuccgcuccgacgagaucgagcaccucgucgucgaggagcucgucaagaagcgcgaggagugccucgacgcccucgaguccaucaugaccaccaaguccgucuccuuccgccgccucucccaccuccgcaagcucguccccggcuucggcaaggccuacaccaucuucaacaagacccucauggaggccgacgcccacuacaaguccguccgcaccuggaacgagaucauccccuccaagggcugccuccgcgucggcggccgcugccacccccacgucaacggcgucuucuucaacggcaucauccucggccccgacggccacguccucauccccgagaugcaguccucccuccuccagcagcacauggagcuccucgaguccuccgucaucccccucaugcacccccucgccgaccccuccaccgucuucaaggacggcgacgaggccgaggacuucgucgagguccaccuccccgacguccacaagcagaucuccggcgucgaccucggccuccccaacuggggcaaguacguccucaucaucgccggcguccucaucgccaugauccucaccauccuccucaugaccugcugcggccgcggcaaccgccccaaguccacccagcacucccucggcggcaucggccgcaaggucuccgccaccucccaguccggcaaggucaucuccuccugggaguccuacaaguccggcggcgagacccgccucuga

SEQ ID NO: 127506 - RNA, 1575 nt, Artificial Sequence
  derived and/or modified CDS sequence (opt2) from glycoprotein__RABV__KC792174.1
auggucccccaggcccuccucuucgucccccuccucgccuuccccaugugcuucggcaaguuccccaucuacaccauccccgacaagcucggccccuggucccccaucgacauccaccaccucuccugccccaacaaccucgucgucgaggacgagggcugcaccaaccucuccggcuucuccuacauggagcucaaggucggcuacaucuccgccaucaaggucaacggcuucaccugcaccggcgucgucaccgaggccgagaccuacaccaacuucgucggcuacgucaccaccaccuucaagcgcaagcacuuccgccccacccccgacgccugccgcgccgccuacaacuggaagauggccggcgacccccgcuacgaggagucccuccacaaccccuaccccgacuaccacuggcuccgcaccgucaagaccaccaaggagucccucaucaucaucucccccuccgucgccgaccucgaccccuacgacaagucccuccacucccgcgucuuccccuccggcaagugccucggcaucaccaucuccuccaccuacugcuccaccaaccacgacuacaccaucuggaugcccgagaaccuccgccucggcaccuccugcgacaucuucaccaacucccgcggcaagcgcgccuccaagggcuccaagaccugcggcuucgucgacgagcgcggccucuacaagucccucaagggcuccugcaagcucaagcucugcggcguccucggccuccgccucauggacggcaccugggucgccaugcagaccuccgacgagaccaaguggugcccccccgaccagcucgucaaccuccacgacuuccgcuccgacgagaucgagcaccucgucgucgaggagcucguccgcaagcgcgaggagugccucgacgcccucgaguccaucaugaccaccaaguccgucuccuuccgccgccucucccaccuccgcaagcucguccccggcuucggcaaggccuacaccaucuucaacaagacccucauggaggccgacgcccacuacaaguccguccgcaccuggaacgagaucauccccuccaagggcugccuccgcgucggcggccgcugccacccccacgucaacggcgucuucuucaacggcaucauccucggccccgacggccacguccucauccccgagaugcaguccucccuccuccagcagcacauggagcuccucgaguccuccgucaucccccucaugcacccccucgccgaccccuccaccgucuucaaggacggcgacgaggccgaggacuucgucgagguccaccuccccgacguccacaagcagaucuccggcgucgaccucggccuccccaacuggggcaaguacguccucaucaucgccggcguccucaucgccaugauccucaccaucuuccucaugaccugcugcggccgcggcaaccgccccaaguccacccagcacucccucggcggcaucggccgcaaggucuccgccaccucccaguccggcaaggucaucuccuccugggaguccuacaaguccggcggcgagacccgccucuga

SEQ ID NO: 127507 - RNA, 1575 nt, Artificial Sequence
  derived and/or modified CDS sequence (opt2) from glycoprotein__RABV__KC792175.1
auggucccccaggcccuccucuucgucccccuccucgccuuccccaugugcuucggcaaguuccccaucuacaccauccccgacaagcucggccccuggucccccaucgacauccaccaccucuccugccccaacaaccucgucgucgaggacgagggcugcaccaaccucuccggcuucuccuacauggagcucaaggucggcuacaucuccgccaucaaggucaacggcuucaccugcaccggcgucgucaccgaggccgagaccuacaccaacuucgucggcuacgucaccaccaccuucaagcgcaagcacuuccgccccacccccgacgccugccgcgccgccuacaacuggaagauggccggcgacccccgcuacgaggagucccuccacaaccccuaccccgacuaccacuggcuccgcaccgucaagaccaccaaggagucccucaucaucaucucccccuccgucgccgaccucgaccccuacgacaagucccuccacucccgcgucuuccccuccggcaagugccucggcaucaccaucuccuccaccuacugcuccaccaaccacgacuacaccaucuggaugcccgagaaccuccgccucggcaccuccugcgacaucuucaccaacucccgcggcaagcgcgccuccaagggcuccaagaccugcggcuucgucgacgagcgcggccucuacaagucccucaagggcuccugcaagcucaagcucugcggcguccucggccuccgccucauggacggcaccugggucgccaugcagaccuccgacgagaccaaguggugcccccccgaccagcucgucaaccuccacgacuuccgcuccgacgagaucgagcaccucgucgucgaggagcucgucaagaagcgcgaggagugccucgacgcccucgaguccaucaugaccaccaaguccgucuccuuccgccgccucucccaccuccgcaagcucguccccggcuucggcaaggccuacaccaucuucaacaagacccucauggaggccgacgcccacuacaaguccguccgcaccuggaacgagaucauccccuccaagggcugccuccgcgucggcggccgcugccacccccacgucaacggcgucuucuucaacggcaucauccucggccccgacggccacguccucauccccgagaugcaguccucccuccuccagcagcacauggagcuccucgaguccuccgucaucccccucaugcacccccucgccgaccccuccaccgucuucaaggacggcgacgaggccgaggacuucgucgagguccaccuccccgacguccacaagcagaucuccggcgucgaccucggccuccccaacuggggcaaguacguccucaucaucgccggcguccucaucgccaugauccucaccaucuuccucaugaccugcugccgccgcggcaaccgccccaaguccacccagcacucccucggcggcaucggccgcaaggucuccgccaccucccaguccggcaaggucaucuccuccugggaguccuacaaguccggcggcgagacccgccucuga

SEQ ID NO: 127508 - RNA, 1575 nt, Artificial Sequence
  derived and/or modified CDS sequence (opt2) from glycoprotein__RABV__KC792176.1
auggucccccaggcccuccucuucgucccccuccucgccuuccccaugugcuucggcaaguuccccaucuacaccauccccgacaagcucggccccuggucccccaucgacauccaccaccucuccugccccaacaaccucgucgucgaggacgagggcugcaccaaccucuccggcuucuccuacauggagcucaaggucggcuacaucuccgccaucaaggucaacggcuucaccugcaccggcgucgucaccgaggccgagaccuacaccaacuucgucggcuacgucaccaccaccuucaagcgcaagcacuuccgccccacccccgacgccugccgcgccgccuacaacuggaagauggccggcgacccccgcuacgaggagucccuccacaaccccuaccccgacuaccacuggcuccgcaccgucaagaccaccaaggagucccucaucaucaucucccccuccgucgccgaccucgaccccuacgacaagucccuccacuccaaggucuuccccuccggcaagugccucggcaucaccaucuccuccaccuacugcuccaccaaccacgacuacaccaucuggaugcccgagaacguccgccucggcaccuccugcgacaucuucaccaacucccgcggcaagcgcgccuccaagggcuccaagaccugcggcuucgucgacgagcgcggccucuacaagucccucaagggcgccugcaagcucaagcucugcggcguccucggccuccgccucauggacggcaccugggucgccaugcccaccuccgacgagaccaaguggugcccccccgaccagcucgucaaccuccacgacuuccgcuccgacgagaucgagcacaucgucgucgaggagcucguccgcaagcgcgaggagugccucgacgcccucgaguccaucaugaccaccaaguccgucuccuuccgccgccucucccaccuccgcaagcucguccccggcuucggcaaggccuacaccaucuucaacaagacccucauggaggccgacgcccacuacaaguccguccgcaccuggaacgagaucauccccuccaagggcugccuccgcgucggcggccgcugccacccccacgucaacggcgucuucuucaacggcaucauccucggccccgacggccacguccucauccccgagaugcaguccucccuccuccagcagcacauggagcuccucgaguccuccgucaucccccucaugcacccccucgccgaccccuccaccgucuucaaggacggcgacgaggccgaggacuucgucgagguccaccuccccgacguccacaagcagaucuccggcgucgaccucggccuccccaacuggggcaaguacguccucaucaucgccggcguccucaucgccaugauccucaccaucuuccucaugaccugcugcggccgcggcaaccgccccaaguccacccagcacucccucggcggcaucggccgcaaggucuccuccaccucccaguccggcaaggucaucuccuccugggaguccuacaaguccggcggcgagacccgccucuga

SEQ ID NO: 127509 - RNA, 1575 nt, Artificial Sequence
  derived and/or modified CDS sequence (opt2) from glycoprotein__RABV__KC792177.1
auggucccccaggcccuccucuucgucccccuccucgccuuccccaugugcuucggcaaguuccccaucuacaccauccccgacaagcucggccccuggucccccaucgacauccaccaccucuccugccccaacaaccucgucgucgaggacgagggcugcaccaaccucuccggcuucuccuacauggagcucaaggucggcuacaucuccgccaucaaggucaacggcuucaccugcaccggcgucgucaccgaggccgagaccuacaccaacuucgucggcuacgucaccaccaccuucaagcgcaagcacuuccgccccacccccgacgccugccgcgccgccuacaacuggaagauggccggcgacccccgcuacgaggagucccuccacaaccccuaccccgacuaccacuggcuccgcaccgucaagaccaccaaggagucccucaucaucaucucccccuccgucgccgaccucgaccccuacgacaagucccuccacucccgcgucuuccccuccggcaagugccucggcaucaccaucuccuccaccuacugcuccaccaaccacgacuacaccaucuggaugcccgagaacguccgccucggcaccuccugcgacaucuucaccaacucccgcggcaagcgcgccuccaagggcuccaagaccugcggcuucgucgacgagcgcggccucuacaagucccucaagggcgccugcaagcucaagcucugcggcguccucggccuccgccucauggacggcaccugggucgccaugcccaccuccgacgagaccaaguggugcccccccgaccagcucgucaaccuccacgacuuccgcuccgacgagaucgagcaccucgucgucgaggagcucguccgcaagcgcgaggagugccucgacgcccucgaguccaucaugaccaccaaguccgucuccuuccgccgccucucccaccuccgcaagcucguccccggcuucggcaaggccuacaccaucuucaacaagacccucauggaggccgacgcccacuacaaguccguccgcaccuggaacgagaucauccccuccaagggcugccuccgcgucggcggccgcugccacccccacgucaacggcgucuucuucaacggcaucauccucggccccgacggccacguccucauccccgagaugcaguccucccuccuccagcagcacauggagcuccucgaguccuccgucaucccccucaugcacccccucgccgaccccuccaccgucuucaaggacggcgacgaggccgaggacuucgucgagguccaccuccccgacguccacaagcagaucuccggcgucgaccucggccuccccaacuggggcaaguacguccucaucaucgccggcguccucaucgccaugauccucaccaucuuccucaugaccugcugcggccgcggcaaccagccccgcuccacccagcacucccucggcggcaucggccgcaaggucuccuccaccucccaguccggcaaggucaucuccuccugggaguccuacaaguccggcggcgagacccgccucuga

SEQ ID NO: 127510 - RNA, 1575 nt, Artificial Sequence
  derived and/or modified CDS sequence (opt2) from glycoprotein__RABV__KC792178.1
auggucccccaggcccuccucuucgucccccuccucgccuuccccaugugcuucggcaaguuccccaucuacaccauccccgacaagcucggccccuggucccccaucgacauccaccaccucuccugccccaacaaccucgucgucgaggacgagggcugcaccaaccucuccggcuucuccuacauggagcucaaggucggcuacaucuccgccaucaaggucaacggcuucaccugcaccggcgucgucaccgaggccgagaccuacaccaacuucgucggcuacgucaccaccaccuucaagcgcaagcacuuccgccccacccccgacgccugccgcgccgccuacaacuggaagauggccggcgacccccgcuacgaggagucccuccacaaccccuaccccgacuaccacuggcuccgcaccgucaagaccaccaaggagucccucaucaucaucucccccuccgucgccgaccucgaccccuacgacaagucccuccacucccgcgucuuccccuccggcaagugccucggcaucaccaucuccuccaccuacugcuccaccaaccacgacuacaccaucuggaugcccgagaacguccgccucggcaccuccugcgacaucuucaccaacucccgcggcaagcgcgccuccaagggcuccaagaccugcggcuucgucgacgagcgcggccucuacaagucccucaagggcgccugcaagcucaagcucugcggcguccucggccuccgccucauggacggcaccugggucgccaugcccaccuccgacgagaccaaguggugcccccccgaccagcucgucaaccuccacgacuuccgcuccgacgagaucgagcaccucgucgucgaggagcucguccgcaagcgcgaggagugccucgacgcccucgaguccaucaugaccaccaaguccgucuccuuccgccgccucucccaccuccgcaagcucguccccggcuucggcaaggccuacaccaucuucaacaagacccucauggaggccgacgcccacuacaaguccguccgcaccuggaacgagaucauccccuccaagggcugccuccgcgucggcggccgcugccacccccacgucaacggcgucuucuucaacggcaucauccucggccccgacggccacguccucauccccgagaugcaguccucccuccuccagcagcacauggagcuccucgaguccuccgucaucccccucaugcacccccucgccgaccccuccaccgucuucaaggacggcgacgaggccgaggacuucgucgagguccaccuccccgacguccacaagcagaucuccggcgucgaccucggccuccccaacuggggcaaguacguccucaucaucgccggcguccucaucgccaugauccucaccaucuuccucaugaccugcugcggccgcggcaaccgccccaaguccacccagcacucccucggcggcaucggccgcaaggucuccuccaccucccaguccggcaaggucaucuccuccugggaguccuacaaguccggcggcgagacccgccucuga

SEQ ID NO: 127511 - RNA, 1575 nt, Artificial Sequence
  derived and/or modified CDS sequence (opt2) from glycoprotein__RABV__KC792179.1
auggucccccaggcccuccucuucgucccccuccucgccuuccccaugugcuucggcaaguuccccaucuacaccauccccgacaagcucggccccuggucccccaucgacauccaccaccucuccugccccaacaaccucgucgucgaggacgagggcugcaccaaccucuccggcuucuccuacauggagcucaaggucggcuacaucuccgccaucaaggucaacggcuucaccugcaccggcgucgucaccgaggccgagaccuacaccaacuucgucggcuacgucaccaccaccuuccgccgcaagcacuuccgccccacccccgacgccugccgcgccgccuacaacuggaagaucgccggcgacccccgcuacgaggagucccuccacaaccccuaccccgacuaccacuggcuccgcaccgucaagaccaccaaggagucccucaucaucaucucccccuccgucgccgaccucgaccccuacgacaagucccuccacucccgcgucuuccccuccggcaagugccucggcaucaccaucuccuccaccuacugcuccaccaaccacgacuacaccaucuggaugcccgagaaccuccgccucggcaccuccugcgacaucuucaccaacucccgcggcaagcgcgccuccaagggcucccgcaccugcggcuucgucgacgagcgcggccucuacaagucccucaagggcgccugcaagcucaagcucugcggcguccucggccuccgccucauggacggcaccugggucgccaugcagaccuccgacgagaccaaguggugcccccccgaccagcucgucaaccuccacgacuuccgcuccgacgagaucgagcaccucgucgucgaggagcucgucaagaagcgcgaggagugccucgacgcccucgaguccaucaugaccaccaaguccgucuccuuccgccgccucucccaccuccgcaagcucguccccggcuucggcaaggccuacaccaucuucaacaagacccucauggaggccgacgcccacuacaaguccguccgcaccuggaacgagaucauccccuccaagggcugccuccgcgucggcggccgcugccacccccacgucaacggcgucuucuucaacggcaucauccucggccccgacggccacguccucauccccgagaugcaguccucccuccuccagcagcacauggagcuccucgaguccuccgucaucccccucaugcacccccucgccgaccccuccaccgucuucaaggacggcgacgaggccgaggacuucgucgagguccaccuccccgacguccacaagcagaucuccggcgucgaccucggccuccccaacuggggcaaguacguccucaucaucgccggcguccucaucgccaugauccucaccaucuuccucaugaccugcugcggccgcggcaaccgccccaaguccacccagcacucccucggcggcaucggccgcaaggucuccgccaccucccaguccggcaaggucaucuccuccugggaguccuacaagaacggcggcgagacccgccucuga

SEQ ID NO: 127512 - RNA, 1575 nt, Artificial Sequence; identical to SEQ ID NO: 127508
  derived and/or modified CDS sequence (opt2) from glycoprotein__RABV__KC792180.1

SEQ ID NO: 127513 - RNA, 1575 nt, Artificial Sequence; identical to SEQ ID NO: 127510
  derived and/or modified CDS sequence (opt2) from glycoprotein__RABV__KC792181.1

SEQ ID NO: 127514 - RNA, 1575 nt, Artificial Sequence; identical to SEQ ID NO: 127511
  derived and/or modified CDS sequence (opt2) from glycoprotein__RABV__KC792182.1

SEQ ID NO: 127515 - RNA, 1575 nt, Artificial Sequence; identical to SEQ ID NO: 127510
  derived and/or modified CDS sequence (opt2) from glycoprotein__RABV__KC792183.1

SEQ ID NO: 127516 - RNA, 1575 nt, Artificial Sequence; identical to SEQ ID NO: 127505
  derived and/or modified CDS sequence (opt2) from glycoprotein__RABV__KC792184.1

SEQ ID NO: 127517 - RNA, 1575 nt, Artificial Sequence
  derived and/or modified CDS sequence (opt2) from glycoprotein__RABV__KC792185.1
auggucccccaggcccuccucuucgucccccuccucgccuuccccaugugcuucggcaaguuccccaucuacaccauccccgacaagcucggccccuggucccccaucgacauccaccaccucuccugccccaacaaccucgucgucgaggacgagggcugcaccaaccucuccggcuucuccuacauggagcucaaggucggcuacaucuccgccaucaaggucaacggcuucaccugcaccggcgucgucaccgaggccgagaccuacaccaacuucgucggcuacgucaccaccaccuucaagcgcaagcacuuccgccccacccccgacgccugccgcgccgccuacaacuggaagauggccggcgacccccgcuacgaggagucccuccacaaccccuaccccgacuaccacuggcuccgcaccgucaagaccaccaaggagucccucaucaucaucucccccuccgucgccgaccucgaccccuacgacaagucccuccacucccgcgucuuccccuccggcaagugccucggcaucaccaucuccuccaccuacugcuccaccaaccacgacuacaccaucuggaugcccgagaaccuccgccucggcaccuccugcgacaucuucaccaacucccgcggcaagcgcgccuccaagggcuccaagaccugcggcuucgucgacgagcgcggccucuacaagucccucaagggcuccugcaagcucaagcucugcggcguccucggccuccgccucauggacggcaccugggucgccaugcagaccuccgacgagaccaaguggugcccccccgaccagcucgucaaccuccacgacuuccgcuccgacgagaucgagcaccucgucgucgaggagcucgucaagaagcgcgaggagugccucgacgcccucgaguccaucaugaccaccaaguccgucuccuuccgccgccucucccaccuccgcaagcucguccccggcuucggcaaggccuacaccaucuucaacaagacccucauggaggccgacgcccacuacaaguccguccgcaccuggaacgagaucauccccuccaagggcugccuccgcgucggcggccgcugccacccccacgucaacggcgucuucuucaacggcaucauccucggccccgacggccacguccucauccccgagaugcaguccucccuccuccagcagcacauggagcuccucgaguccuccgucaucccccucaugcacccccucgccgaccccuccaccgucuucaaggacggcgacgaggccgaggacuucgucgagguccaccuccccgacguccacaagcagaucuccggcgucgaccucggccuccccaacuggggcaaguacguccucaucaucgccggcguccucaucgccaugauccucaccaucuuccucaugaccugcugcggccgcggcaaccgccccaaguccacccagcacucccucggcggcaucggccgcaaggucuccgccaccucccaguccggcaaggucaucuccuccugggaguccuacaaguccggcggcgagacccgccucuga

SEQ ID NO: 127518 - RNA, 1575 nt, Artificial Sequence; identical to SEQ ID NO: 127510
  derived and/or modified CDS sequence (opt2) from glycoprotein__RABV__KC792186.1

SEQ ID NO: 127519 - RNA, 1575 nt, Artificial Sequence; identical to SEQ ID NO: 127511
  derived and/or modified CDS sequence (opt2) from glycoprotein__RABV__KC792187.1

SEQ ID NO: 127520 - RNA, 1575 nt, Artificial Sequence
  derived and/or modified CDS sequence (opt2) from glycoprotein__RABV__KC792188.1
auggucccccaggcccuccucuucgucccccuccucgccuuccccaugugcuucggcaaguuccccaucuacaccauccccgacaagcucggccccuggucccccaucgacauccaccaccucuccugccccaacaaccucgucgucgaggacgagggcugcaccaaccucuccggcuucuccuacauggagcucaaggucggcuacaucuccgccaucaaggucaacggcuucaccugcaccggcgucgucaccgaggccgagaccuacaccaacuucgucggcuacgucaccaccaccuucaagcgcaagcacuuccgccccacccccgacgccugccgcgccgccuacaacuggaagauggccggcgacccccgcuacgaggagucccuccacaaccccuaccccgacuaccacuggcuccgcaccgucaagaccaccaaggagucccucaucaucaucucccccuccgucgccgaccucgaccccuacgacaagucccuccacucccgcgucuuccccuccggcaagugccucggcaucaccaucuccuccaccuacugcuccaccaaccacgacuacaccaucuggaugcccgagaacguccgccucggcaccuccugcgacaucuucaccaacucccgcggcaagcgcgccuccaagggcuccaagaccugcggcuucgucgacgagcgcggccucuacaagucccucaagggcgccugcaagcucaagcucugcggcguccucggccuccgccucauggacggcaccugggucgccaugcccaccuccgacgagaccaaguggugcccccccgaccagcucgucaaccuccacgacuuccgcuccgacgagaucgagcaccucgucgucgaggagcucguccgcaagcgcgaggagugccucgacgcccucgaguccaucaugaccaccaaguccgucuccuuccgccgccucucccaccuccgcaagcucguccccggcuucggcaaggccuacaccaucuucaacaagacccucauggaggccgacgcccacuacaaguccguccgcaccugguccgagaucauccccuccaagggcugccuccgcgucggcggccgcugccacccccacgucaacggcgucuucuucaacggcaucauccucggccccgacggccacguccucauccccgagaugcaguccucccuccuccagcagcacauggagcuccucgaguccuccgucaucccccucaugcacccccucgccgaccccuccaccgucuucaaggacggcgacgaggccgaggacuucgucgagguccaccuccccgacguccacaagcagaucuccggcgucgaccucggccuccccaacuggggcaaguacguccucaucaucgccggcguccucaucgccaugauccucaccaucuuccucaugaccugcugcggccgcggcaaccgccccaaguccacccagcacucccucggcggcaucggccgcaaggucuccuccaccucccaguccggcaaggucaucuccuccugggaguccuacaaguccggcggcgagacccgccucuga

SEQ ID NO: 127521 - RNA, 1575 nt, Artificial Sequence
  derived and/or modified CDS sequence (opt2) from glycoprotein__RABV__KC977995.1
augaucccccagguccuccucuucgucccccuccucgucuucuccuccugcuucggcaaguuccccaucuacaccauccccgacaagcucggccccuggucccccaucgacauccaccaccucuccugccccaacaaccucgucgucgaggacgagggcugcaccaaccucuccggcuucuccuacauggagcucaaggucggcuacaucuccgccaucaaggucaacggcuucaccugcaccggcgucgucaccgaggccgagaccuacaccaacuucgucggcuacgucaccaccaccuucaagcgcaagcacuuccgccccaugcccgacgccugccgcgccgccuacaacuggaagauggccggcgacccccgcuacgaggagucccuccacaaccccuaccccgacuaccacuggcuccgcaccgucaagaccaccaaggagucccucgucaucaucucccccuccgucgccgaccucgaccccuacgacaagucccuccacucccgcgucuuccccggcggcaagugcuccggcaucaccgucuccuccaccugcugcuccaccaaccacgacuacaccaucuggaugcccgagaacccccgccucggcaccuccugcgacaucuucaccaacucccgcggcaagcgcgccuccaagggcggcaagaccugcggcuucgucgacgagcgcggccucuacaagucccuccgcggcgccugcaagcucaagcucugcggcguccucggccuccgccucauggacggcaccugggucgccauccagaccuccgacgagaucaaguggugcucccccgaccagcucgucaaccuccacgacuuccacuccgacgagaucgagcaccucgucgucgaggagcucgucaagaagcgcgaggagugccucgacgcccucgagaccaucaugaccaccaaguccgucuccuuccgccgccucucccaccuccgcaagcucguccccggcuucggcaaggccuacaccaucuucaacaagacccucauggaggccgacgcccacuacaaguccauccgcaccuggaacgagaucauccccuccaagggcugccuccgcgucggcggccgcugccacccccacgucaacggcgucuucuucaacggcaucauccucggccccgacggccacguccucauccccgagaugcaguccucccuccuccaccagcacauggagcuccucgaguccuccgucaucccccucaugcacccccucgccgaccccuccaccgucuucaaggacggcgacgaggccgaggacuucgucgagguccaccuccccgacguccacaagcagaucuccggcgucgaccucggccuccccaacuggggcaaguacguccucaucuccgccggcgcccucaccgcccucaugcucaugaucuuccucaugaccugcugccgcaagaccaaccgcgccgaguccauccagcacucccccggcgagaccggccgcaaggucuccgucaccucccacaacggccgcgucaccuccuccugggaguccuacaaguccggcuccgagaccaagcucuga

SEQ ID NO: 127522 - RNA, 1575 nt, Artificial Sequence
  derived and/or modified CDS sequence (opt2) from glycoprotein__RABV__KF154996.1
auggucccccagguccuccucuucgucccccuccucgucuucuccaugugcuucggcaaguuccccaucuacaccauccccgacaagcucggccccuggucccccaucgacauccaccaccucuccugccccaacaaccucgucgucgaggacgagggcugcaccaaccucuccggcuucuccuacauggagcucaaggucggcuacaccuccgccaucaaggucaacggcuucaccugcaccggcgucgucaccgaggccgagaccuacaccaacuucgucggcuacgucaccaccaccuucaagcgcaagcacuuccgccccacccccgacgccugccgcgccgccuacaacuggaagauggccggcgacccccgcuacgaggagucccuccacaaccccuaccccgacuaccacuggcuccgcaccgucaagaccaccaaggagucccucgucaucaucucccccuccgucgccgaccucgaccccuacgacaagucccuccacucccgcgucuuccccuccggcaagugcuccggcaucaccaucuccuccaccuacugcuccaccaaccacgacuacaccaucuggaugcccgagaacccccgccucggcaccuccugcgacaucuucaccaacucccgcggcaagcgcgccuccaagggcggcaagaccugcggcuucgucgacgagcgcggccucuacaagucccucaagggcgccugcaagcucaagcucugcggcguccucggccuccgccucauggacggcaccugggucgccaugcagaccuccgacgagaccaaguggugcccccccgaccagcucgucaaccuccacgacuuccgcuccgacgagaucgagcaccucgucgucgaggagcucgucaagaagcgcgaggagugccucgacgcccucgaguccaucaugaccaccaaguccgucuccuuccgccgccucucccaccuccgcaagcucguccccggcuucggcaaggccuacaccaucuucaacaagacccucauggaggccgacgcccacuacaaguccguccgcaccuggaacgagaucauccccuccaagggcugccuccgcgucggcggccgcugccacccccacgucaagggcgucuucuucaacggcaucauccucggccccgacggccacguccucauccccgagaugcaguccucccuccuccagcagcacauggagcuccucgaguccuccgucaucccccucaugcacccccucgccgaccccuccaccgucuucaaggacggcgacgaggccgaggacuucgucgagguccaccuccccgacguccacaagcagaucuccggcgucgaccucggccuccccuccuggggccgcuacguccucgucuccgccggcguccucgucguccucaugcucaccauccucaucaucaccugcugcggccgcguccaccgccccaaguccacccagcacggccucggcggcaccggccgcaaggucuccgucaccucccaguccggcaaggucaucuccuccugggaguccuacaaguccggcggcgagacccgccucuga

SEQ ID NO: 127523 - RNA, 1575 nt, Artificial Sequence
  derived and/or modified CDS sequence (opt2) from glycoprotein__RABV__KF154997.1
auggucccccaggcccuccuccucgucccccuccucggcuucucccucugcuucggcaaguuccccaucuacaccauccccgacaagcucggccccuggucccccaucgacauccaccaccucuccugccccaacaaccucgucgucgaggacgagggcugcaccaaccucuccggcuucuccuacauggagcucaaggucggcuacaucuccuccaucaaggucaacggcuucaccugcaccggcgucgucaccgaggccgagaccuacaccaacuucgucggcuacgucaccaccaccuuccgccgcaagcacuuccgccccacccccgacgccugccgcgccgccuacaacuggaagauggccggcgacccccgcuacgaggagucccuccacaaccccuaccccgacuaccacuggcuccgcaccgucaagaccaccaaggagucccucgucaucaucucccccuccgucgccgaccucgaccccuacgacaagucccuccacucccgcgucuuccccuccggcaagugcuccggcaucaccgucuccuccaccuacugcuccaccaaccacgacuacaccaucuggaugcccgagaaccuccgccucggcaccuccugcgacaucuucaccaacucccgcggcaagcgcgccuccaagggcuccaagaccugcggcuucgucgacgagcgcggccucuacaagucccucaagggcgccugcaagcucaagcucugcggcguccucggccuccgccucauggacggcaccugggucgccaugcagaccuccgacgagaccaaguggugcccccccgaccagcucgucaaccuccacgacuuccgcuccgacgagaucgagcaccucgucgucgaggagcucgucaagaagcgcgaggagugccucgacgcccucgaguccaucaugaccaccaaguccgucuccuuccgccgccucucccaccuccgcaagcucguccccggcuucggcaaggccuacaccaucuucaacaagacccucauggaggccgacgcccacuacaaguccguccgcaccuggaacgaggucauccccucccgcggcugccuccgcgucggcggccgcugccacccccacgucaacggcgucuucuucaacggcaucauccucggccccgacggccacguccucauccccgagaugcaguccucccuccuccagcagcacaucgagcuccucgaguccuccgucaucccccucaugcacccccucgccgaccccuccaccgucuucaaggacggcgacgaggccgaggacuucgucgagguccaccuccccgacguccacaagcaggucuccggcgucgaccucggccuccccaacuggggcaaguacguccuccucuccgccggcgcccucaucgcccucaugcucaucgucuuccucaucaccugcugccgccgcgucaaccgccccgaguccacccagcgcucccuccgcggcgccggccgcaaggucuccaucaccucccaguccggcaaggucaucuccuccugggaguccuacaaguccggcggcgagacccgccucuga

SEQ ID NO: 127524 - RNA, 1575 nt, Artificial Sequence
  derived and/or modified CDS sequence (opt2) from glycoprotein__RABV__KF154998.1
auggucccccaggcccuccucuucgucccccuccucgccuucucccucugcuucggcaaguuccccaucuacaccauccccgacaagcucggccccuggucccccaucgacauccaccaccucuccugccccaacaaccucgucgucgaggacgagggcugcaccaaccucuccgaguucuccuacauggagcucaagaugggcuacaucuccgccaucaaggucaacggcuucaccugcaccggcgucgucaccgaggccgagaccuacaccaacuucgucggcuacgucaccaccaccuucaagcgcaagcacuuccgccccacccccgacgccugccgcgccgccuacaacuggaagauggccggcgacccccgcuacgaggagucccuccacaaccccuaccccgacuaccacuggcuccgcaccgucaagaccaccaaggagucccucaucaucaucucccccuccgucgccgaccucgaccccuacgacaagucccuccacucccgcgucuuccccuccggcaagugcuccggcaucaccgucuccuccaccuacugcuccaccaaccacgacuacaccaucuggaugcccgagaacccccgccccggcaccuccugcgacaucuucgccuccucccgcggcaagcgcgccuccaagggcggcaagaccugcggcuucgucgacgagcgcggccucuacaagucccucaagggcgccugcaagcucaagcucugcggcguccucggccuccgccucauggacggcaccugggucgccaugcagaccuccgacgagaccaaguggugcccccccgaccagcucgucaaccuccacgacuuccgcuccgacgagaucgagcaccucgucgucgaggagcucgucaagaagcgcgaggagugccucgacgcccucgaguccaucaugaccaccaaguccgucuccuuccgccgccucucccaccuccgcaagcucguccccggcuucggcaaggccuacaccaucuucaacaagacccucauggaggccgacgcccacuacaaguccguccagaccuggaacgagaucauccccuccaagggcugccuccgcgucggcgagcgcugccacccccacgucaacggcgucuucuucaacggcaucauccucggccccgacggccacguccucauccccgagaugcaguccucccuccuccagcagcacauggagcuccucgaguccuccgucaucccccucaugcacccccucgccgaccccuccaccgucuucaaggacggcgacgaggccgaggacuucgucgagguccaccuccccgacguccacaagcaggucuccggcgucgaccucggccuccccaacuggggcaaguacguccucgucuccgccggcgcccucaucgcccucaugcucaucaucuuccucaucaccugcugccgccgcgucaaccgccccgaguacacccagcgcucccucggcggcaccggccgcaaggucuccgucaccucccaguccggcaaggucaucuccuccugggaguccuacaaguccggcggcgagacccgccucuga

SEQ ID NO: 127525 - RNA, 1575 nt, Artificial Sequence; identical to SEQ ID NO: 126793
  derived and/or modified CDS sequence (opt2) from glycoprotein__RABV__KF154999.1

SEQ ID NO: 127526 - RNA, 1575 nt, Artificial Sequence
  derived and/or modified CDS sequence (opt2) from glycoprotein__RABV__KF155000.1
auggucccccaggcccuccucuucgucccccuccucgucuucucccucugcuucggcaaguuccccaucuacaccauccccgacaagcucggccccuggucccccaucgacauccaccaccucaccugccccaacaaccucgucgucgaggacgagggcugcaccaaccucuccggcuucuccuacauggagcucaaggucggcuacaucuccgccaucaaggucaacggcuucaccugcaccggcgucgucaccgaggccgagaccuacaccaacuucgucggcuacgucaccaccaccuucaagcgcaagcacuuccgccccacccccgacgccugccgcgccgccuacaacuggaagauggccggcgacccccgcuacgaggagucccuccacaaccccuaccccgacuaccacuggcuccgcaccgucaagaccaccaaggagucccucgucaucaucucccccuccgucgccaaccucgaccccuacgacaagucccuccacucccgcgucuuccccuccggcaagugcuccggcaucaccgucuccuccaccuacugcuccaccaaccacgacuacaccaucuggaugcccgagaacccccgccucggcaccuccugcgacaucuucaccaacucccgcggcaagcgcgccuccaagggcuccaagaccugcggcuucgucgacgagcgcggccucuacaagucccucaagggcgccugcaagcucaagcucugcggcguccucggccuccgccucauggacggcaccugggucgccaugcagaccuccgacgagaccaaguggugcccccccgaccagcucgucaaccuccacgacuuccgcuccgacgagaucgagcaccucgucgucgaggagcucgucaagaagcgcgaggagugccucgacgcccucgaguccaucaugaccaccaaguccgucuccuuccgccgccucucccaccuccgcaagcucguccccggcuucggcaaggccuacaccaucuucaacaagacccucauggaggccgacgcccacuacaaguccguccgcaccuggaacgagaucauccccuccaagggcugccuccgcgucggcggccgcugccacccccacgucaacggcgucuucuucaacggcaucauccucggccccgacggccacguccucauccccgagaugcaguccucccuccuccagcagcacauggagcuccucgaguccuccgucaucccccucaugcacccccucgccgaccccuccaccgucuucaaggacggcgacgaggccgaggacuucgucgagguccaccuccccgacguccacaagcaggucuccggcgucgaccucggccuccccaacuggggcaaguacguccuccucuccgccggcgcccucaucgcccucaugcucaucaucuuccucaugaccugcugccgccgcgucaaccgccccgaguccacccagcgcucccucggcggcaccggccgcaaggucuccgucaccucccaguccggcaaggucaucuccuccugggaguccuacaaguccggcggcgagacccgccucuga

SEQ ID NO: 127527 - RNA, 1575 nt, Artificial Sequence
  derived and/or modified CDS sequence (opt2) from glycoprotein__RABV__KF155001.1
auggucccccaggcccuccucuucgucccccuccucgucuucucccucugcuucggcaaguuccccaucuacaccauccccgacaagcucggccccuggucccccaucgacauccaccaccucuccugccccaacaaccucgucgucgaggacgagggcugcaccaaccucuccggcuucuccuacauggagcucaaggucggcuacaucuccgccaucaaggucaacggcuucaccugcaccggcgucgucaccgaggccgagaccuacaccaacuucgucggcuacgucaccaccaccuucaagcgcaagcacuuccgccccacccccgacgccugccgcgccgccuacaacuggaagauggccggcgacccccgcuacgaggagucccuccacaaccccuaccccgacuaccacuggcuccgcaccgucaagaccaccaaggagucccucgucaucaucucccccuccgucgccgaccucgaccccuacgacaagucccuccacucccgcgucuuccccuccggcaagugcuccggcaucaccgucuccuccaccuacugcuccaccaaccacgacuacaccaucuggaugcccgagaacccccgccucggcaccuccugcgacaucuucaccaacucccgcggcaagcgcgccuccaagggcuccaagaccugcggcuucgucgacgagcgcggccucuacaagucccucaagggcgccugcaagcucaagcucugcggcguccucggccuccgccucauggacggcaccugggucgccaugcagaccuccgacgagaccaaguggugcccccccgaccagcucgucaaccuccacgacuuccgcuccgacgagaucgagcaccucgucgucgaggagcucgucaagaagcgcgaggagugccucgacgcccucgaguccaucaugaccaccaaguccgucuccuuccgccgccucucccaccuccgcaagcucguccccggcuucggcaaggccuacaccaucuucaacaagacccucauggaggccgacgcccacuacaaguccguccgcaccuggaacgagaucauccccuccaagggcugccuccgcgucggcggccgcugccacccccacgucaacggcgucuucuucaacggcaucauccucggccccgacggccacguccucauccccgagaugcaguccucccuccuccagcagcacauggagcuccucgaguccuccgucaucccccucaugcacccccucgccgaccccuccaccgucuucaaggacggcgacgaggccgaggacuucgucgagguccaccuccccgacguccacaagcaggucuccggcgucgaccucggccuccccaacuggggcaaguacguccuccucuccgccggcacccucaucgcccucaugcucaucaucuuccucaugaccugcugccgccgcgucaaccgccccaaguccaugcagcgcucccucggcgagaccggccgcaaggucuccgucaccucccaguccggcaaggucaucuccuccugggaguccuacaaguccggcggcgagacccgccucuga

SEQ ID NO: 127528 - RNA, 1575 nt, Artificial Sequence
  derived and/or modified CDS sequence (opt2) from glycoprotein__RABV__KF155002.1
auggucccccaggcccgccucuucgucccccuccucgucuucccccucugcuucggcaaguuccccaucuacaccauccccgacaagcucggccccuggucccccaucgacauccaccaccucuccugccccaacaaccucgucgucgaggacgagggcugcaccaaccucuccggcuucuccuacauggagcucaaggucggcuacaucuccgccaucaaggucaacggcuucaccugcaccggcgucgucaccgaggccgagaccuacaccaacuucgucggcuacgucaccaccaccuucaagcgcaagcacuuccgccccauccccgacgccugccgcgccgccuacaacuggaagauggccggcgacccccgcuacgaggagucccuccacaaccccuaccccgacuaccacuggcuccgcaccgucaagaccaccaaggagucccucgucaucaucucccccuccgucgccgaccucgaccccuacgaccgcucccuccacucccgcgucuucaccggcggcaagugcuccggcaucaccgucuccuccaccuacugcuccaccaaccacgacuacaccaucuggaugcccgagaacccccgccucggcaccuccugcaacaucuucgccaacuccaagggcaagcgcgccuccaagggcggcaagaccugcggcuucgucgacgagcgcggccucuacaagucccucaagggcgccugcaagcucaagcucugcggcguccucggccuccgccucauggacggcaccugggucgccaugcagaccuccgacgagaccaaguggugcccccccgaccagcucgucaacaugcacgacuuccgcuccgacgagaucgagcaccucgucgucgaggagcucgucaagaagcgcgaggagugccucgacgcccucgaguccaucaugaccaccaaguccgucuccuuccgccgccucucccaccuccgcaagcucguccccggcuucggcaaggccuacaccaucuucaacaagacccucauggaggccgacgcccacuacaaguccguccgcaccuggaacgagaucauccccuccaagggcugccuccgcgucggcggccgcugccacccccacgucaacggcgucuucuucaacggcaucauccucggccccgacggccacguccucauccccgagaugcaguccucccuccuccagcagcacauggagcuccucgaguccuccgucaucccccucaugcacccccucgccgaccccuccaccgucuucaaggacggcgacgaggccgaggacuucgucgagguccaccuccccgacguccacaagcaggucuccggcgucgaccucggccuccccaacuggggcaaguacguccuccucuccgccggcacccucaucgcccucaugcucaucaucuuccucaugaccugcugccgccgcgucucccgccccgaguccacccagcgcucccucggccgcaccggccgcaaggucuccgucaccucccaguccggcaaggucaucuccuccugggaguccuacaaguccggcggcgagacccgccucuga

SEQ ID NO: 127529 - RNA, 1575 nt, Artificial Sequence
  derived and/or modified CDS sequence (opt2) from glycoprotein__RABV__KF437644.1
auggucccccaggcccuccucuucgucccccuccucgucuucuccaugugcuucggcaaguuccccaucuacaccauccccgacaagcucggccccuggucccccaucgacauccaccaccucuccugccccaacaaccucgucgucgaggacgagggcugcaccaaccucuccggcuucuccuacauggagcucaaggucggcuacaucuccgccaucaaggucaacggcuucaccugcaccggcgucgucaccgaggccgagaccuacaccaacuucgucggcuacgucaccaccaccuucaagcgcaagcacuuccgccccacccccgacgccugccgcgccgccuacaacuggaagauggccggcgacccccgcuacgaggagucccuccacaaccccuaccccgacuaccacuggcuccgcaccgucaagaccaccaaggagucccucgucaucaucucccccuccgucgccgaccucgaccccuacgacaagucccuccacucccgcgucuuccccaacggcaagugcuccggcaucaccaucuccuccaccuacugccccaccaaccacgacuacaccaucuggcuccccgagaacccccgccucggcaccuccugcgacaucuucaccaacucccgcggcaagcgcgccuccaagggcuccaagaccugcggcuucgucgacgagcgcggccucuacaagucccucaagggcgccugcaagcucaagcucugcggcguccucggccuccgccucauggacggcaccugggucgccaugcaggccuccgacgagaccaaguggugcccccccgaccagcucgucaaccuccacgacuuccgcuccgacgagaucgagcaccucgucgucgaggagcucgucaagaagcgcgaggagugccucgacgcccucgaguccaucaugaccaccaaguccgucuccuuccgccgccucucccaccuccgcaagcucguccccggcuucggcaaggccuacaccaucuucaacaagacccucauggaggccgacgcccacuacaaguccguccgcaccuggaacgagaucauccccuccaagggcugccuccgcgucggcggccgcugccacccccacgucaacggcgucuucuucaacggcaucauccucggccccgacggccacguccucauccccgagaugcaguccucccuccuccagcagcacauggagcuccucgaguccuccgucaucccccucaugcacccccucgccgaccccuccaccgucuucaaggacggcgacgaggccgagaacuucgucgagguccaccuccccgacguccacaagcagaucuccggcgucgaccucggccuccccaacuggggcaaguacguccucgucuccgccggcguccucaucgcccucaugcucaucaucuuccucaugaccugcugcggccgcgucaaccgccccgaguccacccagcacaaccucggcggcaccggccgcgaggucuccgucaccccccaguccggcaaggucaucuccuccugggaguccuacaaguccggcggcggcacccgccucuga

SEQ ID NO: 127530 - RNA, 1575 nt, Artificial Sequence; identical to SEQ ID NO: 127529
  derived and/or modified CDS sequence (opt2) from glycoprotein__RABV__KF437645.1

SEQ ID NO: 127531 - RNA, 1575 nt, Artificial Sequence; identical to SEQ ID NO: 127529
  derived and/or modified CDS sequence (opt2) from glycoprotein__RABV__KF437646.1

SEQ ID NO: 127532 - RNA, 1575 nt, Artificial Sequence
  derived and/or modified CDS sequence (opt2) from glycoprotein__RABV__KF437648.1
auggucccccaggcccuccucuucgucccccuccucgucuucuccaugugcuucggcaaguuccccaucuacaccauccccgacaagcucggccccuggucccccaucgacauccaccaccucuccugccccaacaaccucgucgucgaggacgagggcugcaccaaccucuccggcuucuccuacauggagcucaaggucggcuacaucuccgccaucaaggucaacggcuucaccugcaccggcgucgucaccgaggccgagaccuacaccaacuucgucggcuacgucaccaccaccuucaagcgcaagcacuuccgccccacccccgacgccugccgcgccgccuacaacuggaagauggccggcgacccccgcuacgaggagucccuccacaaccccuaccccgacuaccacuggcuccgcaccgucaagaccaccaaggagucccucgucaucaucucccccuccgucgccgaccucgaccccuacgacaagucccuccacucccgcguccuccccaacggcaagugcuccggcaccaccaccuccuccaccuacugccccaccaaccacgacuacaccaucuggcuccccgagaacccccgccucggcaccuccugcgacaucuucaccaacucccgcggcaagcgcgccuccaagggcggcaagaccugcggcuucgucgacgagcgcggccucuacaagucccucaagggcgccugcaagcucaagcucugcggcguccucggccuccgccucauggacggcaccugggucgccaugcaggccuccgacgagaccaaguggugcccccccgaccagcucgucaaccuccacgacuuccgcuccgacgagaucgagcaccucgucgucgaggagcucgucaagaagcgcgaggagugccucgacgcccucgaguccaucaugaccaccaaguccgucuccuuccgccgccucucccaccuccgcaagcucguccccggcuucggcaaggccuacaccaucuucaacaagacccucauggaggccgacgcccacuacaaguccguccgcaccuggaacgagaucauccccuccaagggcugccuccgcgucggcggccgcugccacccccacgucaacggcgucuucuucaacggcaucauccucggccccgacggccacguccucauccccgagaugcaguccucccuccuccagcagcacauggagcuccucgaguccuccgucaucccccucaugcacccccucgccgaccccuccaccgucuucaaggacggcgacgaggccgagaacuucgucgagguccaccuccccgacguccacaagcagaucuccggcgucgaccucggccuccccaacuggggcaaguacguccucgucuccgccggcguccucaucgcccucaugcucaucaucuuccucaugaccugcugcggccgcgucaaccgccccgaguccacccagcacaaccucggcggcaccggccgcgaggucuccgucaccccccaguccggcaaggucaucuccuccugggaguccuacaaguccggcggcgagacccgccucuga

SEQ ID NO: 127533 - RNA, 1575 nt, Artificial Sequence
  derived and/or modified CDS sequence (opt2) from glycoprotein__RABV__KF437649.1
auggucccccaggcccuccucuucgucccccuccucgucuucuccaugugcuucggcaaguuccccaucuacaccauccccgacaagcucggccccuggucccccaucgacauccaccaccucuccugccccaacaaccucgucgucgaggacgagggcugcaccaaccucuccggcuucuccuacauggagcucaaggucggcuacaucuccgccaucaaggucaacggcuucaccugcaccggcgucgucaccgaggccgagaccuacaccaacuucgucggcuacgucaccaccaccuucaagcgcaagcacuuccgccccacccccgacgccugccgcgccgccuacaacuggaagauggccggcgacccccgcuacgaggagucccuccacaaccccuaccccgacuaccacuggcuccgcaccgucaagaccaccaaggagucccucgucaucaucucccccuccgucgccgaccucgaccccuacgacaagucccuccacucccgcgucuuccccaacggcaagugcuccggcaucaccaucuccuccaccuacugccccaccaaccacgacuacaccaucuggcuccccgagaacccccgccucggcaccuccugcgacaucuucaccaacucccgcggcaagcgcgccuccaagggcuccaagaccugcggcuucgucgacgagcgcggccucuacaagucccucaagggcgccugcaagcucaagcucugcggcguccucggccuccgccucauggacggcaccugggucgccaugcaggccuccgacgagaccaaguggugcccccccgaccagcucgucaaccuccacgacuuccgcuccgacgagaucgagcaccucgucgucgaggagcucgucaagaagcgcgaggagugccucgacgcccucgaguccaucaugaccaccaaguccgucuccuuccgccgccucucccaccuccgcaagcucguccccggcuucggcaaggccuacaccaucuucaacaagacccucauggaggccgacgcccacuacaaguccguccgcaccuggaacgagaucauccccuccaagggcugccuccgcgucggcggccgcugccacccccacgucaacggcgucuucuucaacggcaucauccucggccccgacggccacguccucauccccgagaugcaguccucccuccuccagcagcacauggagcuccucgaguccuccgucaucccccucaugcacccccucgccgaccccuccaccgucuucaaggacggcgacgaggccgagaacuucgucgagguccaccuccccgacguccacaagcagaucuccggcgucgaccucggccuccccaacuggggcaaguacguccucgucuccgccggcguccucaucgcccucaugcucaucaucuuccucaugaccugcugcggccgcgucaaccgccccgaguccacccagcacaaccucggcggcaccggccgcgaggucuccgucaccccccaguccggcaaggucaucuccuccugggaguccugcaaguccggcggcggcacccgccucuga

SEQ ID NO: 127534 - RNA, 1575 nt, Artificial Sequence; identical to SEQ ID NO: 127529
  derived and/or modified CDS sequence (opt2) from glycoprotein__RABV__KF437650.1

SEQ ID NO: 127535 - RNA, 1575 nt, Artificial Sequence
  derived and/or modified CDS sequence (opt2) from glycoprotein__RABV__KF437652.1
auggucccccaggcccuccucuucgucccccuccucgucuucuccaugugcuucggcaaguuccccaucuacaccauccccgacaagcucggccccuggucccccaucgacauccaccaccucuccugccccaacaaccucgucgucgaggacgagggcugcaccaaccucuccggcuucuccuacauggagcucaaggucggcuacaucuccgccaucaaggucaacggcuucaccugcaccggcgucgucaccgaggccgagaccuacaccaacuucgucggcuacgucaccaccaccuucaagcgcaagcacuuccgccccacccccgacgccugccgcgccgccuacaacuggaagauggccggcgacccccgcuacgaggagucccuccacaaccccuaccccgacuaccacuggcuccgcaccgucaagaccaccaaggagucccucgucaucaucucccccuccgucgccgaccucgaccccuacgacaagucccuccacucccgcgucuuccccaacggcaagugcuccggcaucaccaucuccuccaccuacugccccaccaaccacgacuacaccaucuggcuccccgagaacccccgccucggcaccuccugcgacaucuucaccaacucccgcggcaagcgcgccuccaagggcuccaagaccugcggcuucgucgacgagcgcggccucuacaagucccucaagggcgccugcaagcucaagcucugcggcguccucggccuccgccucauggacggcaccugggucgccaugcaggccuccgacgagaccaaguggugcccccccgaccagcucgucaaccuccacgacuuccgcuccgacgagaucgagcaccucgucgucgaggagcucgucaagaagcgcgagaagugccucgacgcccucgaguccaucaugaccaccaaguccgucuccuuccgccgccucucccaccuccgcaagcucguccccggcuucggcaaggccuacaccaucuucaacaagacccucauggaggccgacgcccacuacaaguccguccgcaccuggaacgagaucauccccuccaagggcugccuccgcgucggcggccgcugccacccccacgucaacggcgucuucuucaacggcaucauccucggccccgacggccacguccucauccccgagaugcaguccucccuccuccagcagcacauggagcuccucgaguccuccgucaucccccucaugcacccccucgccgaccccuccaccgucuucaaggacggcgacgaggccgagaacuucgucgagguccaccuccccgacguccacaagcagaucuccggcgucgaccucggccuccccaacuggggcaaguacguccucgucuccgccggcguccucaucgcccucaugcucaucaucuuccucaugaccugcugcggccgcgucaaccgccccgaguccacccagcacaaccucggcggcaccggccgcgaggucuccgucaccccccaguccggcaaggucaucuccuccugggaguccuacaaguccggcggcggcacccgccucuga

SEQ ID NO: 127536 - RNA, 1575 nt, Artificial Sequence
  derived and/or modified CDS sequence (opt2) from glycoprotein__RABV__KF437653.1
auggucccccaggcccuccucuucgucccccuccucgucuucuccaugugcuucggcaaguuccccaucuacaccauccccgacaagcucggccccuggucccccaucgacauccaccaccucuccugccccaacaaccucgucgucgaggacgagggcugcaccaaccucuccggcuucuccuacauggagcucaaggucggcuacaucuccgccaucaaggucaacggcuucaccugcaccggcgucgucaccgaggccgagaccuacaccaacuucgucggcuacgucaccaccaccuucaagggcaagcacuuccgccccacccccgacgccugccgcgccgccuacaacuggaagauggccggcgacccccgcuacgaggagucccuccacaaccccuaccccgacuaccacuggcuccgcaccgucaagaccaccaaggagucccucgucaucaucucccccuccgucgccgaccucgaccccuacgacaagucccuccacucccgcgucuuccccaacggcaagugcuccggcaucaccaucuccuccaccuacugccccaccaaccacgacuacaccaucuggcuccccgagaacccccgccucggcaccuccugcgacaucuucaccaacucccgcggcaagcgcgccuccaagggcuccaagaccugcggcuucgucgacgagcgcggccucuacaagucccucaagggcgccugcaagcucaagcucugcggcguccucggccuccgccucaccgacggcaccugggucgccaugcaggccuccgacgagaccaaguggugcccccccgaccagcucgucaaccuccacgacuuccgcuccgacgagaucgagcaccucgucgucgaggagcucgucaagaagcgcgaggagugccucgacgcccucgaguccaucaugaccaccaaguccgucuccuuccgccgccucucccaccuccgcaagcucguccccggcuucggcaaggccuacaccaucuucaacaagacccucauggaggccgacgcccacuacaaguccguccgcaccuggaacgagaucauccccuccaagggcugccuccgcgucggcggccgcugccacccccacgucaacggcgucuucuucaacggcaucauccucggccccgacggccacguccucauccccgagaugcaguccucccuccuccagcagcacauggagcuccucgaguccuccgucaucccccucaugcacccccucgccgaccccuccaccgucuucaaggacggcgacgaggccgagaacuucgucgagguccaccuccccgacguccacaagcagaucuccggcgucgaccucggccuccccaacuggggcaaguacguccucgucuccgccggcguccucaucgcccucaugcucaucaucuuccucaugaccugcugcggccgcgucaaccgccccgaguccacccagcacaaccucggcggcaccggccgcgaggucuccgucaccccccaguccggcaaggucaucuccuccugggaguccuacaaguccggcggcggcacccgccucuga

SEQ ID NO: 127537 - RNA, 1575 nt, Artificial Sequence
  derived and/or modified CDS sequence (opt2) from glycoprotein__RABV__KF437654.1
auggucccccaggcccuccucuucgucccccuccucgucuucuccaugugcuccggcaaguuccccaucuacaccauccccgacaagcucggccccuggucccccaucgacauccaccaccucuccugccccaacaaccucgucgucgaggacgagggcugcaccaaccucuccggcuucuccuacauggagcucaaggucggcuacaucuccgccaucaaggucaacggcuucaccugcaccggcgucgucaccgaggccgagaccuacaccaacuucgucggcuacgucaccaccaccuucaagcgcaagcacuuccgccccacccccgacgccugccgcgccgccuacaacuggaagauggccggcgacccccgcuacgaggagucccuccacaaccccuaccccgacuaccacuggcuccgcaccgucaaggccaccaaggagucccucgucaucaucucccccuccgucgccgaccucgaccccuacgacaagucccuccacucccgcgucuuccccaacggcaagugcuccggcaucaccaucuccuccaccugcugccccaccaaccacgacuacaccaucuggcuccccgagaacccccgccucggcaccuccugcgacaucuucaccaacucccgcggcaagcgcgccuccaagggcuccaagaccugcggcuucgucgacgagcgcggccucuacaagucccucaagggcgccugcaagcucaagcucugcggcguccucggccuccgccucauggacggcgccugggucgccaugcaggccuccgacgagaccaaguggugcccccccgaccagcucgucaaccuccacgacuuccgcuccgacgagaucgagcaccucgucgucgaggagcucgucaagaagcgcgaggagugccucgacgcccucgaguccaucaugaccaccaaguccgucuccuuccgccgccucucccaccuccgcaagcucguccccggcuucggcaaggccuacaccaucuucaacaagacccucauggaggccgacgcccacuacaaguccguccgcaccuggaacgagaucauccccuccaagggcugccuccgcgucggcggccgcugccacccccacgucaacggcgucuucuucaacggcaucauccucggccccgacggccacguccucauccccgagaugcaguccucccuccuccagcagcacauggagcuccucgaguccuccgucaucccccucaugcacccccucgccgaccccuccaccgucuucaaggacggcgacgaggccgagaacuucgucgagguccaccuccccgacguccacaagcagaucuccggcgucgaccucggccuccccaacuggggcaaguacguccucgucuccgccggcguccucaucgcccucaugcucaucaucuuccucaugaccugcugcggccgcgucaaccgccccgaguccacccagcacaaccucggcggcaccggccgcgaggucuccgucaccccccaguccggcaaggucaucuccuccugggaguccuacaaguccggcggcggcacccgccucuga

SEQ ID NO: 127538 - RNA, 1575 nt, Artificial Sequence
  derived and/or modified CDS sequence (opt2) from glycoprotein__RABV__KF484518.1
augguccuccaggcccuccucuucgcccccuuccucaucuccucccucugcuucggcaaguuccccaucuacaccauccccgacaagcucggccccuggucccccaucgacauccaccaccucuccugccccaacaaccucgucgucgaggacgagggcugcaacucccucuccggcuucuccuacauggagcucaaggucggcuacaucuccgccaucaaggucaacggcuucaccugcaccggcgucgucaccgaggccgagaccuacaccaacuucgucggcuacgucaccaccaccuucaagcgcaagcacuuccgccccaugcccgacgccugccgcuccgccuacaacuggaaggucgccggcgacccccgcuacgaggagucccuccacaaccccuaccccgacuaccacuggcuccgcaccgucaagaccaccaaggagucccucaucaucaucucccccuccgucgccgaccucgaccccuacgacaagucccuccacucccgcaucuuccccggcggcaagugcuccggcaugaccaucuccuccaccuacugcuccaccaaccacgacuacaccaucuggaugcccgagaagaccggccucggcaccuccugcgacaucuucaucaccuccaagggcaagcgcgccuccaagggcggccgcaccugcggcuucgucgacgagcgcggccucuacaagucccucaagggcgccugcaagcucaagcucugcggcgucuccggccuccgccucauggacggcaccugggccgccauccagaccuccgacgagaccaaguggugcucccccgaccagcucgucaaccuccacgaccuccacuccgacgagaucgagcaccucgucgucgaggagcucguccgccgccgcgaggagugccucgacgcccucgaguccaucaugaccaccaaguccgucuccuuccgccgccucucccaccuccgcaagcucguccccggcuucggcaaggccuacaccaucuucaacaagacccucauggaggccgacgcccacuacaaguccguccgcaccuggaacgagaucauccccuccaagggcugccuccgcgucggcggcaagugccacccccacgucaacggcgucuucuucaacggcaucauccucggccccgacggccacguccucauccccgagaugcaguccucccuccuccagcagcacauggagcuccucgaguccuccgucaucccccucaugcacccccucgccgaccucuccaccgucuucaaggacggcgacgaggccgaggacuucgucgagguccaccuccccgacguccacaagcacgucuccggcgucgaccucggccuccccuccuggggcaaguacaugcucauguccgccggcgcccucgccacccucaugcucgucaucccccucaugaagugcugccgccgcgucaaccgcaccaaguccauccagcagggcccccgcgaguccgaccgcaaggucuccgucaccccccagaacggcaaggucaucuccuccugggaguccuacaaguccggcggcggcaccggccucuga

SEQ ID NO: 127539 - RNA, 1575 nt, Artificial Sequence
  derived and/or modified CDS sequence (opt2) from glycoprotein__RABV__KF484519.1
augguccuccaggcccuccucuucgcccccuuccucaucuccucccucugccucggcaaguuccccaucuacaccauccccgacaagcucggccccuggucccccaucgacauccaccaccucuccugccccaacaaccucgucaucgaggacgagggcugcaacucccucuccggcuucuccuacauggagcucaaggucggcuacaucuccgccaucaaggucaacggcuucaccugcaccggcgucgucaccgaggccgagaccuacaccaacuucgucggcuacgucaccaccaccuucaagcgcaagcacuuccgccccaugcccgacgccugccgcuccgccuacaacuggaagcucgccggcgacccccgcuacgaggagucccuccacaaccccuaccccgaguaccacuggcuccgcaccgucaagaccaccaaggagucccucaucgucaucucccccuccgucgccgaccucgaccccuacgacaagucccuccacucccgcaucuuccccuccggcaagugcuccggcaugaccgucuccuccaccuacugcuccaccaaccacgaguacaccaucuggaugcccgagaaggucggccucggcaccuccugcgacaucuucaucaccuccaagggcaagcgcgccuccaagggcggcaagaccugcggcuucgucgacgagcgcggccucuacaagucccucaagggcgccugcaagcucaagcucugcggcgucuccggccuccgccucauggacggcaccugggucgccauccagaccuccgacgagaccaaguggugcucccccgaccagcucgucaaccuccacgaccuccacuccgacgagaucgagcaccucgucgucgaggagcucguccgcaagcgcgaggagugccucgacgcccucgaguccaucaugaccaccaaguccgucuccuuccgccgccucucccaccuccgcaagcucguccccggcuucggcaaggccuacaccaucuucaacaagacccucauggaggccgacgcccacuacaaguccguccgcaccuggaacgagaucauccccuccaagggcugccuccgcgucggcggcaagugccacccccacgucaacggcgucuucuucaacggcaucauccucggccccgacggccacguccucauccccgagaugcaguccucccuccuccagcagcacaucgagcuccucgaguccuccgucaucccccucaugcacccccucgccgaccucuccaccgucuucaaggacggcgacgaggccgaggacuucgucgagguccaccuccccgacguccacaagcagaucuccggcgucgaccucggccuccccuccuggggcaaguacguccucauguccgccggcgcccucgccacccucauccucgucaccucccucaugaagugcugccgcugggucaaccgcaccaaguccauccagcagggcccccgcgaguccgagcgcaaggucuccgucaccccccaguccggcaaggucaucuccuccugggaguccuacaagaucggcggcgagaccggccucuga

SEQ ID NO: 127540 - RNA, 1575 nt, Artificial Sequence
  derived and/or modified CDS sequence (opt2) from glycoprotein__RABV__KF484520.1
augguccuccaggcccuccucuucgcccccuuccucaucuccucccucugccucggcaaguuccccaucuacaccauccccgacaagcucggccccuggucccccaucgacauccaccaccucuccugccccaacaaccucgucgucgaggacgagggcugcaacucccucuccggcaucuccuacauggagcucaaggucggcuacaucuccgccaucaaggucaacggcuucaccugcaccggcgucgucaccgaggccgagaccuacaccaacuucgucggcuacgucaccaccaccuucaagcgcaagcacuuccaccccaugcccgacgccugccgcuccgccuacaacuggaagcucgccggcgacccccgcuacgaggagucccuccacaaccccuaccccgacuaccacuggcuccgcaccgucaagaccaccaaggagucccucaucaucaucucccccuccgucgccgaccucgaccccuacgacaagucccuccacucccgcaucuuccccuccggcaagugcuccggcaugaccaucuccuccaccuacugcuccaccaaccacgaguacaccaucuggaugcccgagaaggccggccucggcaccuccugcgacaucuucaccaccuccaagggcaagcgcgccuccaagggcggcaagaccugcggcuucgucgacgagcgcggccucuacaagucccucaagggcgccugcaagcucaagcucugcggcgucuccggccuccgccucauggacggcaccugggucgccauccagaccuccgaggagaccaaguggugcccccccgaccagcucgucaaccuccacgaccuccacuccgacgagaucgagcaccucgucgucgaggagcucgucaagaagcgcgaggagugccucgacgcccucgaguccaucaugaccaccaaguccgucuccuuccgccgccucucccaccuccgcaagcucguccccggcuucggcaaggccuacaccaucuucaacaagacccucauggaggccgacgcccacuacaaguccauccgcaccuggaacgagaucauccccuccaagggcugccuccgcgucggcggcaagugccacccccacgucaacggcgucuucuucaacggcaucauccucggccccgacggccacguccucauccccgagaugcaguccucccuccuccagcagcacauggagcuccucgaguccuccgucaucccccucaugcacccccucgccgaccucuccaccgucuucaaggacggcgacgaggccgaggacuucgucgagguccaccuccccgacguccacaagcagaucuccggcgucgaccucggccuccccuccuggggcaaguacguccucauguccgccggcgcccucgccauccucaugcucgucaucucccucaugaagugcuucuggggcgucaaccgcaccaagcccauccagcagggcccccgcgaguccgagcgcaaggucuccaucgccccccagucccgcaaggucaucuccuccugggaguccuacaaguccggcggcgagaccgagcucuga

SEQ ID NO: 127541 - RNA, 1575 nt, Artificial Sequence
  derived and/or modified CDS sequence (opt2) from glycoprotein__RABV__KF484521.1
augguccuccaggcccuccucuucgcccccuuccucaucuccucccucugccucggcaaguuccccaucuacaccauccccgacaagcucggccccuggucccccaucgacauccaccaccucuccugccccaacaaccucgucgucgaggacgagggcugcaacucccucuccggcuucuccuacauggagcucaaggucggcuacaucuccgccaucaaggucaacggcuucaccugcaccggcgucgucaccgaggccgagaccuacaccaacuucgucggcuacgucaccaccaccuucaagcgcaagcacuuccgccccaugcccgacgccugccgcuccgccuacaacuggaagcucgccggcgacccccgcuacgaggagucccuccacaaccccuaccccgacuaccacuggcuccgcaccgucaagaccaccaaggagucccucaucgucaucucccccuccgucgccgaccucgaccccuacgacaagucccuccacucccgcaucuuccccggcggcaagugcuccggcaugaccgucuccuccaccuacugcuccaccaaccacgaguacaccaucuggaugcccgagaaggccggccucggcaccuccugcgacaucuucaccaccuccaagggcaagcgcgccaccaagggcggcaagaccugcggcuucgucgacgagcgcggccucuacaagucccucaagggcgccugcaagcucaagcucugcggcgucuccggccuccgccucauggacggcaccugggucgccauccagaccuccgacgagaccaaguggugcucccccgaccagcucgucaaccuccacgaccuccacuccgacgagaucgagcaccucgucgucgaggagcucguccgcaagcgcgaggagugccucgacgcccucgaguccaucaugaccaccaaguccgucuccuuccgccgccucucccaccuccgcaagcucguccccggcuucggcaaggccuacaccaucuucaacaagacccucauggaggccgacgcccacuacaaguccguccgcaccuggaacgagaucauccccuccaagggcugccuccgcgucggcggcaagugccacccccacgucaacggcgucuucuucaacggcaucauccucggccccgacggccacguccucauccccgagaugcaguccucccuccuccagcagcacauggagcuccucgaguccuccgucaucccccucaugcacccccucgccgaccccuccaccgucuucaaggacgacgacgaggccgaggacuucgucgagguccaccuccccgacguccacaagcaggucuccggcgucgaccucggccuccccuccuggggccgcuacguccucauguccgccggcgcccucgccacccucaugcucgucaucucccucaugaagugcugcaagggcgucaaccgcaccaaguccaucaagcagggcucccgcgaguccgagcgcaaggucuccaucaccccccaguccggcaaggucaucuccuccugggaguccuacaaguccggcggcgagaccggccucuga

SEQ ID NO: 127542 - RNA, 1575 nt, Artificial Sequence
  derived and/or modified CDS sequence (opt2) from glycoprotein__RABV__KF484522.1
augguccuccaggcccuccucuucgcccccuuccucaucuccucccucugccucggcaaguuccccaucuacaccauccccgacaagcucggccccuggucccccaucgacauccaccaccucuccugccccaacaaccucgucaucgaggacgagggcugcaacucccucuccggcuucuccuacauggagcucaaggucggcuacaucuccgccaucaaggucaacggcuucaccugcaccggcgucgucaccgaggccgagaccuacaccaacuucgucggcuacgucaccaccaccuucaagcgcaagcacuuccgccccaugcccgacgccugccgcuccgccuacaacuggaagcucgccggcgacccccgcuacgaggagucccuccacaaccccuaccccgaguaccacuggcuccgcaccgucaagaccaccaaggagucccucaucgucaucucccccuccgucgccgaccucgaccccuacgacaagucccuccacucccgcaucuuccccuccggcaagugcuccggcaugaccgucuccuccaccuacugcuccaccaaccacgaguacaccaucuggaugcccgagaaggucggccucggcaccuccugcgacaucuucaucaccuccaagggcaagcgcgccuccaagggcggcaagaccugcggcuucgucgacgagcgcggccucuacaagucccucaagggcgccugcaagcucaagcucugcggcgucuccggccuccgccucauggacggcaccugggucgccauccagaccuccgacgagaccaaguggugcucccccgaccagcucgucaaccuccacgaccuccacuccgacgagaucgagcaccucgucgucgaggagcucguccgcaagcgcgaggagugccucgacgcccucgaguccaucaugaccaccaaguccgucuccuuccgccgccucucccaccuccgcaagcucguccccggcuucggcaaggccuacaccaucuucaacaagacccucauggaggccgacgcccacuacaaguccguccgcaccuggaacgagaucauccccuccaagggcugccuccgcgucggcggcaagugccacccccacgucaacggcgucuucuucaacggcaucauccucggccccgacggccacguccucauccccgagaugcaguccucccuccuccagcagcacaucgagcuccucgaguccuccgucaucccccucaugcacccccucgccgaccucuccaccgucuucaaggacggcgacgaggccgaggacuucgucgagguccaccuccccgacguccacaagcagaucuccggcgucgaccucggccuccccuccuggggcaaguacguccucauguccgccggcgcccucgccacccucauccucgucaucucccucaugaagugcugccgcugggucaaccgcaccaaguccauccagcagggcccccgcgaguccgagcgcaaggucuccgucaccccccaguccggcaaggucaucuccuccugggaguccuacaagaucggcggcgagaccggccucuga

SEQ ID NO: 127543 - RNA, 1575 nt, Artificial Sequence
  derived and/or modified CDS sequence (opt2) from glycoprotein__RABV__KF484523.1
augauccuccacgcccuccucuucgcccccuuccucaucuccccccucugccucggcaaguuccccaucuacaccauccccgacaagcucggccccuggucccccaucgacauccaccaccucuccugccccaacaaccucgucgucgaggacgagggcugcaacucccucuccggcuucuccuacauggagcucaaggucggcuacaucuccgccaucaaggucaacggcuucaccugcaccggcgucgucaccgaggccgagaccuacaccaacuucgucggcuacgucaccaccaccuucaagcgcaagcacuuccgccccaugcccgacgccugccgcuccgccuacaacuggaagcucgccggcgacccccgcuacgaggagucccuccacaaccccuaccccgaguaccacuggcuccgcaccgucaagaccaccaaggagucccucaucgucaucucccccuccgucgccgaccucgaccccuacgacaagucccuccacucccgcaucuuccccuccggcaagugcuccggcaugaccgucuccuccaccuacugcuccaccaaccacgaguacaccaucuggaugcccgagaaggucggccucggcaccuccugcgacaucuucaccaccuccaagggcaagcgcgccuccaagggcggccgcaucugcggcuucgucgacgagcgcggccucuacaagucccucaagggcgccugcaagcucaagcucugcggcgucuccggccuccgccucauggacggcaccggcuucgccauccagaccuccgacgagaccaaguggugcucccccgaccagcucgucaaccuccacgaccuccacuccgacgagaucgagcaccucgucgucgaggagcucguccgcaagcgcgaggagugccucgacgcccucgaguccaucaugaccaccaaguccgucuccuuccgccgccucucccaccuccgcaagcucguccccggcuucggcaaggccuacaccaucuucaacaagacccucauggaggccgacgcccacuacaaguccguccgcaccuggaacgagaucauccccuccaagggcugccuccgcgucggcggcaagugccacccccacgucaacggcgucuucuucaacggcaucauccucggccccgacggccacguccucauccccgagaugcaguccucccuccuccagcagcacauggagcuccucgaguccuccgucaucccccucaugcacccccucgccgaccucuccaccgucuucaaggacgacggcgaggccgaggacuucgucgagguccaccuccccgacguccacaagcagaucuccggcgucgaccucggccuccccuccuggggcaaguacgcccucauguccgccggcgcccucgccacccucauccucaugaucuuccucaugaagugcugccgcugggucaaccgcaccgaguccauccagcagggcccccgcgaguccgagcgcaaggucuccgucaccccccagaacggcaaggucaucuccuccugggaguccuacaagaucggcggcgagaccggccucuga

SEQ ID NO: 127544 - RNA, 1575 nt, Artificial Sequence
  derived and/or modified CDS sequence (opt2) from glycoprotein__RABV__KF484524.1
augguccuccaggcccuccucuucgcccccuuccucaucuccucccucugccucggcaaguuccccaucuacaccauccccgacaagcucggccccuggucccccaucgacauccaccaccucuccugccccaacaaccucgucaucgaggacgagggcugcaacucccucuccggcuucuccuacauggagcucaaggucggcuacaucuccgccaucaaggucaacggcuucaccugcaccggcgucgucaccgaggccgagaccuacaccaacuucgucggcuacgucaccaccaccuucaagcgcaagcacuuccgccccaugcccgacgccugccgcuccgccuacaacuggaagcucgccggcgacccccgcuacgaggagucccuccacaaccccuaccccgaguaccacuggcuccgcaccgucaagaccaccaaggagucccucaucgucaucucccccuccgucgccgaccucgaccccuacgacaagucccuccacucccgcaucuuccccuccggcaagugcuccggcaugaccgucuccuccaccuacugcuccaccaaccacgaguacaccaucuggaugcccgagaaggucggccucggcaccuccugcgacaucuucaucaccuccaagggcaagcgcgccuccaagggcggcaagaccugcggcuucgucgacgagcgcggccucuacaagucccucaagggcgccugcaagcucaagcucugcggcgucuccggccuccgccucauggacggcaccugggucgccauccagaccuccgacgagaccaaguggugcucccccgaccagcucgucaaccuccacgaccuccacuccgacgagaucgagcaccucgucgucgaggagcucguccgcaagcgcgaggagugccucgacgcccucgaguccaucaugaccaccaaguccgucuccuuccgccgccucucccaccuccgcaagcucguccccggcuucggcaaggccuacaccaucuucaacaagacccucauggaggccgacgcccacuacaaguccguccgcaccuggaacgagaucauccccuccaagggcugccuccgcgucggcggcaagugccacccccacgucaacggcgucuucuucaacggcaucauccucggccccgacggccacguccucauccccgagaugcaguccucccuccuccagcagcacauggagcuccucgaguccuccgucaucccccucaugcacccccucgccgaccucuccaccgucuucaaggagggcgacgaggccgaggacuucgucgagguccaccuccccgacguccacaagcagaucuccggcgucgaccucggccuccccuccuggggcaaguacguccucauguccgccggcgcccucgccacccucauccucgucaucucccucaugaagugcugccgcugggucaaccgcaccaaguccauccagcagggcccccgcgaguccgagcgcaaggucuccgucaccccccaguccggcaaggucaucuccuccugggagcccuacaagaucggcggcgagaccggccucuga

SEQ ID NO: 127545 - RNA, 1575 nt, Artificial Sequence
  derived and/or modified CDS sequence (opt2) from glycoprotein__RABV__KF484525.1
augguccuccaggcccuccucuucgcccccuuccucaucuccucccucugccucggcaaguuccccaucuacaccauccccgacaagcucggccccuggucccccaucgacauccaccaccucuccugccccaacaaccucgucgucgaggacgagggcugcaacucccucuccggcaucuccuacauggagcucaaggucggcuacaucuccgccaucaaggucaacggcuucaccugcaccggcgucgucaccgaggccgagaccuacaccaacuucgucggcuacgucaccaccaccuucaagcgcaagcacuuccaccccaugcccgacgccugccgcuccgccuacaacuggaagcucgccggcgacccccgcuacgaggagucccuccacaaccccuaccccgacuaccacuggcuccgcaccgucaagaccaccaaggagucccucaucaucaucucccccuccgucgccgaccucgaccccuacgacaagucccuccacucccgcaucuuccccuccggcaagugcuccggcaugaccaucuccuccaccuacugcuccaccaaccacgaguacaccaucuggaugcccgagaaggccggccucggcaccuccugcgacaucuucaccaccuccaagggcaagcgcgccuccaagggcggcaagaccugcggcuucgucgacgagcgcggccucuacaagucccucaagggcgccugcaagcucaagcucugcggcgucuccggccuccgccucauggacggcaccugggucgccauccagaccuccgaggagaccaaguggugcccccccgaccagcucgucaaccuccacgaccuccacuccgacgagaucgagcaccucgucgucgaggagcucgucaagaagcgcgaggagugccucgacgcccucgaguccaucaugaccaccaaguccgucuccuuccgccgccucucccaccuccgcaagcucguccccggcuucggcaaggccuacaccaucuucaacaagacccucauggaggccgacgcccacuacaaguccauccgcaccuggaacgagaucauccccuccaagggcugccuccgcgucggcggcaagugccacccccacgucgacggcgucuucuucaacggcaucauccucggccccgacggccacguccucauccccgagaugcaguccucccuccuccagcagcacauggagcuccucgaguccuccgucaucccccucaugcacccccucgccgaccucuccaccgucuucaaggacggcgacgaggccgaggacuucgucgagguccaccuccccgacguccacaagcagaucuccggcgucgaccucggccuccccuccuggggcaaguacguccucauguccgccggcgcccucgccauccucaugcucgucaucucccucaugaagugcuucuggggcgucaaccgcaccaagcccauccagcagggcccccgcgaguccgagcgcaaggucuccaucgccccccagucccgcaaggucaucuccuccugggaguccuacaagaacggcggcgagaccgagcucuga

SEQ ID NO: 127546 - RNA, 1575 nt, Artificial Sequence
  derived and/or modified CDS sequence (opt2) from glycoprotein__RABV__KF484526.1
augguccuccaggcccuccucuucgcccccuuccucaucuccucccucugccucggcaaguuccccaucuacaccauccccgacaagcucggccccuggucccccaucgacauccaccaccucuccugccccaacaaccucgucgucgaggacgagggcugcaacucccucuccggcuucuccuacauggagcucaaggucggcuacaucuccgccaucaaggucaacggcuucaccugcaccggcgucgucaccgaggccgagaccuacaccaacuucgucggcuacgucaccaccaccuucaagcgcaagcacuuccgccccaugcccgacgccugccgcuccgccuacaacuggaagcucgccggcgacccccgcuacgaggagucccuccacaaccccuaccccgaguaccacuggcuccgcaccgucaagaccaccaaggagucccucaucaucaucucccccuccgucgccgaccucgaccccuacgacaagucccuccacucccgcaucuuccccggcggcaagugcuccggcaugaccgucuccuccaccuacugcuccaccaaccacgaguacaccaucuggaugcccgagaaggucggccucggcaccuccugcgacaucuucaccaccuccaagggcaagcgcgccuccaagggcggcaagaccugcggcuucgucgacgagcgcggccucuacaagucccucaagggcgccugcaagcucaagcucugcggcgucuccggccuccgccucauggacggcaccugggucgccaugcagaccuccgacgagaccaaguggugcucccccgaccagcucgucaaccuccacgaccuccacuccgacgagaucgagcaccucgucgucgaggagcucguccgcaagcgcgaggagugccucgacgcccucgaguccaucaugaccaccaaguccgucuccuuccgccgccucucccaccuccgcaagcucguccccggcuucggcaaggccuacaccaucuucaacaagacccucauggaggccgacgcccacuacaaguccguccgcaccuggaacgagaucauccccuccaagggcugccuccgcgucggcggcaagugccacccccacgucaacggcgucuucuucaacggcaucauccucggccccgacggccacguccucauccccgagaugcaguccucccuccuccagcagcacauggagcuccucgaguccuccgucaucccccucaugcacccccucgccgaccucuccgccgucuucaaggagggcgacgaggccgaggacuucgucgagguccaccuccccgacguccacaagcagaucuccgaggucgaccucggccuccccuccuggggcaaguacguccucauguccgccggcgcccucgccacccucauccucgucaucucccucaugaagugcugccgcugggucaaccgcaccaaguccauccagcagggcccccgcgaguccgagcgcaaggucuccgucaccccccagaacggcaaggucaucuccuccugggaguccuacaagauccgcggcgagaccggccucuga

SEQ ID NO: 127547 - RNA, 1575 nt, Artificial Sequence
  derived and/or modified CDS sequence (opt2) from glycoprotein__RABV__KF484527.1
augguccuccaggcccuccucuucgcccccuuccucaucuccucccucugccucggcaaguuccccaucuacaccauccccgacaagcucggccccuggucccccaucgacauccaccaccucuccugccccaacaaccucgucgucgaggacgagggcugcaacucccucuccggcuucuccuacauggagcucaaggucggcuacaucuccgccaucaaggucaacggcuucaccugcaccggcgucgucaccgaggccgagaccuacaccaacuucgucggcuacgucaccaccaccuucaagcgcaagcacuuccgccccaugcccgacgccugccgcuccgccuacaacuggaagcucgccggcgacccccgcuacgaggagucccuccacaaccccuaccccgaguaccacuggcuccgcaccgucaagaccaccaaggagucccucaucgucaucucccccuccgucgccgaccucgaccccuacgacaagucccuccacucccgcaucuuccccggcggcaagugcuccggcaugaccgucuccuccaccuacugcuccaccaaccacgaguacaccaucuggaugcccgagaaggucggccucggcaccuccugcgacaucuucaccaccuccaagggcaagcgcgccuccaagggcggccgcaccugcggcuucgucgacgagcgcggccucuacaagucccucaagggcgccugcaagcucaagcucugcggcgucuccggccuccgccucauggacggcaccugggucgccaugcagaccuccgacgagaccaaguggugcucccccgaccagcucgucaaccuccacgaccuccacuccgacgagaucgagcaccucgucgucgaggagcucguccgcaagcgcgaggagugccucgacgcccucgaguccaucaugaccaccaaguccgucuccuuccgccgccucucccaccuccgcaagcucguccccggcuucggcaaggccuacaccaucuucaacaagacccucauggaggccgacgcccacuacaaguccguccgcaccuggaacgagaucauccccuccaagggcugccuccgcgucggcggcaagugccacccccacgucaacggcgucuucuucaacggcaucauccucggccccgacggccacguccucauccccgagaugcaguccucccuccuccagcagcacauggagcuccucgaguccuccgucaucccccucaugcacccccucgccgaccucuccaccgucuucaaggagggcgacgaggccgaggacuucgucgagguccaccuccccgacguccacaagcagaucuccggcgucgaccucggccuccccuccuggggcaaguacguccucaugggcgccggcgcccucgccacccucauccucgucaucucccucaugaagugcugccgcugggucaaccgcaccaaguccauccagcagggcccccgcggcuccgagcgcaaggucuccgucaccccccagaacggcaaggucaucuccuccugggaguccuacaagaucggcggcgagaccggccucuga

SEQ ID NO: 127548 - RNA, 1575 nt, Artificial Sequence
  derived and/or modified CDS sequence (opt2) from glycoprotein__RABV__KF484528.1
augguccuccaggcccuccucuucgcccccuuccucaucuccucccucugccucggcaaguuccccaucuacaccauccccgacaagcucggccccuggucccccaucgacauccaccaccucuccugccccaacaaccucgucgucgaggacgagggcugcaacucccucuccggcuucuccuacauggagcucaaggucggcuacaucuccgccaucaaggucaacggcuucaccugcaccggcgucgucaccgaggccgagaccuacaccaacuucgucggcuacgucaccaccaccuucaagcgcaagcacuuccgccccaugcccgacgccugccgcuccgccuacaacuggaagcucgccggcgacccccgcuacgaggagucccuccacaaccccuaccccgaguaccacuggcuccgcaccgucaagaccaccaaggagucccucaucaucaucucccccuccgucgccgaccucgaccccuacgacaagucccuccacucccgcaucuuccccggcggcaagugcuccggcaugaccgucuccuccaccuacugcuccaccaaccacgaguacaccaucuggaugcccgagaaggucggccucggcaccuccugcgacaucuucaccaccuccaagggcaagcgcgccuccaagggcggcaagaccugcggcuucgucgacgagcgcggccucuacaagucccucaagggcgccugcaagcucaagcucugcggcgucuccggccuccgccucauggacggcaccugggucgccaugcagaccuccgacgagaccaaguggugcucccccgaccagcucgucaaccuccacgaccuccacuccgacgagaucgagcaccucgucgucgaggagcucguccgcaagcgcgaggagugccucgacgcccucgaguccaucaugaccaccaaguccgucuccuuccgccgccucucccaccuccgcaagcucguccccggcuucggcaaggccuacaccaucuucaacaagacccucauggaggccgacgcccacuacaaguccguccgcaccuggaacgagaucauccccuccaagggcugccuccgcgucggcggcaagugccacccccacgucaacggcgucuucuucaacggcaucauccucggccccgacggccacguccucauccccgagaugcaguccucccuccuccagcagcacauggagcuccucgaguccuccgucaucccccucaugcacccccucgccgaccucuccaccgucuucaaggagggcgacgaggccgaggacuucgucgagguccaccuccccgacguccacaagcagaucuccgaggucgaccucggccuccccuccuggggcaaguacguccucauguccgccggcgcccucgccacccucauccucgucaucucccucaugaagugcugccgcugggucaaccgcaccaaguccauccagcagggcccccgcgaguccgagcgcaaggucuccgucaccccccagaacggcaaggucaucuccuccugggaguccuacaagaucggcggcgagaccggccucuga

SEQ ID NO: 127549 - RNA, 1575 nt, Artificial Sequence
  derived and/or modified CDS sequence (opt2) from glycoprotein__RABV__KF484529.1
augguccuccaggcccuccucuucgcccccuuccucaucuccucccucugccucggcaaguuccccaucuacaccauccccgacaagcucggccccuggucccccaucgacauccaccaccucuccugccccaacaaccucgucgucgaggacgagggcugcaacucccucuccggcuucuccuacauggagcucaaggucggcuacaucuccgccaucaaggucaacggcuucaccugcaccggcgucgucaccgaggccgagaccuacaccaacuucgucggcuacgucaccaccaccuucaagcgcaagcacuuccgccccaugcccgacgccugccgcuccgccuacaacuggaagcucgccggcgacccccgcuacgaggagucccuccacaaccccuaccccgaguaccacuggcuccgcaccgucaagaccaccaaggagucccucaucgucaucucccccuccgucgccgaccucgaccccuacgacaagucccuccacucccgcaucuuccccggcggcaagugcuccggcaugaccgucuccuccaccuacugcuccaccaaccacgaguacaccaucuggaugcccgagaaggucggccucggcaccuccugcgacaucuucaccaccuccaagggcaagcgcgccuccaagggcggccgcaccugcggcuucgucgacgagcgcggccucuacaagucccucaagggcgccugcaagcucaagcucugcggcgucuccggccuccgccucauggacggcaccugggucgccaugcagaccuccgacgagaccaaguggugcucccccgaccagcucgucaaccuccacgaccuccacuccgacgagaucgagcaccucgucgucgaggagcucguccgcaagcgcgaggagugccucgacgcccucgaguccaucaugaccaccaaguccgucuccuuccgccgccucucccaccuccgcaagcucguccccggcuucggcaaggccuacaccaucuucaacaagacccucauggaggccgacgcccacuacaaguccguccgcaccuggaacgagaucauccccuccaagggcugccuccgcgucggcggcaagugccacccccacgucaacggcgucuucuucaacggcaucauccucggccccgacggccacguccucauccccgagaugcaguccucccuccuccagcagcacauggagcuccucgaguccuccgucaucccccucaugcacccccucgccgaccucuccaccgucuucaaggaggacgacgaggccgaggacuucgucgagguccaccuccccgacguccacaagcagaucuccggcgucgaccucggccuccccuccuggggcaaguacguccucaugggcgccggcgcccucgccacccucacccucgucaucucccucaucaagugcugccgcugggucaaccgcaccaaguccauccagcagggcccccgcgaguccgagcgcaaggucuccgucaccccccagaacggcaaggucaucuccuccugggaguccuacaagaucggcggcgagaccggccucuga

SEQ ID NO: 127550 - RNA, 1575 nt, Artificial Sequence
  derived and/or modified CDS sequence (opt2) from glycoprotein__RABV__KF484530.1
augguccuccaggcccuccucuucgcccccuuccucaucuccucccucugcuucggcaaguuccccaucuacaccauccccgacaagcucggccccuggucccccaucgacguccaccaccucuccugccccaacaaccucgucaucgaggacgagggcugcaacucccucuccggcuucuccuacauggagcucaaggucggcuacaucuccgccaucaaggucaacggcuucaccugcaccggcgucgucaccgaggccgagaccuacaccaacuucgucggcuacgucaccaccaccuucaagcgcaagcacuuccgccccaugcccgacgccugccgcuccgccuacaacuggaaggucgccggcgacccccgcuacgaggagucccuccacaaccccuaccccgacuaccacuggcuccgcaccgucaagaccaccaaggagucccucaucaucaucucccccuccgucgccgaccucgaccccuacgacaagucccuccacucccgcaucuuccccggcggcaagugcuccggcaugaccaucuccuccaccuacugcuccaccaaccacgacuacaccaucuggaugcccgagaagaccggccucggcaccuccugcgacaucuucaccaccuccaagggcaagcgcgccuccaagggcggccgcaccugcggcuucgucgacgagcgcggccucuacaagucccucaagggcgccugcaagcucaagcucugcggcgucuccggccuccgccucauggacggcaccugggccgccauccagaccuccgacgagaccaaguggugcucccccgaccagcucgucaaccuccacgaccuccacuccgacgagaucgagcaccucgucgucgaggagcucguccgccgccgcgaggagugccucgacgcccucgaguccaucaugaccaccaaguccgucuccuuccgccgccucucccaccuccgcaagcucguccccggcuucggcaaggccuacaccaucuucaacaagacccucauggaggccgacgcccacuacaaguccguccgcaccuggaacgagaucauccccuccaagggcugccuccgcgucggcggcaagugccacccccacgucaacggcgucuucuucaacggcaucauccucggccccgacggccacguccucauccccgagaugcaguccucccuccuccagcagcacauggagcuccucgaguccuccgucaucccccucaugcacccccucgccgaccucuccaccgucuucaaggacggcgacgaggccgaggacuucgucgagguccaccuccccgacguccacaagcaggucuccggcgucgaccucggccuccccuccuggggcaaguacaugcucauguccgccggcgcccucgccacccucaugcucgucaucccccucaugaagugcugccgccgcgucaaccgcaccaaguccacccagcagggcccccgcgaguccgaccgcaaggucuccgucaccccccagaacggcaaggucaucuccuccugggaguccuacaaguccggcggcggcaccggccucuga

SEQ ID NO: 127551 - RNA, 1575 nt, Artificial Sequence
  derived and/or modified CDS sequence (opt2) from glycoprotein__RABV__KF484531.1
augguccuccaggcccuccucuucgcccccuuccucaucuccucccucugccucggcaaguuccccaucuacaccauccccgacaagcucggccccuggucccccaucgacauccaccaccucuccugccccaacaaccucgucgucgaggacgagggcugcaacucccucuccggcuucuccuacauggagcucaaggucggcuacaucuccgccaucaaggucaacggcuucaccugcaccggcgucgucaccgaggccgagaccuacaccaacuucgucggcuacgucaccaccaccuucaagcgcaagcacuuccgccccaugcccgacgccugccgcuccgccuacaacuggaagcucgccggcgacccccgcuacgaggagucccuccacaaccccuaccccgaguaccacuggcuccgcaccgucaagaccaccaaggagucccucaucgucaucucccccuccgucgccgaccucgaccccuacgacaagucccuccacucccgcaucuuccccggcggcaagugcuccggcaugaccgucuccuccaccuacugcuccaccaaccacgaguacaccaucuggaugcccgagaaggucggccucggcaccuccugcgacaucuucaccaccuccaagggcaagcgcgccuccaagggcggccgcaccugcggcuucgucgacgagcgcggccucuacaagucccucaagggcgccugcaagcucaagcucugcggcgucuccggccuccgccucauggacggcaccugggucgccaugcagaccuccgacgagaccaaguggugcucccccgaccagcucgucaaccuccacgaccuccacuccgacgagaucgagcaccucgucgucgaggagcucguccgcaagcgcgaggagugccucgacgcccucgaguccaucaugaccaccaaguccgucuccuuccgccgccucucccaccuccgcaagcucguccccggcuucggcaaggccuacaccaucuucaacaagacccucauggaggccgacgcccacuacaaguccguccgcaccuggaacgagaucauccccuccaagggcugccuccgcgucggcggcaagugccacccccacgucaacggcgucuucuucaacggcaucauccucggccccgacggccacguccucauccccgagaugcaguccucccuccuccagcagcacauggagcuccucgaguccuccgucaucccccucaugcacccccucgccgaccucuccaccgucuucaaggaggacgacgaggccgaggacuucgucgagguccaccuccccgacguccacaagcagaucuccggcgucgaccucggccuccccuccuggggcaaguacguccucaugggcgccggcgcccucgccacccucauccucgucaucucccucaucaagugcugccgcugggucaaccgcaccaaguccauccagcagggcccccgcgaguccgagcgcaaggucuccgccaccccccagaacggcaaggucaucuccuccugggaguccuacaagaucggcggcgagaccggccucuga

SEQ ID NO: 127552 - RNA, 1575 nt, Artificial Sequence
  derived and/or modified CDS sequence (opt2) from glycoprotein__RABV__KF484532.1
augauccuccacgcccuccucuucgcccccuuccucaucuccucccucugccucggcaaguuccccaucuacaccauccccgacaagcucggccccuggucccccaucgacauccaccaccucuccugccccaacaaccucgucgucgaggacgagggcugcaacucccucuccggcuucuccuacauggagcucaaggucggcuacaucuccgccaucaaggucaacggcuucaccugcaccggcgucgucaccgaggccgagaccuacaccaacuucgucggcuacgucaccaccaccuucaagcgcaagcacuuccgccccaugcccgacgccugccgcuccgccuacaacuggaagcucgccggcgacccccgcuacgaggagucccuccacaaccccuaccccgaguaccacuggcuccgcaccgucaagaccaccaaggagucccucaucgucaucucccccuccgucgccgaccucgaccccuacgacaagucccuccacucccgcaucuuccccuccggcaagugcuccggcaugaccgucuccuccaccuacugcuccaccaaccacgaguacaccaucuggaugcccgagaaggucggccucggcaccuccugcgacaucuucaccaccuccaagggcaagcgcgccuccaagggcggccgcaucugcggcuucgucgacgagcgcggccucuacaagucccucaagggcgccugcaagcucaagcucugcggcgucuccggccuccgccucauggacggcaccugggucgccauccagaccuccgacgagaccaaguggugcucccccgaccagcucgucaaccuccacgaccuccacuccgacgagaucgagcaccucgucgucgaggagcucguccgcaagcgcgaggagugccucgacgcccucgaguccaucaugaccaccaaguccgucuccuuccgccgccucucccaccuccgcaagcucguccccggcuucggcaaggccuacaccaucuucaacaagacccucauggaggccgacgcccacuacaaguccguccgcaccuggaacgagaucauccccuccaagggcugccuccgcgucggcggcaagugccacccccacgucaacggcgucuucugcaacggcaucauccucggccccgacggccacguccucauccccgagaugcaguccucccuccuccagcagcacauggagcuccucgaguccuccgucaucccccucaugcacccccucgccgaccucuccaccgucuucaaggacgacggcgaggccgaggacuucgucgagguccaccuccccgacguccacaagcagaucuccggcgucgaccucggccuccccuccuggggcaaguacgcccucauguccgccggcgcccucgccacccucauccucaugaucucccucaugaagugcugccgcugggucaaccgcaccgaguccauccgccagggcccccgcgaguccgagcgcaaggucuccgucaccccccagaacggcaaggucaucuccuccugggaguccuacaagaucggcggcgagaccggccucuga

SEQ ID NO: 127553 - RNA, 1575 nt, Artificial Sequence
  derived and/or modified CDS sequence (opt2) from glycoprotein__RABV__KF484533.1
augguccucaaggcccuccucuucgcccccuuccucaucuccucccucugccucggcaaguuccccaucuacaccauccccgacaagcucggccccuggucccccaucgacauccaccaccucuccugccccaacaaccucgucgucgaggacgagggcugcaacucccucuccggcuucuccuacauggagcucaaggucggcuacaucuccgccaucaaggucaacggcuucaccugcaccggcgucgucaccgaggccgagaccuacaccaacuucgucggcuacgucaccaccaccuucaagcgcaagcacuuccgccccaugcccgacgccugccgcuccgccuacaacuggaagcucgccggcgacccccgcuacgaggagucccuccacaaccccuaccccgacuaccacuggcuccgcaccguccgcaccaccaaggagucccucaucgucaucucccccuccgucgccgaccucgaccccuacgacaagucccuccacucccgcaucuuccccggcggcaagugcuccggcaugaccgucuccuccaccuacugcuccaccaaccacgaguacaccaucuggaugcccgagaaggccggccucggcaccuccugcgacaucuucaccaccuccaagggcaagcgcgccuccaagggcggccgcaccugcggcuucgucgacgagcgcggccucuacaagucccucaagggcgccugcaagcucaagcucugcggcgucuccggccuccgccucauggacggcaccugggucgccauccagaccuccgacgagaccaaguggugcucccccgaccagcucgucaaccuccacgaccuccacuccgacgagaucgagcaccucgucgucgaggagcucguccgcaagcgcgaggagugccucgacgcccucgaguccaucaugaccaccaaguccgucuccuuccgccgccucucccaccuccgcaagcucguccccggcuucggcaaggccuacaccaucuucaacaagacccucauggaggccgacgcccacuacaaguccguccgcaccuggaacgagaucauccccuccaagggcugccuccgcgucggcggcaagugccacccccacgucuccggcgucuucuucaacggcaucauccucggccccgacggccacguccucauccccgagaugcaguccucccuccuccagcagcacauggagcuccucgaguccuccgucaucccccucaugcacccccucgccgaccccuccaccgucuucaaggacgacgacgaggccgaggacuucgucgagguccaccuccccgacguccacaagcaggucuccggcgucgaccucggccuccccuccuggggcaaguacguccucauguccgccggcgcccucgccacccucaugcucgucaucucccucaugaagugcugccgcggcuucaaccgcaccaaguccauccgccagggcucccgcgaguccgagcagaaggucuccgucaccccccagaacggcaaggucaucuccuccugggaguccuacaaguccggcggcgagaccggccucuga

SEQ ID NO: 127554 - RNA, 1575 nt, Artificial Sequence
  derived and/or modified CDS sequence (opt2) from glycoprotein__RABV__KF484534.1
augguccuccaggcccuccucuucgcccccuuccucaucuccucccucugccucggcaaguuccccaucuacaccauccccgacaagcucggccccuggucccccaucgacauccaccaccucuccugccccaacaaccucgucgucgaggacgagggcugcaacucccucuccggcaucuccuacauggagcucaaggucggcuacaucuccgccaucaaggucaacggcuucaccugcaccggcgucgucaccgaggccgagaccuacaccaacuucgucggcuacgucaccaccaccuucaagcgcaagcacuuccgccccauggccgacgccugccgcuccgccuacaacuggaagcucaccggcgacccccgcuacgaggagucccuccacaaccccuaccccgacuaccacuggcuccgcaccgucaagaccaccaaggagucccucaucgucaucucccccuccgucgccgaccucgaccccuacgacaagucccuccacucccgcaucuuccccuccggcaagugcuccggcaugaccaucuccuccaccuacugcuccaccaaccacgaguacaccaucuggaugcccgagaaggccggccucggcaccuccugcgacaucuucaccaccuccaagggcaagcgcgccuccaagggcggcaagaccugcggcuucgucgacgagcgcggccucuacaagucccucaagggcgccugcaagcucaagcucugcggcgucuccggccuccgccucauggacggcaccugggucgccauccagaccuccgacgagaccaaguggugcucccccgaccagcucgucaaccuccacgaccuccacuccgacgagaucgagcaccucgucgucgaggagcucgucaagaagcgcgaggagugccucgacgcccucgaguccaucaugaccaccaaguccgucuccuuccgccgccucucccaccuccgcaagcucguccccggcuucggcaaggccuacaccaucuucaacaagacccucauggaggccgacgcccacuacaaguccauccgcaccuggaacgagaucauccccuccaagggcugccuccgcgucggcggcaagugccacccccacgucaacggcgucuucuucaacggcaucauccucggccccgacggccacguccucauccccgagaugcaguccucccuccuccagcagcacauggagcuccucgaguccuccgucaucccccucaugcacccccucgccgaccucuccaccgucuucaaggacggcgacgaggccgaggacuucgucgagguccaccuccccgacauccacaagcagaucuccggcgucgaccucggccuccccuccuggggcaaguacguccucauguccgccggcgcccucgccauccucaugcucgucuucucccucaugaagugcuucuggggcgucaaccgcaccaagcccauccagcgcuccccccgcgaguccgagcgcaaggucuccgucgccccccaguccggcaaggucaucuccuccugggaguccuacaaguccggcggcgagaccggccucuga

SEQ ID NO: 127555 - RNA, 1575 nt, Artificial Sequence
  derived and/or modified CDS sequence (opt2) from glycoprotein__RABV__KF484535.1
augguccuccaggcccuccucuucgcccccuuccucaucuccucccucugccucggcaaguuccccaucuacaccauccccgacaagcucggccccuggucccccaucgacauccaccaccucuccugccccaacaaccucgucgucgaggacgagggcugcaacucccucuccggcaucuccuacauggagcucaaggucggcuacaucuccgccaucaaggucaacggcuucaccugcaccggcgucgucaccgaggccgagaccuacaccaacuucgucggcuacgucaccaccaccuucaagcgcaagcacuuccaccccaugcccgacgccugccgcuccgccuacaacuggaagcucgccggcgacccccgcuacgaggagucccuccacaaccccuaccccgacuaccacuggcuccgcaccgucaagaccaccaaggagucccucaucaucaucucccccuccgucgccgaccucgaccccuacgacaagucccuccacucccgcaucuuccccuccggcaagugcuccggcaugaccaucuccuccaccuacugcuccaccaaccacgaguacaccaucuggaugcccgagaaggccggccucggcaccuccugcgacaucuucaccaccuccaagggcaagcgcgccuccaagggcggcaagaccugcggcuucgucgacgagcgcggccucuacaagucccucaagggcgccugcaagcucaagcucugcggcgucuccggccuccgccucauggacggcaccugggucgccauccagaccuccgacgagaccaaguggugcccccccgaccagcucgucaaccuccacgaccuccacuccgacgagaucgagcaccucgucgucgaggagcucgucaagaagcgcgaggagugccucgacgcccucgaguccaucaugaccaccaaguccgucuccuuccgccgccucucccaccuccgcaagcucguccccggcuucggcaaggccuacaccaucuucaacaagacccucauggaggccgacgcccacuacaaguccauccgcaccuggaacgagaucauccccuccaagggcugccuccgcgucggcggcaagugccacccccacgucaacggcgucuucuucaacggcaucauccucggccccgacggccacguccucauccccgagaugcaguccucccuccuccagcagcacauggagcuccucgaguccuccgucaucccccucaugcacccccucgccgaccucuccaccgucuucaaggacggcgacgaggccgaggacuucgucgagguccaccuccccgacguccacaagcagaucuccggcgucgaccucggccuccccuccuggggcaaguacguccucauguccgccggcgcccucgccauccucaugcucgucaucucccucaugaagugcuucuggggcgucaaccgcaccaagcccauccagcagggcccccgcgaguccgagcgcaaggucuccaucgccccccagucccgcaaggucaucuccuccugggaguccuacaaguccggcggcgagaccgagcucuga

SEQ ID NO: 127556 - RNA, 1575 nt, Artificial Sequence
  derived and/or modified CDS sequence (opt2) from glycoprotein__RABV__KF484536.1
augguccuccaggcccuccucuucgcccccuuccucaucuccucccucugccucggcaaguuccccaucuacaccauccccgacaagcucggccccuggucccccaucgacauccaccaccucuccugccccaacaaccucgucgucgaggacgagggcugcaacucccucuccggcuucuccuacauggagcucaaggucggcuacaucuccgccauccgcgucaacggcuucaccugcaccggcgucgucaccgaggccgagaccuacaccaacuucgucggcuacgucaccaccaccuucaagcgcaagcacuuccgccccaugcccgacgccugccgcuccgccuacaacuggaagcucgccggcgacccccgcuacgaggagucccuccacaaccccuaccccgacuaccacuggcuccgcaccgucaagaccaccaaggagucccucaucgucaucucccccuccgucgccgaccucgaccccuacgacaagucccuccacucccgcaucuuccccggcggcaagugcuccggcaucaccgucuccuccaccuacugcuccaccaaccacgaguacaccaucuggaugcccgagaaggccggccucggcaccuccugcgacaucuucaccaccuccaagggcaagcgcgccuccaagggcggccgcaccugcggcuucgucgacgagcgcggccucuacaagucccucaagggcgccugcaagcucaagcucugcggcgucuccggccuccgccucauggacggcaccugggucgccauccagacccccgacgagaccaaguggugcucccccgaccagcucgucaaccuccacgaccuccacuccgacgagaucgagcaccucgucgccgaggagcucguccgcaagcgcgaggagugccucgacgcccucgaguccaucaugaccaccaaguccgucuccuuccgccgccucucccaccuccgcaagcucguccccggcuucggcaaggccuacaccaucuucaacaagacccucauggaggccgacgcccacuacaaguccguccgcaccuggaacgagaucauccccuccaagggcugccuccgcgucggcggcaagugccacccccacgucaacggcgucuucuucaacggcaucauccucggccccgacggccacguccucauccccgagaugcaguccucccuccuccagcagcacauggagcuccucgaguccucccucaucccccucaugcacccccucgccgaccucuccaccgucuucaaggacggcgacgaggccgaggacuucgucgagguccaccuccccgacguccacaagcaggucuccggcgucgaccucggccuccccuccuggggcaaguacguccucauguccgccggcgcccucgccacccucaugcucgucaucucccucaucaagugcugccgcggcgucaaccgcacccgcuccauccagcgcggcccccgcgaguccgagcgcaaggucuccgucaccccccagaacggcaaggucaucuccuccugggaguccuacaaguccggcggcgagacccgccucuga

SEQ ID NO: 127557 - RNA, 1575 nt, Artificial Sequence
  derived and/or modified CDS sequence (opt2) from glycoprotein__RABV__KF484537.1
augguccuccaggcccuccucuucgcccccuuccucaucuccucccucugccucggcaaguuccccaucuacaccauccccgacaagcucggccccuggucccccaucgacauccaccaccucuccugccccaacaaccucgucgucgaggacgagggcugcaacucccucuccggcuucuccuacauggagcucaaggucggcuacaucuccgccauccgcgucaacggcuucaccugcaccggcgucgucaccgaggccgagaccuacaccaacuucgucggcuacgucaccaccaccuucaagcgcaagcacuuccgccccaugcccgacgccugccgcuccgccuacaacuggaagcucgccggcgacccccgcuacgaggagucccuccacaaccccuaccccgacuaccacuggcuccgcaccgucaagaccaccaaggagucccucaucgucaucucccccuccgucgccgaccucgaccccuacgacaagucccuccacucccgcaucuuccccggcggcaagugcuccggcaucaccgucuccuccaccuacugcuccaccaaccacgaguacaccaucuggaugcccgagaaggccggccucggcaccuccugcgacaucuucaccaccuccaagggcaagcgcgccuccaagggcggccgcaccugcggcuucgucgacgagcgcggccucuacaagucccucaagggcgccugcaagcucaagcucugcggcgucuccggccuccgccucauggacggcaccugggucgccauccagacccccgacgagaccaaguggugcucccccgaccgccucgucaaccuccacgaccuccacuccgacgagaucgagcaccucgucgccgaggagcucguccgcaagcgcgaggagugccucgacgcccucgaguccaucaugaccaccaaguccgucuccuuccgccgccucucccaccuccgcaagcucguccccggcuucggcaaggccuacaccaucuucaacaagacccucauggaggccgacgcccacuacaaguccguccgcaccuggaacgagaucauccccuccaagggcugccuccgcgucggcggcaagugccacccccacgucaacggcgucuucuucaacggcaucauccucggccccgacggccacguccucauccccgagaugcaguccucccuccuccagcagcacauggagcuccucgaguccuccgucaucccccucaugcacccccucgccgaccucuccaccgucuucaaggacggcgacgaggccgaggacuucgucgagguccaccuccccgacguccacaagcaggucuccggcgucgaccucggccuccccuccuggggcaaguacguccucauguccgccggcgcccucgccacccucaugcucgucaucucccucaucaagugcugccgcggcgucaaccgcacccgcuccauccagcgcggcccccgcgaguccgagcgcaaggucuccgucaccccccagaacggcaaggucaucuccuccugggaguccuacaaguccggcggcgagacccgccucuga

SEQ ID NO: 127558 - RNA, 1575 nt, Artificial Sequence
  derived and/or modified CDS sequence (opt2) from glycoprotein__RABV__KF484538.1
augguccuccaggcccuccucuucgcccccuuccucaucuccucccucugcuucggcaaguuccccaucuacaccauccccgacaagcucggccccuggucccccaucgacauccaccaccucuccugccccaacaaccucgucgucgaggacgagggcugcaacucccucuccggcuucuccuacauggagcucaaggucggcuacaucuccgccaucaaggucaacggcuucaccugcaccggcgucgucaccgaggccgagaccuacaccaacuucgucggcuacgucaccaccaccuucaagcgcaagcacuuccgccccaugcccgacgccugccgcuccgccuacaacuggaagcucgccggcgacccccgcuacgaggagucccuccacaaccccuaccccgaguaccacuggcuccgcaccgucaagaccaccaaggagucccucaucgucaucucccccuccgucgccgaccucgaccccuacgacaagucccuccacucccgcaucuuccccaacggcaagugcuccggcaugaccgucuccuccaccuacugcuccaccaaccacgaguacaccaucuggaugcccgagaaggucggccucggcaccuccugcgacaucuucaccaccuccaagggcaagcgcgccuccaagggcggccgcaccugcggcuucgucgacgagcgcggccucuacaagucccucaagggcgccugcaagcucaagcucugcggcgucuccggccuccgccucauggacggcaccugggucgccauccagaccuccgacgagaccaaguggugcucccccgaccagcucgucaaccuccacgaccuccacuccgacgagaucgagcaccucgucgucgaggagcucguccgcaagcgcgaggagugccucgacgcccucgaguccaucaugaccaccaaguccgucuccuuccgccgccucucccaccuccgcaagcucguccccggcuucggcaaggccuacaccaucuucaacaagacccucauggaggccgacgcccacuacaaguccguccgcaccuggaacgagaucauccccuccaagggcugccuccgcgucggcggcaagugccacccccacgucaacggcgucuucuucaacggcaucauccucggccccgacggccacguccucauccccgagaugcaguccucccuccuccagcagcacaucgagcuccucgaguccuccgucaucccccucaugcacccccucgccgaccucuccaccgucuucaaggacggcgacgaggccgaggacuucgucgagguccaccuccccgacguccacaagcagaucuccggcgucgaccucggccuccccuccuggggcaaguacguccucauguccgccggcgcccucgccacccucauccucgucaucucccucaugaagugcugccgcugggucaaccgcaccaaguccauccagcagggcccccgcgaguccgagcgcaaggucuccgucaccccccagaacggccgcgucaucuccuccugggaguccuacaagaucggcggcgagaccggccucuga

SEQ ID NO: 127559 - RNA, 1575 nt, Artificial Sequence
  derived and/or modified CDS sequence (opt2) from glycoprotein__RABV__KF484539.1
augguccuccaggcccuccucuucgcccccuuccucaucuccucccucugccucggcaaguuccccaucuacaccauccccgacaagcucggccccuggucccccaucgacauccaccaccucuccugccccaacaaccucgucgucgaggacgagggcugcaacucccucuccggcuucuccuacauggagcucaaggucggcuacaucuccgccaucaaggucaacggcuucaccugcaccggcgucgucaccgaggccgagaccuacaccaacuucgucggcuacgucaccaccaccuucaagcgcaagcacuuccgccccaugcccgacgccugccgcuccgccuacaacuggaagcucgccggcgacccccgcuacgaggagucccuccacaaccccuaccccgacuaccacuggcuccgcaccgucaagaccaccaaggagucccucaucgucaucucccccuccgucgccgaccucgaccccuacgacaagucccuccacucccgcaucuuccccggcggcaagugcuccggcaugaccgucuccuccaccuacugcuccaccaaccacgaguacaccaucuggaugcccgagaaggccggccucggcaccuccugcgacaucuucaccaccuccaagggcaagcgcgccaccaagggcggcaagaccugcggcuucgucgacgagcgcggccucuacaagucccucaagggcgccugcaagcucaagcucugcggcgucuccggccuccgccucauggacggcaccugggucgccauccagaccuccgacgagaccaaguggugcucccccgaccagcucgucaaccuccacgaccuccacuccgacgagaucgagcaccucgucgucgaggagcucguccgcaagcgcgaggagugccucgacgcccucgaguccaucaugaccaccaaguccgucuccuuccgccgccucucccaccuccgcaagcucguccccggcuucggcaaggccuacaccaucuucaacaagacccucauggaggccgacgcccacuacaaguccguccgcaccuggaacgagaucauccccuccaagggcugccuccgcgucggcggcaagugccacccccacgucaacggcgucuucuucaacggcaucauccucggccccgacggccacguccucauccccgagaugcaguccucccuccuccagcagcacauggagcuccucgaguccuccgucaucccccucaugcacccccucgccgaccccuccaccgucuucaaggacgacgacgaggccgaggacuucgucgagguccaccuccccgacguccacaagcaggucuccggcgucgaccucggccuccccuccuggggccgcuacguccucauguccgccggcgcccucgccauccucaugcucgucaucucccucaugaagugcugcaccggcgucaaccgcaccaaguccaucaagcagggcucccgcgaguccgagcgcaaggucuccaucaccccccagaacggcaaggucaucuccuccugggaguccuacaaguccggcggcgagaccggccucuga

SEQ ID NO: 127560 - RNA, 1575 nt, Artificial Sequence
  derived and/or modified CDS sequence (opt2) from glycoprotein__RABV__KF484540.1
augguccuccaggcccuccucuucgcccccuuccucaucuccucccucugccucggcaaguuccccaucuacaccauccccgacaagcucggccccuggucccccaucgacauccaccaccucuccugccccaacaaccucgucgucgaggacgagggcugcaacucccucuccggcuucuccuacauggagcucaaggucggcuacaucuccgccauccgcgucaacggcuucaccugcaccggcgucgucaccgaggccgagaccuacaccaacuucgucggcuacgucaccaccaccuucaagcgcaagcacuuccgccccaugcccgacgccugccgcuccgccuacaacuggaagcucgccggcgacccccgcuacgaggagucccuccacaaccccuaccccgacuaccacuggcuccgcaccgucaagaccaccaaggagucccucaucgucaucucccccuccgucgccgaccucgaccccuacgacaagucccuccacucccgcaucuuccccggcggcaagugcuccggcaucaccgucuccuccaccuacugcuccaccaaccacgaguacaccaucuggaugcccgagaaggccggccucggcaccuccugcgacaucuucaccaccuccaagggcaagcgcgccuccaagggcggccgcaccugcggcuucgucgacgagcgcggccucuacaagucccucaagggcgccugcaagcucaagcucugcggcgucuccggccuccgccucauggacggcaccugggucgccauccagacccccgacgagaucaaguggugcucccccgaccagcucgucaaccuccacgaccuccacuccgacgagaucgagcaccucgucgccgaggagcucguccgcaagcgcgaggagugccucgacgcccucgaguccaucaugaccaccaaguccgucuccuuccgccgccucucccaccuccgcaagcucguccccggcuucggcaaggccuacaccaucuucaacaagacccucauggaggccgacgcccacuacaaguccguccgcaccuggaacgagaucauccccuccaagggcugccuccgcgucggcggcaagugccacccccacgucaacggcgucuucuucaacggcaucauccucggccccgacggccacguccucauccccgagaugcaguccucccuccuccagcagcacauggagcuccucgaguccuccgucaucccccucaugcacccccucgccgaccucuccaccgucuucaaggacggcgacgaggccgaggacuucaucgagguccaccuccccgacguccacaagcaggucuccggcgucgaccucggccuccccuccuggggcaaguacguccucauguccgccggcgcccucgccacccucaugcucgucaucucccucaucaagugcugcaagggcgucaaccgcaccaaguccauccaguggggcccccgcgaguccgagcgcaaggucuccgucaccccccagaacggcaaggucaucuccuccugggaguccuacaaguccggcggcgagacccgccucuga

SEQ ID NO: 127561 - RNA, 1575 nt, Artificial Sequence
  derived and/or modified CDS sequence (opt2) from glycoprotein__RABV__KF484541.1
augauccucaaggcccuccucuucgcccccuuccucaucuccucccucugccucggcaaguuccccaucuacaccauccccgacaagcucggccccuggucccccaucgacauccaccaccucuccugccccaacaaccucgucgucgaggacgagggcugcaacucccucuccggcuucuccuacauggagcucaaggucggcuacaucuccgccaucaaggucaacggcuucaccugcaccggcgucgucaccgaggccgagaccuacaccaacuucgucggcuacgucaccaccaccuucaagcgcaagcacuuccgccccaugcccgacgccugccgcuccgccuacaacuggaagcucgccggcgacccccgcuacgaggagucccuccacaaccccuaccccgacuaccacuggcuccgcaccgucaagaccaccaaggagucccucaucaucaucucccccuccgucgccgaccucgaccccuacgacaagucccuccacucccgcaucuuccccggcggcaagugcuccggcaugaccgucuccuccaccuacugccccaccaaccacgaguacaccaucuggaugcccgagaaggccucccucggcaccuccugcgacaucuucaccaccuccaagggcaagcgcgccucccgcggcggccgcaccugcggcuucgucgacgagcgcggccucuacaagucccucaagggcgccugcaagcucaagcucugcggcgucuccggccuccgccucauggacggcaccugggucgccauccagaccuccgacgagaccaaguggugcucccccgaccagcucgucaaccuccacgaccuccacuccgacgagaucgagcaccucgucgucgaggagcucguccgcaagcgcgaggagugccucgacgcccucgaguccaucaugaccaccaaguccgucuccuuccgccgccucucccaccuccgcaagcucguccccggcuucggcaaggccuacaccaucuucaacaagacccucauggaggccgacgcccacuacaaguccguccgcaccuggaacgagaucauccccuccaagggcugccuccgcgucggcggcaagugccacccccacgucaacggcgucuucuucaacggcaucauccucggccccgacggccacguccucauccccgagaugcaguccucccuccuccagcagcacauggagcuccucgaguccuccgucaucccccucaugcacccccucgccgaccccuccaccgucuucaaggacgacgacgaggccgaggacuucgucgagguccaccuccccgacguccacaagcaggucuccggcgucgaccucggccuccccuccuggggcaaguacguccucauguccgccggcacccucgccacccucaugcucgucaucucccucaugaagugcugccgcggcuucaaccgcaccaaguccauccgccaggacuccggcgaguccggccgcaaggucuccgucaccccccagaacggcaaggucaucuccuccugggaguccuacaaguccggcggcgagaccggccucuga

SEQ ID NO: 127562 - RNA, 1575 nt, Artificial Sequence
  derived and/or modified CDS sequence (opt2) from glycoprotein__RABV__KF484542.1
augguccuccagguccuccucuucgcccucuuccucaucuccucccucugccucggcaaguuccccaucuacaccauccccgacaagcucggccccuggucccccaucgacauccaccaccucuccugccccaacaaccucgucgucgaggacgagggcugcaacucccucuccggcuucuccuacauggagcucaaggucggcuacaucuccgccaucaaggucaacggcuucaccugcaccggcgucgucaccgaggccgagaccuacaccaacuucgucggcuacgucaccaccaccuucaagcgcaagcacuuccgccccaugcccgacgccugccgcuccgccuacaacuggaagcucgccggcgacccccgcuacgaggagucccuccacaaccccuaccccgaguaccacuggcuccgcaccgucaagaccaccaaggagucccucaucgucaucucccccuccgucgccgaccucgaccccuacgacaagucccuccacucccgcaucuuccccuccggcaagugcuccggcaugaccgucuccuccaccuacugcuccaccaaccacgaguacaccaucuggaugcccgagaaggucucccucggcaccuccugcgacaucuucaccaccuccaagggcaagcgcgccuccaagggcggccgcaccugcggcuucgucgacgagcgcggccucuacaagucccucaagggcgccugcaagcucaagcucugcggcgucuccggccuccgccucauggacggcaccugggucgccauccagaccuccgacgaggccaaguggugcucccccgaccagcucgucaaccuccacgaccuccacuccgacgagaucgagcaccucgucgucgaggagcucguccgcaagcgcgaggagugccucgacgcccucgaguccaucaugaccaccaaguccgucuccuuccgccgccucucccaccuccgcaagcucguccccggcuucggcaaggccuacaccaucuucaacaagacccucauggaggccgacgcccacuacaaguccguccgcaccuggaacgagaucauccccuccaagggcugccuccgcgucggcggcaagugccacccccacgucaacggcgucuucuucaacggcaucauccucggccccgacggccacguccucauccccgagaugcaguccucccuccuccagcagcacaucgagcuccucgaguccuccgucaucccccucaugcacccccucgccgaccucuccaccgucuucaaggacggcgacgaggccgaggacuucgucgagguccaccuccccgacguccacaagcagaucuccggcgucgaccucggccuccccuccuggggcaaguacguccucauguccgccggcgcccucgccacccucguccucgucaucucccucaugaagugcugccgcugggucaaccgcaccaaguccauccagcagggcccccgcgaguccgagcgccgcgucuccgucaccccccagaacggcaaggucaucuccuccugggaguccuacaagaucggcggcgagaccggccucuga

SEQ ID NO: 127563 - RNA, 1575 nt, Artificial Sequence
  derived and/or modified CDS sequence (opt2) from glycoprotein__RABV__KF484543.1
augguccuccaggcccuccucuucgcccccuuccucaucuccucccucugccucggcaaguuccccaucuacaccauccccgacaagcucggccccuggucccccaucgacauccaccaccucuccugccccaacaaccucgucgucgaggacgagggcugcaacucccucuccggcuucuccuacauggagcucaaggucggcuacaucuccgccaucaaggucaacggcuucaccugcaccggcgucgucaccgaggccgagaccuacaccaacuucgucggcuacgucaccaccaccuucaagcgcaagcacuuccgccccaugcccgacgccugccgcuccgccuacaacuggaagcucgccggcgacccccgcuacgaggagucccuccacaaccccuaccccgaguaccacuggcuccgcaccgucaagaccaccaaggagucccucaucgucaucucccccuccgucgccgaccucgaccccuacgacaagucccuccacucccgcaucuuccccuccggcaagugcuccggcaugaccgucuccuccaccuacugcuccaccaaccacgaguacaccaucuggaugcccgagaaggucggccucggcaccuccugcgacaucuucaccaccuccaagggcaagcgcgccuccaagggcggccgcaccugcggcuucgucgacgagcgcggccucuacaagucccucaagggcgccugcaagcucaagcucugcggcgucuccggccuccgccucauggacggcaccugggucgccaugcagaccuccgacgagaccaaguggugcucccccgaccagcucgucaaccuccacgaccuccacuccgacgagaucgagcaccucgucgucgaggagcucguccgcaagcgcgaggagugccucgacgcccucgaguccaucaugaccaccaaguccgucuccuuccgccgccucucccaccuccgcaagcucguccccggcuucggcaaggccuacaccaucuucaacaagacccucauggaggccgacgcccacuacaaguccguccgcaccugguccgagaucauccccuccaagggcugccuccgcgucggcggcaagugccacccccacgucaacggcgucuucuucaacggcaucauccucggccccgacggccacguccucauccccgagaugcaguccucccuccuccagcagcacauggagcuccucgaguccuccgucaucccccucaugcacccccucgccgaccucuccaccgucuucaaggacggcgacgaggccgaggacuucgucgagguccaccuccccgacguccacaagcagaucuccggcgucgaccucggccuccccuccuggggcaaguacguccucauguccgccggcgcccucgccacccucauccucgucaucucccucaugaagugcugccgcugggucaacaagaccaaguccauccagcagggcccccgcgaguccgagcgcaaggucuccgucaccccccagaacggcaaggucaucuccuccugggaguccuacaagaucggcggcgagaccggccucuga

SEQ ID NO: 127564 - RNA, 1575 nt, Artificial Sequence
  derived and/or modified CDS sequence (opt2) from glycoprotein__RABV__KF484544.1
augguccuccaggcccuccucuucgcccccuuccucaucuccucccucugccucggcaaguuccccaucuacaccauccccgacaagcucggccccuggucccccaucgacauccaccaccucuccugccccaacaaccucgucgucgaggacgagggcugcaacucccucuccggcuucuccuacauggagcucaaggucggcuacaucuccgccaucaaggucaacggcuucaccugcaccggcgucgucaccgaggccgagaccuacaccaacuucgucggcuacgucaccaccaccuucaagcgcaagcacuuccgccccaugcccgacgccugccgcuccgccuacaacuggaagcucgccggcgacccccgcuacgaggagucccuccacaaccccuaccccgaguaccacuggcuccgcaccgucaagaccaccaaggagucccucaucgucaucucccccuccgucgccgaccucgaccccuacgacaagucccuccacucccgcaucuuccccuccggcaagugcuccggcaugaccgucuccuccaccuacugcuccaccaaccacgaguacaccaucuggaugcccgagaaggucggccucggcaccuccugcgacaucuucaccaccuccaagggcaagaaggccuccaagggcggccgcaccugcggcuucgucgacgagcgcggccucuacaagucccucaagggcgccugcaagcucaagcucugcggcgucuccggccuccgccucauggacggcaccugggucgccaugcagaccuccgacgagaccaaguggugcucccccgaccagcucgucaaccuccacgaccuccacuccgacgagaucgagcaccucgucgucgaggagcucguccgcaagcgcgaggagugccucgacgcccucgaguccaucaugaccaccaaguccgucuccuuccgccgccucucccaccuccgcaagcucguccccggcuucggcaaggccuacaccaucuucaacaagacccucauggaggccgacgcccacuacaaguccguccgcaccuggaacgagaucauccccuccaagggcugccuccgcgucggcggcaagugccacccccacgucaacggcgucuucuucaacggcaucauccucggccccgacggccacguccucauccccgagaugcaguccuuccuccuccagcagcacauggagcuccucgaguccuccgucaucccccucaugcacccccucgccgaccucuccaccgucuucaaggacggcgacgaggccgaggacuucgucgagguccaccuccccgacguccacaagcagaucuccggcgucgaccucggccuccccuccuggggcaaguacguccucauguccgccggcgcccucgccacccucauccucgucaucucccucaugaagugcugccgcugggucaaccgcaccaaguccauccagcagggcccccgcgaguccgagcgcaaggucuccgucaccccccagaacggcaaggucaucuccuccugggaguccuacaagaucggcggcgagaccggccucuga

SEQ ID NO: 127565 - RNA, 1575 nt, Artificial Sequence
  derived and/or modified CDS sequence (opt2) from glycoprotein__RABV__KF484545.1
augguccuccaggcccuccucuucgcccccuuccucaucuccucccucugccucggcaaguuccccaucuacaccauccccgacaagcucggccccuggucccccaucgacauccaccaccucuccugccccaacaaccucgucgucgaggacgagggcugcaacucccucuccggcuucuccuacauggagcucaaggucggcuacaucuccgccaucaaggucaacggcuucaccugcaccggcgucgucaccgaggccgagaccuacaccaacuucgucggcuacgucaccaccaccuucaagcgcaagcacuuccgccccaugcccgacgccugccgcuccgccuacaacuggaagcucgccggcgacccccgcuacgaggagucccuccacaaccccuaccccgaguaccacuggcuccgcaccgucaagaccaccaaggagucccucaucgucaucucccccuccgucgccgaccucgaccccuacgacaagucccuccacucccgcaucuuccccuccggcaagugcuccggcaugaccgucuccuccaccuacugcuccaccaaccacgaguacaccaucuggaugcccgagaaggucggccucggcaccuccugcgacaucuucaccaccuccaagggcaagaaggccuccaagggcggccgcaccugcggcuucgucgacgagcgcggccucuacaagucccucaagggcgccugcaagcucaagcucugcggcgucuccggccuccgccucauggacggcaccugggucgccaugcagaccuccgacgagaccaaguggugcucccccgaccagcucgucaaccuccacgaccuccacuccgacgagaucgagcaccucgucgucgaggagcucguccgcaagcgcgaggagugccucgacgcccucgaguccaucaugaccaccaaguccgucuccuuccgccgccucucccaccuccgcaagcucguccccggcuucggcaaggccuacaccaucuucaacaagacccucauggaggccgacgcccacuacaaguccguccgcaccuggaacgagaucauccccuccaagggcugccuccgcgucggcggcaagugccacccccacgucaacggcgucuucuucaacggcaucauccucggccccgacggccacguccucauccccgagaugcaguccucccuccuccagcagcacauggagcuccucgaguccuccgucaucccccucaugcacccccucgccgaccucuccaccgucuucaaggacggcgacgaggccgaggacuucgucgagguccaccuccccgacguccacaagcagaucuccggcgucgaccucggccuccccuccuggggcaaguacguccucauguccgccggcgcccucgccacccucauccucgucaucucccucaugaagugcugccgcugggucaaccgcaccaaguccauccagcagggcccccgcgaguccgagcgcaaggucuccgucaccccccagaacggcaaggucaucuccuccugggaguccuacaagaucggcggcgagaccggccucuga

SEQ ID NO: 127566 - RNA, 1575 nt, Artificial Sequence
  derived and/or modified CDS sequence (opt2) from glycoprotein__RABV__KF484546.1
augguccuccaggcccuccucuucgcccccuuccucaucuccucccucugccucggcaaguuccccaucuacaccauccccgacaagcucggccccuggucccccaucgacauccaccaccucuccugccccaacaaccucgucgucgaggacgagggcugcaacucccucuccggcuucuccuacauggagcucaaggucggcuacaucuccgccaucaaggucaacggcuucaccugcaccggcgucgucaccgaggccgagaccuacaccaacuucgucggcuacgucaccaccaccuucaagcgcaagcacuuccgccccaugcccgacgccugccgcuccgccuacaacuggaagcucgccggcgacccccgcuacgaggagucccuccacaaccccuaccccgaguaccacuggcuccgcaccgucaagaccaccaaggagucccucaucgucaucucccccuccgucgccgaccucgaccccuacgacaagucccuccacucccgcaucuuccccuccggcaagugcuccggcaugaccgucuccuccaccuacugcuccaccaaccacgaguacaccaucuggaugcccgagaaggucggccucggcaccuccugcgacaucuucaccaccuccaagggcaagcgcgccuccaagggcggccgcaccugcggcuucgucgacgagcgcggccucuacaagucccucaagggcgccugcaagcucaagcucugcggcgucuccggccuccgccucauggacggcaccugggucgccaugcagaccuccgacgagaccaaguggugcucccccgaccagcucgucaaccuccacgaccuccacuccgacgagaucgagcaccucgucgucgaggagcucguccgcaagcgcgaggagugccucgacgcccucgaguccaucaugaccaccaaguccgucuccuuccgccgccucucccaccuccgcaagcucguccccggcuucggcaaggccuacaccaucuucaacaagacccucauggaggccgacgcccacuacaaguccguccgcaccuggaacgagaucauccccuccaagggcugccuccgcgucggcggcaagugccacccccacgucaacggcgucuucuucaacggcaucauccucggccccgacggccacguccucauccccgagaugcaguccucccuccuccagcagcacauggagcuccucgaguccuccgucaucccccucaugcacccccucgccgaccucuccaccgucuucaaggacggcgacgaggccgaggacuucgucgagguccaccuccccgacguccacaagcagaucuccggcgucgaccucggccuccccuccuggggcaaguacguccucauguccgccggcgcccucgccacccucauccucgucaucucccucaugaagugcugccgcugggucaaccgcaccaaguccauccagcagggcccccgcgaguccgagcgcaaggucuccgucaccccccagaacggcaaggucaucuccuccugggaguccuacaagaucggcggcgagaccggccucuga

SEQ ID NO: 127567 - RNA, 1575 nt, Artificial Sequence
  derived and/or modified CDS sequence (opt2) from glycoprotein__RABV__KF484547.1
augguccuccaggcccuccucuucgcccccuuccucaucuccucccucugccucggcaaguuccccaucuacaccauccccgacaagcucggccccuggucccccaucgacauccaccaccucuccugccccaacaaccucgucgucgaggacgagggcugcaacucccucuccggcuucuccuacauggagcucaaggucggcuacaucuccgccaucaaggucaacggcuucaccugcaccggcgucgucaccgaggccgagaccuacaccaacuucgucggcuacgucaccaccaccuucaagcgcaagcacuuccgccccaugcccgacgccugccgcuccgccuacaacuggaagcucgccggcgacccccgcuacgaggagucccuccacaaccccuaccccgacuaccacuggcuccgcaccgucaagaccaccaaggagucccucaucgucaucucccccuccgucgccgaccucgaccccuacgacaagucccuccacucccgcaucuuccccuccggcaagugcuccggcaugaccgucuccuccaccuacugcuccaccaaccacgaguacaccaucuggaugcccgagaaggccggccucggcaccuccugcgacaucuucaccaccuccaagggcaagcgcgccuccaagggcggccgcaccugcggcuucgucgacgagcgcggccucuacaagucccucaagggcgccugcaagcucaagcucugcggcgucuccggccuccgccucauggacggcaccugggucgccauccagaccuccgacgagaccaaguggugcuccuccgaccagcucgucaaccuccacgaccuccacuccgacgagaucgagcaccucgucgucgaggagcucguccgcaagcgcgaggagugccucgacgcccucgaguccaucaugaccaccaaguccgucuccuuccgccgccucucccaccuccgcaagcucguccccggcuucggcaaggccuacaccaucuucaacaagacccucauggaggccgacgcccacuacaaguccguccgcaccuggaacgaggucauccccuccaagggcugccuccgcgucggcggcaagugccacccccacgucaacggcgucuucuucaacggcaucauccucggccccgacggccacguccucauccccgagaugcaguccucccuccuccagcagcacauggagcuccucgaguccuccgucaucccccucaugcacccccucgccgacaucuccaccgucuucaaggacggcgacgaggccgaggacuucgucgagguccaccuccccgacguccacaagcagaucuccggcgucgaccucggccuccccuccuggggcaaguacguccucauguccgccggcgcccucgccauccucaugcucaugaucucccucaugaagugcugccgcggcgucaaccgcaccaaguccauccagcagggcccccgcgaguccgagcgcaaggucuccgucaccccccagaacggcaaggucaucuccuccugggaguccuacaaguccggcggcgagaccggccucuga

SEQ ID NO: 127568 - RNA, 1575 nt, Artificial Sequence
  derived and/or modified CDS sequence (opt2) from glycoprotein__RABV__KF484548.1
augguccuccagguccuccucuucgcccucuuccucaucuccucccucugccucggcaaguuccccaucuacaccauccccgacaagcucggccccuggucccccaucgacauccaccaccucuccugccccaacaaccucgucgucgaggacgagggcugcaacucccucuccggcuucuccuacauggagcucaaggucggcuacaucuccgccaucaaggucaacggcuucaccugcaccggcgucgucaccgaggccgagaccuacaccaacuucgucggcuacgucaccaccaccuucaagcgcaagcacuuccgccccaugcccgacgccugccgcuccgccuacaacuggaagcucgccggcgacccccgcuacgaggagucccuccacaaccccuaccccgaguaccacuggcuccgcaccgucaagaccaccaaggagucccucaucgucaucucccccuccgucgccgaccucgaccccuacgacaagucccuccacucccgcaucuuccccuccggcaagugcuccggcaugaccgucuccuccaccuacugcuccaccaaccacgaguacaccaucuggaugcccgagaaggucucccucggcaccuccugcgacaucuucaccaccuccaagggcaagcgcgccuccaagggcggccgcaccugcggcuucgucgacgagcgcggccucuacaagucccucaagggcgccugcaagcucaagcucugcggcgucuccggccuccgccucauggacggcaccugggucgccauccagaccuccgacgaggccaaguggugcucccccgaccagcucgucaaccuccacgaccuccacuccgacgagaucgagcaccucgucgucgaggagcucguccgcaagcgcgaggagugccucgacgcccucgaguccaucaugaccaccaaguccaucuccuuccgccgccucucccaccuccgcaagcucguccccggcuucggcaaggccuacaccaucuucaacaagacccucauggaggccgacgcccacuacaaguccguccgcaccuggaacgagaucauccccuccaagggcugccuccgcgucggcggcaagugccacccccacgucaacggcgucuucuucaacggcaucauccucggccccgacggccacguccucauccccgagaugcaguccucccuccuccagcagcacaucgagcuccucgaguccuccgucaucccccucaugcacccccucgccgaccucuccaccgucuucaaggacggcgacgaggccgaggacuucgucgagguccaccuccccgacguccacaagcagaucuccggcgucgaccucggccuccccuccuggggcaaguacguccucauguccgccggcgcccucgccacccucguccucgucaucucccucaugaaguggugccgcugggucaacaagaccaaguccauccagcagggcccccgcgaguccgagcgcaaggucuccgucaccccccagaacggcaaggucaucuccuccugggaguccuacaagaucggcggcgagaccggccucuga

SEQ ID NO: 127569 - RNA, 1575 nt, Artificial Sequence
  derived and/or modified CDS sequence (opt2) from glycoprotein__RABV__KF484549.1
augguccuccaggcccuccucuucgcccccuuccucaucuccucccucugccucggcaaguuccccaucuacaccauccccgacaagcucggccccuggucccccaucgacauccaccaccucuccugccccaacaaccucgucgucgaggacgagggcugcaacucccucuccggcuucuccuacauggagcucaaggucggcuacaucuccgccaucaaggucaacggcuucaccugcaccggcgucgucaccgaggccgagaccuacaccaacuucgucggcuacgucaccaccaccuucaagcgcaagcacuuccgccccaugcccgacgccugccgcuccgccuacaacuggaagcucgccggcgacccccgcuacgaggagucccuccacaaccccuaccccgacuaccacuggcuccgcaccgucaagaccaccaaggagucccucaucgucaucucccccuccgucgccgaccucgaccccuacgacaagucccuccacucccgcaucuuccccggcggcaagugcuccggcaugaccgucuccuccaccuacugccccaccaaccacgaguacaccaucuggaugcccgagaaggccggccucggcaccuccugcgacaucuucaccaccuccaagggcaagcgcgccuccaagggcggccgcaccugcggcuucgucgacgagcgcggccucuacaagucccucaagggcgccugcaagcucaagcucugcggcgucuccggccuccgccucauggacggcaccugggucgccauccagaccuccgacgagaccaaguggugcucccccgaccagcucgucaaccuccacgaccuccacuccgacgagaucgagcaccucgucgucgaggagcucguccgcaagcgcgaggagugccucgacgcccucgaguccaucaugaccaccaaguccgucuccuuccgccgccucucccaccuccgcaagcucguccccggcuucggcaaggccuacaccaucuucaacaagacccucauggaggccgacgcccacuacaaguccguccgcaccuggaacgagaucauccccuccaagggcugccuccgcgucggcggcaagugccacccccacgucaacggcgucuucuucaacggcaucauccucggccccgacggccacguccucauccccgagaugcaguccucccuccuccagcagcacgucgagcuccucgaguccuccgucaucccccucaugcacccccucgccgaccccuccaccgucuucaaggacgacgacgaggccgaggacuucgucgagguccaccuccccgacguccaccgccaggucuccggcgucgaccucggccuccccuccuggggcaaguacguccucauguccgccggcgcccucgccacccucaugcucgucaucucccucaugaagugcugccgcggcuucaaccgcaccaaguccacccgccagggcucccgcgaguccgagcgcaaggucuccgucaccccccagaacggcaaggucaucuccuccugggaguccuacaaguccggcggcgagaccggccucuga

SEQ ID NO: 127570 - RNA, 1575 nt, Artificial Sequence
  derived and/or modified CDS sequence (opt2) from glycoprotein__RABV__KF484550.1
augguccuccaggcccuccucuucgcccccuuccucaucuccucccucugcuucggcaaguuccccaucuacaccauccccgacaagcucggccccuggucccccaucgacauccaccaccucuccugccccaacaaccucgucgucgaggacgagggcugcaacucccucuccggcuucuccuacauggagcucaaggucggcuacaucuccgccaucaaggucaacggcuucaccugcaccggcgucgucaccgaggccgagaccuacaccaacuucgucggcuacgucaccaccaccuucaagcgcaagcacuuccgccccaugcccgacgccugccgcuccgccuacaacuggaaggucgccggcgacccccgcuacgaggagucccuccacaaccccuaccccgacuaccacuggcuccgcaccgucaagaccaccaaggagucccucaucaucaucucccccuccgucgccgaccucgaccccuacgacaagucccuccacucccgcaucuuccccggcggcaagugcuccggcaugaccaucuccuccaccuacugcuccaccaaccacgacuacaccaucuggaugcccgagaagaccggccucggcaccuccugcgacaucuucaccaccuccaagggcaagcgcgccuccaagggcggccgcaccugcggcuucgucgacgagcgcggccucuacaagucccucaagggcgccugcaagcucaagcucugcggcgucuccggccuccgccucauggacggcaccugggccgccauccagaccuccgacgagaccaaguggugcucccccgaccagcucgucaaccuccacgaccuccacuccgacgagaucgagcaccucgucgucgaggagcucguccgccgccgcgaggagugccucgacgcccucgaguccaucaugaccaccaaguccgucuccuuccgccgccucucccaccuccgcaagcucguccccggcuucggcaaggccuacaccaucuucaacaagacccucauggaggccgacgcccacuacaaguccguccgcaccuggaacgagaucauccccuccaagggcugccuccgcgucggcggcaagugccacccccacgucaacggcgucuucuucaacggcaucauccucggccccgacggccacguccucauccccgagaugcaguccucccuccuccagcagcacauggagcuccucgaguccuccgucaucccccucaugcacccccucgccgaccucuccaccgucuucaaggacggcgacgaggccgaggacuucgucgagguccaccuccccgacguccacaagcaggucuccggcgucgaccucggccuccccuccuggggcaaguacaugcucauguccgccggcgcccucgccacccucaugcucgucgucccccucaugaagugcugccgccgcgucaaccgcaccaaguccauccagcagggcccccgcgaguccgaccgcaaggucuccgucaccccccaguccggcaaggucaucuccuccugggaguccuacaaguccggcggcggcaccggccucuga

SEQ ID NO: 127571 - RNA, 1575 nt, Artificial Sequence
  derived and/or modified CDS sequence (opt2) from glycoprotein__RABV__KF484551.1
augguccuccaggcccuccucuucgcccccuuccucaucuccucccucugccucggcaaguuccccaucuacaccauccccgacaagcucggccccuggucccccaucgacauccaccaccucuccugccccaacaaccucgucgucgaggacgagggcugcaacucccucuccggcuucuccuacauggagcucaaggucggcuacaucuccgccaucaaggucaacggcuucaccugcaccggcgucgucaccgaggccgagaccuacaccaacuucgucggcuacgucaccaccaccuucaagcgcaagcacuuccgccccaugcccgacgccugccgcuccgccuacaacuggaagcucgccggcgacccccgcuacgaggagucccuccacaaccccuaccccgaguaccacuggcuccgcaccgucaagaccaccaaggagucccucaucgucaucucccccuccgucgccgaccucgaccccuacgacaagucccuccacucccgcaucuuccccuccggcaagugcuccggcaugaccgucuccuccaccuacugcuccaccaaccacgaguacaccaucuggaugcccgagaaggucggccucggcaccuccugcgacaucuucaccaccuccaagggcaagcgcgccuccaagggcggccgcaccugcggcuucgucgacgagcgcggccucuacaagucccucaagggcgccugcaagcucaagcucugcggcgucuccggccuccgccucauggacggcaccugggucgccaugcagaccuccgacgagaccaaguggugcucccccgaccagcucgucaaccuccacgaccuccacuccgacgagaucgagcaccucgucgucgaggagcucguccgcaagcgcgaggagugccucgacgcccucgaguccaucaugaccaccaaguccgucuccuuccgccgccucucccaccuccgcaagcucguccccggcuucggcaaggccuacaccaucuucaacaagacccucauggaggccgacgcccacuacaaguccguccgcaccuggaacgagaucauccccuccaagggcugccuccgcgucggcggccgcugccacccccacgucaacggcgucuucuucaacggcaucauccucggccccgacggccacguccucauccccgagaugcaguccucccuccuccagcagcacauggagcuccucgaguccuccgucaucccccucaugcacccccucgccgaccucuccaccgucuucaaggacggcgacgaggccgaggacuucgucgagguccaccuccccgacguccacaagcagaucuccggcgucgaccucggccuccccuccuggggcaaguacguccucauguccgccggcgcccucgccacccucauccucgucaucucccucaugaagugcugccgcugggucaaccgcaccaaguccauccagcagggcccccgcgaguccgagcgcaaggucuccgucaccccccagaacggcaaggucaucuccuccugggaguccuacaagaucggcggcgagaccggccucuga

SEQ ID NO: 127572 - RNA, 1575 nt, Artificial Sequence
  derived and/or modified CDS sequence (opt2) from glycoprotein__RABV__KF484552.1
augguccuccaggcccuccucuucgcccccuuccucaucuccucccucugccucggcaaguuccccaucuacaccauccccgacaagcucggccccuggucccccaucgacauccaccaccucuccugccccaacaaccucgucgucgaggacgagggcugcaacaaccucuccggcuucuccuacauggagcucaaggucggcuacaucuccgccaucaaggucaacggcuucaccugcaccggcgucgucaccgaggccgagaccuacaccaacuucgucggcuacgucaccaccaccuucaagcgcaagcacuuccgccccaugcccgacgccugccgcuccgccuacaacuggaagcucgccggcgacccccgcuacgaggagucccuccacaaccccuaccccgaguaccacuggcuccgcaccgucaagaccaccaaggagucccucaucgucaucucccccuccgucgccgaccucgaccccuacgacaagucccuccacucccgcaucuuccccuccggcaagugcuccggcaugaccgucuccuccaccuacugcuccaccaaccacgaguacaccaucuggaugcccgagaaggccggccucggcaccuccugcgacaucuucaccaccuccaagggcaagcgcgccuccaagggcggccgcaccugcggcuucgucgacgagcgcggccucuacaagucccucaagggcgccugcaagcucaagcucugcggcgucuccggccuccgccucauggacggcaccugggucgccauccagaccuccgacgagaccaaguggugcucccccgaccagcucgucaaccuccacgaccuccacuccgacgagaucgagcaccucgucgucgaggagcucguccgcaagcgcgaggagugccucgacgcccucgaguccaucaugaccaccaaguccgucuccuuccgccgccucucccaccuccgcaagcucguccccggcuucggcaaggccuacaccaucuucaacaagacccucauggaggccgacgcccacuacaaguccguccgcaccuggaacgagaucauccccuccaagggcugccuccgcgucggcggcaagugccacccccacgucaacggcgucuucuucaacggcaucauccucggccccgacggccacguccucauccccgagaugcaguccucccuccuccagcagcacauggagcuccucgaguccuccgucaucccccucaugcacccccucgccgaccucuccaccgucuucaaggacggcgacgaggccgaggacuucgucgagguccaccuccccgacguccacaagcagaucuccggcgucgaccucggccuccccuccuggggcaaguacgucaugauguccgccggcgccuucgccacccucauccucgucaucucccucaugaagugcugccgcugggucaaccgcaccaaguccauccagcagggcccccgcgaguccgagcgcaaggucuccgucaccccccagaacggcaaggucaucuccuccugggaguccuacaagaucggcggcgagaccggccucuga

SEQ ID NO: 127573 - RNA, 1575 nt, Artificial Sequence
  derived and/or modified CDS sequence (opt2) from glycoprotein__RABV__KF484553.1
augguccuccaggcccuccucuucgcccccuuccucaucuccucccucugccucggcaaguuccccaucuacaccauccccgacaagcucggccccuggucccccaucgacauccaccaccucuccugccccaacaaccucgucgucgaggacgagggcugcaacucccucuccggcuucuccuacauggagcucaaggucggcuacaucuccgccaucaaggucaacggcuucaccugcaccggcgucgucaccgaggccgagaccuacaccaacuucgucggcuacgucaccaccaccuucaagcgcaagcacuuccgccccaugcccgacgccugccgcuccgccuacaacuggaagcucgccggcgacccccgcuacgaggagucccuccacaaccccuaccccgaguaccacuggcuccgcaccgucaagaccaccaaggagucccucaucgucaucucccccuccgucgccgaccucgaccccuacgacaagucccuccacucccgcaucuuccccuccggcaagugcuccggcaugaccgucuccuccaccuacugcuccaccaaccacgaguacaccaucuggaugcccgagaaggucucccucggcaccuccugcgacaucuucaccaccuccaagggcaagcgcgccuccaagggcggccgcaccugcggcuucgucgacgagcgcggccucuacaagucccucaagggcgccugcaagcucaagcucugcggcgucuccggccuccgccucauggacggcaccugggucgccauccagaccuccgacgagaccaaguggugcucccccgaccagcucgucaaccuccacgaccuccacuccgacgagaucgagcaccucgucgucgaggagcucguccgcaagcgcgaggagugccucgacgcccucgaguccaucaugaccaccaaguccgucuccuuccgccgccucucccaccuccgcaagcucguccccggcuucggcaaggccuacaccaucuucaacaagacccucauggaggccgacgcccacuacaaguccguccgcaccuggaacgagaucauccccuccaagggcugccuccgcgucggcggcaagugccacccccacgucaacggcgucuucuucaacggcaucauccucggccccgacggccacguccucauccccgagaugcaguccucccuccuccagcagcacaucgagcuccucgaguccuccgucaucccccucaugcacccccucgccgaccucuccaccgucuucaaggacggcgacgaggccgaggacuucgucgagguccaccuccccgacguccacaagcagaucuccggcgucgaccucggccuccccuccuggggcaaguacguccucauguccgccggcgcccucgccacccucguccucgucaucucccucaugaagugcugccgcugggucaaccgcaccaaguccauccagcagggcccccgcgaguccgagcgcaaggucuccgucaccccccagaacggcaaggucaucuccuccugggaguccuacaagaucggcggcgagaccggccucuga

SEQ ID NO: 127574 - RNA, 1575 nt, Artificial Sequence
  derived and/or modified CDS sequence (opt2) from glycoprotein__RABV__KF484554.1
augguccuccaggcccuccucuucgcccccuuccucaucuccucccucugccucggcaaguuccccaucuacaccauccccgacaagcucggccccuggucccccaucgacauccaccaccucuccugccccaacaaccucgucgucgaggacgagggcugcaacaaccucuccggcuucuccuacauggagcucaaggucggcuacaucuccgccaucaaggucaacggcuucaccugcaccggcgucgucaccgaggccgagaccuacaccaacuucgucggcuacgucaccaccaccuucaagcgcaagcacuuccgccccaugcccgacgccugccgcuccgccuacaacuggaagcucgccggcgacccccgcuacgaggagucccuccacaaccccuaccccgaguaccacuggcuccgcaccgucaagaccaccaaggagucccucaucgucaucucccccuccgucgccgaccucgaccccuacgacaagucccuccacucccgcaucuuccccuccggcaagugcuccggcaugaccgucuccuccaccuacugcuccaccaaccacgaguacaccaucuggaugcccgagaaggccggccucggcaccuccugcgacaucuucaccaccuccaagggcaagcgcgccuccaagggcggccgcaccugcggcuucgucgacgagcgcggccucuacaagucccucaagggcgccugcaagcucaagcucugcggcgucuccggccuccgccucauggacggcaccugggucgccauccagaccuccgacgagaccaaguggugcucccccgaccagcucgucaaccuccacgaccuccacuccgacgagaucgagcaccucgucgucgaggagcucguccgcaagcgcgaggagugccucgacgcccucgaguccaucaugaccaccaaguccgucuccuuccgccgccucuccuaccuccgcaagcucguccccggcuucggcaaggccuacaccaucuucaacaagacccucauggaggccgacgcccacuacaaguccguccgcaccuggaacgagaucauccccuccaagggcugccuccgcgucggcggcaagugccacccccacgucaacggcgucuucuucaacggcaucauccucggccccgacggccacguccucauccccgagaugcaguccucccuccuccagcagcacauggagcuccucgaguccuccgucaucccccucaugcacccccucgccgaccucuccaccgucuucaaggacggcgacgaggccgaggacuucgucgagguccaccuccccgacguccacaagcagaucuccggcgucgaccucggccuccccuccuggggcaaguacgucaugauguccgccggcgcccucgccacccucauccucgucaucucccucaugaagugcugccgcugggucaaccgcaccaaguccauccagcagggcccccgcgaguccgagcgcaaggucuccgucaccccccagaacggcaaggucaucuccuccugggaguccuacaagaucggcggcgagaccggccucuga

SEQ ID NO: 127575 - RNA, 1575 nt, Artificial Sequence
  derived and/or modified CDS sequence (opt2) from glycoprotein__RABV__KF484555.1
augguccuccaggcccuccucuucgccccccuccucaucuccucccucugccucggcaaguuccccaucuacaccauccccgagaagcucggccccuggucccccaucgacauccaccaccucuccugccccaacaaccucgucgucgaggacgagggcugcaacucccucuccggcuucuccuacauggagcucaaggucggcuacaucuccgccaucaaggucaacggcuucaccugcaccggcgucgucaccgaggccgagaccuacaccaacuucgucggcuacgucaccaccaccuucaagcgcaagcacuucucccccaugcccgacgccugccgcuccgccuacaacuggaagcucgccggcgacccccgcuacgaggagucccuccacaaccccuaccccgacuaccacuggcuccgcaccgucaagaccaccaaggagucccucaucgucaucucccccuccgucgccgaccucgaccccuacgacaagucccuccacucccgcaucuuccccggcggcaagugcuccggcaugaccgucuccuccaccuacugcuccaccaaccacgaguacaccaucuggaugcccgagaagcccggccucggcaccuccugcgacaucuucaccaccuccaagggcaagcgcgccuccaaggagggccgcaccugcggcuucgucgacgagcgcggccucuacaagucccucaagggcgccugcaagcucaagcucugcggcgucuccggccuccgccucauggacggcaccugggucgccauccagaccuccgacgagaucaaguggugcucccccgaccagcucgucaaccuccacgaccuccacuccgacgagaucgagcaccucgucgucgaggagcucguccgcaagcgcgaggagugccucgacgcccucgaguccaucaugaccaccaaguccgucuccuuccgccgccucucccaccuccgcaagcucguccccggcuucggcaaggccuacaccaucuucaacaagacccucauggaggccgacgcccacuacaaguccguccgcaccuggaacgagaucauccccuccaagggcugccuccgcgucggcggcaagugccacccccacgucaacggcgucuucuucaacggcaucauccucggccccgacggccacguccucauccccgagaugcaguccucccuccuccagcagcacgucgagcuccucgaguccuccgucaucccccucaugcacccccucgccgaccccuccaccgucuucaaggacgacgacgaggccgaggacuucgucgagguccaccuccccgacguccagaagcaggucuccggcgucgaccucggccuccccuccuggggcaaguacguccucauguccgccggcgcccucgccacccucguccucgucaucucccucaugaagugcugccgcggcaucaaccgcaccaagcucaucaagcagggcucccgcgaguccgagcgcaaggucuccgucaccccccagaacggcaaggucaucuccuccugggaguccuacaaguccggcggcgagaccggccucuga

SEQ ID NO: 127576 - RNA, 1575 nt, Artificial Sequence
  derived and/or modified CDS sequence (opt2) from glycoprotein__RABV__KF484556.1
augguccuccaggcccuccucuucgcccccuuccucaucuccucccucugccucggcaaguuccccaucuacaccauccccgacaagcucggccccuggucccccaucgacauccaccaccucuccugccccaacaaccucgucgucgaggacgagggcugcaacaaccucuccggcuucuccuacauggagcucaaggucggcuacaucuccgccaucaaggucaacggcuucaccugcaccggcgucgucaccgaggccgagaccuacaccaacuucgucggcuacgucaccaccaccuuccgccgcaagcacuuccgccccaugcccgacgccugccgcuccgccuacaacuggaagcucgccggcgacccccgcuacgaggagucccuccacaaccccuaccccgaguaccacuggcuccgcaccgucaagaccaccaaggagucccucaucgucaucucccccuccgucgccgaccucgaccccuacgacaagucccuccacucccgcaucuuccccuccggcaagugcuccggcaugaccgucuccuccaccuacugcuccaccaaccacgaguacaccaucuggaugcccgagaaggccggccucggcaccuccugcgacaucuucaccaccuccaagggcaagcgcgccuccaagggcggccgcaccugcggcuucgucgacgagcgcggccucuacaagucccucaagggcgccugcaagcucaagcucugcggcgucuccggccuccgccucauggacggcaccugggucgccauccagaccuccgacgagaccaaguggugcucccccgaccagcucgucaaccuccacgaccuccacuccgacgagaucgagcaccucgucgucgaggagcucguccgcaagcgcgaggagugccucgacgcccucgaguccaucaugaccaccaaguccgucuccuuccgccgccucucccaccuccgcaagcucguccccggcuucggcaaggccuacaccaucuucaacaagacccucauggaggccgacgcccacuacaaguccguccgcaccuggaacgagaucauccccuccaagggcugccuccgcgucggcggcaagugccacccccacgucaacggcgucuucuucaacggcaucauccucggccccgacggccacguccucauccccgagaugcaguccucccuccuccagcagcacauggagcuccucgaguccuccgucaucccccucaugcacccccucgccgaccucuccaccgucuucaaggacggcgacgaggccgaggacuucgucgagguccaccuccccgacguccacaagcagaucuccggcgucgaccucggccuccccuccuggggcaaguacgucaugauguccgccggcgcccucgccacccucauccucgucaucucccucaugaagugcugccgcugggucaaccgcaccaaguccauccagcagggcccccgcgaguccgagcgcaaggucuccgucaccccccagaacggcaaggucaucuccuccugggaguccuacaagaucggcggcgagaccggccucuga

SEQ ID NO: 127577 - RNA, 1575 nt, Artificial Sequence
  derived and/or modified CDS sequence (opt2) from glycoprotein__RABV__KF484557.1
augguccuccaggcccuccucuucgcccccuuccucaucuccucccucugcuucggcaaguuccccaucuacaccauccccgacaagcucggccccuggucccccaucgacauccaccaccucuccugccccaacaaccucgucgucgaggacgagggcugcaacucccucuccggcuucuccuacauggagcucaaggucggcuacaucuccgccaucaaggucaacggcuucaccugcaccggcgucgucaccgaggccgagaccuacaccaacuucgucggcuacgucaccaccaccuucaagcgcaagcacuuccgccccaugcccgacgccugccgcuccgccuacaacuggaaggucgccggcgacccccgcuacgaggagucccuccacaaccccuaccccgacuaccacuggcuccgcaccgucaagaccaccaaggagucccucaucaucaucucccccuccgucgccgaccucgaccccuacgacaagucccuccacucccgcaucuuccccggcggcaagugcuccggcaugaccaucuccuccaccuacugcuccaccaaccacgacuacaccaucuggaugcccgagaaggccggccucggcaccuccugcgacaucuucaccaccuccaagggcaagcgcgccuccaagggcggccgcaccugcggcuucgucgacgagcgcggccucuacaagucccucaagggcgccugcaagcucaagcucugcggcgucuccggccuccgccucauggacggcaccugggccgccauccagaccuccgacgagaccaaguggugcucccccgaccagcucgucaaccuccacgaccuccacuccgacgagaucgagcaccucgucgucgaggagcucguccgccgccgcgaggagugccucgacgcccucgaguccaucaugaccaccaaguccgucuccuuccgccgccucucccaccuccgcaagcucguccccggcuucggcaaggccuacaccaucuucaacaagacccucauggaggccgacgcccacuacaaguccguccgcaccuggaacgagaucauccccuccaagggcugccuccgcgucggcggcaagugccacccccacgucaacggcgucuucuucaacggcaucauccucggccccgacggccacguccucauccccgagaugcaguccucccuccuccagcagcacauggagcuccucgaguccuccgucaucccccucaugcacccccucgccgaccucuccaccgucuucaaggacggcgacgaggccgaggacuucgucgagguccaccuccccgacguccacaagcaggucuccggcgucgaccucggccuccccuccuggggcaaguacaugcucauguccgccggcgcccucgccacccucaugcucgucaucccccucaugcgcugcugccgccgcgucaaccgcaccaaguccauccagcagggcccccgcgaguccgaccgcaaggucuccgucaccccccagaacggcaaggucaucuccuccugggaguccuacaaguccggcggcgagaccggccucuga

SEQ ID NO: 127578 - RNA, 1575 nt, Artificial Sequence
  derived and/or modified CDS sequence (opt2) from glycoprotein__RABV__KF484558.1
augauccuccacgcccuccucuucgcccccuuccucaucuccucccucugccucggcaaguuccccaucuacaccauccccgacaagcucggccccuggucccccaucgacauccaccaccucuccugccccaacaaccucgucaucgaggacgagggcugcaacucccucuccggcuucuccuacauggagcucaaggucggcuacaucuccgccaucaaggucaacggcuucaccugcaccggcgucgucaccgaggccgagaccuacaccaacuucgucggcuacgucaccaccaccuucaagcgcaagcacuuccgccccaugcccgacgccugccgcuccgccuacaacuggaagcucgccggcgacccccgcuacgaggagucccuccacaaccccuaccccgaguaccacuggcuccgcaccgucaagaccaccaaggagucccucgucgucaucucccccuccgucgccgaccucgaccccuacgacaagucccuccacucccgcaucuuccccuccggcaagugcuccggcaugaccgucuccuccaccuacugcuccaccaaccacgaguacaccaucuggaugcccgagaaggucggccucggcaccuccugcgacaucuucaccaccuccaagggcaagcgcgccuccaagggcggccgcaccugcggcuucgucgacgagcgcggccucuacaagucccucaagggcgccugcaagcucaagcucugcggcgucuccggccuccgccucauggacggcaccugggucgccauccagaccuccgacgagaccaaguggugcucccccgaccagcucgucaaccuccacgaccuccacuccgacgagaucgagcaccucgucgucgaggagcucguccgcaagcgcgaggagugccucgacgcccucgaguccaucaugaccaccaaguccgucuccuuccgccgccucucccaccuccgcaagcucguccccggcuucggcaaggccuacaccaucuucaacaagacccucauggaggccgacgcccacuacaaguccguccgcaccuggaacgagaucauccccuccaagggcugccuccgcgucggcggcaagugccacccccacgucaacggcgucuucuucaacggcaucauccucggccccgacggccacguccucauccccgagaugcaguccucccuccuccagcagcacauggagcuccucgaguccuccgucaucccccucaugcacccccucgccgaccucuccaccgucuucaaggacggcgacgaggccgaggacuucgucgagguccaccuccccgacguccacaagcagaucuccggcgucgaccucggccuccccuccuggggcaaguacguccucauguccgccggcgcccucgccacccucauccucgucaucucccucaugaagugcugccgcugggucaaccgcaccgaguccauccagcagggcccccgcgaguccgagcgcaaggucuccgucaccccccagaacggcaaggucaucuccuccugggaguccuacaagaucggcggcgagaccggccucuga

SEQ ID NO: 127579 - RNA, 1575 nt, Artificial Sequence
  derived and/or modified CDS sequence (opt2) from glycoprotein__RABV__KF484559.1
augguccuccaggcccuccucuucgcccccuuccucaucuccucccucugcuucggcaaguuccccaucuacaccauccccgacaagcucggccccuggucccccaucgacauccaccaccucuccugccccaacaaccucgucgucgaggacgagggcugcaacucccucuccggcuucuccuacauggagcucaaggucggcuacaucuccgccaucaaggucaacggcuucaccugcaccggcgucgucaccgaggccgagaccuacaccaacuucgucggcuacgucaccaccaccuucaagcgcaagcacuuccgccccaugcccgacgccugccgcuccgccuacaacuggaaggucgccggcgacccccgcuacgaggagucccuccacaaccccuaccccgacuaccacuggcuccgcaccgucaagaccaccaaggagucccucaucaucaucucccccuccgucgccgaccucgaccccuacgacaagucccuccacucccgcaucuuccccggcggcaagugcuccggcaugaccaucuccuccaccuacugcuccaccaaccacgacuacaccaucuggaugcccgagaaggccggccucggcaccuccugcgacaucuucaccaccuccaagggcaagcgcgccuccaagggcggccgcaccugcggcuucgucgacgagcgcggccucuacaagucccucaagggcgccugcaagcucaagcucugcggcgucuccggccuccgccucauggacggcaccugggccgccauccagaccuccgacgagaccaaguggugcucccccgaccagcucgucaaccuccacgaccuccacuccgacgagaucgagcaccucgucgucgaggagcucguccgccgccgcgaggagugccucgacgcccucgaguccaucaugaccaccaaguccgucuccuuccgccgccucucccaccuccgcaagcucguccccggcuucggcaaggccuacaccaucuucaacaagacccucauggaggccgacgcccacuacaaguccguccgcaccuggaacgagaucauccccuccaagggcugccuccgcgucggcggcaagugccacccccacgucaacggcgucuucuucaacggcaucauccucggccccgacggccacguccucauccccgagaugcaguccucccuccuccagcagcacauggagcuccucgaguccuccgucaucccccucaugcacccccucgccgaccucuccaccgucuucaaggacggcgacgaggccgaggacuucgucgagguccaccuccccgacguccacaagcaggucuccggcgucgaccucggccuccccuccuggggcaaguacaugcucauguccgccggcgcccucgccacccucaugcucgucaucccccucaugaagugcugccgccgcgucaaccgcaccaaguccauccagcagggcccccgcgaguccgaccgcaaggucuccgucaccccccagaacggcaaggucaucuccuccugggaguccuacaaguccggcggcgagaccggccucuga

SEQ ID NO: 127580 - RNA, 1575 nt, Artificial Sequence
  derived and/or modified CDS sequence (opt2) from glycoprotein__RABV__KF620487.1
augaucccccaggcccuccucuucguccccuuccucggcuucccccucugccucggcaaguuccccaucuacaccauccccgacaagcucggccccuggucccccaucgacauccaccaccucuccugccccaacaacauggucgucgaggacgagggcugcaccaaccucuccggcuucuccuacauggagcucaaggucggcuacaucuccgccaucaaggucaacggcuucaccugcaccggcgucgucaccgaggccgagaccuacaccaacuucgucggcuacgucaccaccaccuucaagcgcaagcacuuccgccccguccccgacgccugccgcgacgcccacaacuggaagauggccggcgacccccgcuacgaggagucccuccacaaccccuaccccgacuaccacuggcuccgcaccgucaagaccaccaaggagucccucgucaucaucucccccuccgucgccgaccucgaccccuacgacaagucccuccacuccuccgucuuccccggcggcaagugcuccggcaucaccgucuccuccaccuacugcuccaccaaccacgacuacaccaucuggaugcccgagaacccccgccucggcaccuccugcgacaucuucaccuacuccaagggcaagcgcgccuccaaggaguccaagaccugcggcuucgucgacgagcgcggccucuacaagucccucaagggcgccugcaagcucaagcucugcggcguccccggccuccgccucauggacggcaccugggucgccauccagaccuccgacgaggucaaguggugcccccccgaccagcucgucaaccuccacgaccuccacuccgacgagcucgagcaccucgucgucgaggagcucgucaagaagcgcgaggagugccucgacgcccucgaguccaucaugaccaccaaguccgucuccuuccgccgccucucccaccuccgcaagcucguccccggcuucggcaaggccuacaccaucuucaacaagacccucauggaggccgacgcccacuacaaguccguccgcaccuggaacgagaucauccccuccaagggcugccuccgcgucggcggccgcugccacccccacgucaacggcgucuucuucaacggcaucauccucggccccgacggccacguccucauccccgagaugcaguccucccuccuccagcagcacauggagcuccucgaguccuccgucaucccccucaugcacccccucgccgaccccuccgccgucuucaagaccggcgacgaggccgaggacuucgucgagguccaccuccccgacguccacaagcaggucuccggcgucgaccucggccuccccuccuggggcaaguacguccucauguccgccggcguccucaucguccucguccucaugaucuuccucaugaccugcugcaagcgccccaaccgcgccgagcucauccaccacuccccccgcgagaccgagcgcaaggucuccgucaccucccagggcggccgcgucaucuccuccugggaguccuacaagaacggcggcgagaccaagcucuga

SEQ ID NO: 127581 - RNA, 1575 nt, Artificial Sequence
  derived and/or modified CDS sequence (opt2) from glycoprotein__RABV__KF620488.1
augaucccccaggcccuccucuucguccccuuccucggcuucccccucugccucggcaaguuccccaucuacaccauccccgacaagcucggccccuggucccccaucgacauccaccaccucuccugccccaacaacauggucgucgaggacgagggcugcaccaaccucuccggcuucuccuacauggagcucaaggucggcuacaucuccgccaucaaggucaacggcuucaccugcaccggcgucgucaccgaggccgagaccuacaccaacuucgucggcuacgucaccaccaccuucaagcgcaagcacuuccgccccaugcccgacgccugccgcgacgcccacaacuggaagauggccggcgacccccgcuacgaggagucccuccacaaccccuaccccgacuaccacuggcuccgcaccgucaagaccaccaaggagucccucgucaucaucucccccuccgucgccgaccucgaccccuacgacaagucccuccacuccuccgucuuccccggcggcaagugcuccggcaucaccgucuccuccaccuacugcuccaccaaccacgacuacaccaucuggaugcccgagaacccccgccucggcaccuccugcgacaucuucaccuacuccaagggcaagcgcgccuccaaggaguccaagaccugcggcuucgucgacgagcgcggccucuacaagucccucaagggcgccugcaagcucaagcucugcggcguccucggccuccgccucauggacggcaccugggucgccauccagaccuccgacgaggucaaguggugcccccccgaccagcucgucaaccuccacgacuuccgcuccgacgagcucgagcaccucgucgucgaggagcucgucaagaagcgcgaggagugccucgacgcccucgaguccaucaugaccaccaaguccgucuccuuccgccgccucucccaccuccgcaagcucguccccggcuucggcaaggccuacaccaucuucaacaagacccucauggaggccgacgcccacuacaaguccguccgcaccuggaacgagaucauccccuccaagggcugccucaaggucggcggccgcugccacccccacgucaacggcgucuucuucaacggcaucauccucggccccgacggccacguccucauccccgagaugcaguccucccuccuccagcagcacauggagcuccucgaguccuccgucaucccccucaugcacccccucgccgaccccuccgccgucuucaagaccggcgacgaggccgaggacuucgucgagguccaccuccccgacguccacaagcaggucuccggcgucgaccucggccuccccuccuggggcaaguacguccucauguccgccggcguccucaucguccucguccucaugaucuuccucaugaugugcugcaagaagcccaaccgcgccgagcccauccaccacuccccccgcgagaccgagcgcaagauguccgucaccucccagggcggccgcgucaucuccuccugggaguccuacaagaacggcggcgagaccaagcucuga

SEQ ID NO: 127582 - RNA, 1575 nt, Artificial Sequence
  derived and/or modified CDS sequence (opt2) from glycoprotein__RABV__KF620489.1
augaucccccaggcccuccucuucguccccuuccucggcuucccccucugccucggcaaguuccccaucuacaccauccccgacaagcucggccccuggucccccaucgacauccaccaccucuccugccccaacaacauggucgucgaggacgagggcugcaccaaccucuccggcuucuccuacauggagcucaaggucggcuacaucuccgccaucaaggucaacggcuucaccugcaccggcgucgucaccgaggccgagaccuacaccaacuucgucggcuacgucaccaccaccuucaagcgcaagcacuuccgccccguccccgacgccugccgcgacgcccacaacuggaagaucgccggcgacccccgcuacgaggagucccuccacaaccccuaccccgacuaccacuggcuccgcaccgucaagaccaccaaggagucccucgucaucaucucccccuccgucgccgaccucgaccccuacgacaagucccuccacuccuccgucuuccccggcggcaagugcuccggcaucaccgucuccuccaccuacugcuccaccaaccacgacuacaccaucuggaugcccgagaacccccgccucggcaccuccugcgacaucuucaccuacuccaagggcaagcgcgccuccaaggaguccaagaccugcggcuucgucgacgagcgcggccucuacaagucccucaagggcgccugcaagcucaagcucugcggcguccccggccuccgccucauggacggcaccugggucgccauccagaccuccgacgaggucaaguggugcccccccgaccagcucgucaaccuccacgaccuccacuccgacgagcucgagcaccgcgucgucgaggagcucgucaagaagcgcgaggagugccucgacgcccucgaguccaucaugaccaccaaguccgucuccuuccgccgccucucccaccuccgcaagcucguccccggcuucggcaaggccuacaccaucuucaacaagacccucauggaggccgacgcccacuacaaguccguccgcaccuggaacgagaucauccccuccaagggcugccuccgcgucggcggccgcugccacccccacgucaacggcgucuucuucaacggcaucauccucggccccgacggccacguccucauccccgagaugcaguccucccuccuccagcagcacauggagcuccucgaguccuccgucaucccccucaugcacccccucgccgaccccuccgccgucuucaagaccggcgacgaggccgaggacuucgucgagguccaccuccccgacguccacaagcaggucuccggcgucgaccucggccuccccuccuggggcaaguacguccucauguccgccggcguccucaucguccucguccucaugaucuuccucaugaccugcugcaagcgccccaaccgcgccgagcccauccaccacuccccccgcgagaccgagcgcaaggucuccgucaccucccagggcggccgcgucaucuccuccugggaguccuacaagaacggcggcgagaccaagcucuga

SEQ ID NO: 127583 - RNA, 1575 nt, Artificial Sequence
  derived and/or modified CDS sequence (opt2) from glycoprotein__RABV__KF656698.1
augauccuccagguccuccaguucgucccccuccucaucuccccccucugccucggcaaguuccccaucuacaccauccccgacaagcucggccccuggucccccaucgacauccaccaccucuccugccccaacaaccucgucgucgaggacgagggcugcaccaaccucuccggcuucuccuacauggagcucaaggucggcuacaucuccgccaucaaggucaacggcuucaccugcaccggcgucgucaccgaggccgagaccuacaccaacuucgucggcuacgucaccaccaccuucaagcgcaagcacuuccgccccauccccgacgccugccgcgccgccuacaacuggaagauggccggcgacccccgcuacgaggagucccuccagaaccccuaccccgaguaccacuggcuccgcaccgucaagaccaccaaggagucccucaucaucaucucccccuccgucgccgaccucgaccccuacgacaagucccuccacucccgcgucuuccccggcggcuccgcccucggcaucaccgucuccuccaccuacugcuccaccaaccacgacuacaccaucuggaugcccgaggagccccgccucggcaccuccugcgacaucuucaccuccuccaagggcaagaaggccuccaagggcggcaagaccugcggcuucgucgacgagcgcggccucuacaagucccucaagggcgccugcaagcucaagcucugcggcguccucggccuccgccucauggacggcaccugggucuccauccagaccuccgacaacaccaaguggugcucccccgaccagcucgucaaccuccacgacuuccacuccgacgagaucgagcaccucgucgucgaggagcucgucaagaagcgcgaggagugccucgacgcccucgaguccaucaugaccaccaaguccgucuccuuccgccgccucaccuaccuccgcaagcucguccccggcuucggcaaggccuacaccaucuucaacaagacccucauggaggccgacgcccacuacaaguccguccgcaccuggaacgagaucauccccuccaagggcugccucaagguccgcgagcgcugccacccccccgucgacggcgucuucuucaacggcaucauccucggccccgacggcaacguccucauccccgagaugcaguccucccuccuccagcagcacauggagcuccucgaguccuccgucaucccccucaugcacccccucgccgaccccuccaccgucuucaaggagggcgacgaggccgaggacuucgucgagguccaccuccccgacguccacaagcagaucuccggcgucgaccucggccuccccuccuggggcaaguaccuccucaugaucgccggcggccucgccacccucguccucaucaucugcuccaucgccugcugccgccgcgccaagcgcaccgagucccgccgccgcggcuccggcgaguccggcaagaaggccaccgccaccccccgcacccgcaaggucgucuccuccugggagcucuacaagcgcgagggcgacgcccgccucuga

SEQ ID NO: 127584 - RNA, 1575 nt, Artificial Sequence
  derived and/or modified CDS sequence (opt2) from glycoprotein__RABV__KF656699.1
augauccuccagguccuccaguucgucccccuccucaucuccccccucugccucggcaaguuccccaucuacaccauccccgacaagcucggccccuggucccccaucgacauccaccaccucuccugccccaacaaccucgucgucgaggacgagggcugcaccaaccucuccggcuucuccuacauggagcucaaggucggcuacaucuccgccaucaaggucaacggcuucaccugcaccggcgucgucaccgaggccgagaccuacaccaacuucgucggcuacgucaccaccaccuucaagcgcaagcacuuccgccccauccccgacgccugccgcgccgccuacaacuggaagauggccggcgacccccgcuacgaggagucccuccagaaccccuaccccgaguaccacuggcuccgcaccgucaagaccaccaaggagucccucaucaucaucucccccuccgucgccgaccucgaccccuacgacaagucccuccacucccgcgucuuccccggcggcuccgcccucggcaucaccgucuccuccaccuacugcuccaccaaccacgacuacaccaucuggaugcccgaggagccccgccucggcaccuccugcgacaucuucaccuccuccaagggcaagaaggccuccaagggcggcaagaccugcggcuucgucgacgagcgcggccucuacaagucccucaagggcgccugcaagcucaagcucugcggcguccucggccuccgccucauggacggcaccugggucuccauccagaccuccgacaacaccaaguggugcucccccgaccagcucgucaaccuccacgacuuccacuccgacgagaucgagcaccucgucgucgaggagcucgucaagaagcgcgaggagugccucgacgcccucgaguccaucaugaccaccaaguccgucuccuuccgccgccucuccuaccuccgcaagcucguccccggcuucggcaaggccuacaccaucuucaacaagacccucauggaggccgacgcccacuacaaguccguccgcaccuggaacgagaucauccccuccaagggcugccucaagguccgcgagcgcugccacccccccgucgacggcgucuucuucaacggcaucauccucggccccgacggcaacguccucauccccgagaugcaguccucccuccuccagcagcacauggagcuccucgaguccuccgucaucccccucaugcacccccucgccgaccccuccaccgucuucaaggagggcgacgaggccgaggacuucgucgagguccaccuccccgacguccacaagcagaucuccggcgucgaccucggccuccccuccuggggcaaguaccuccucaugaucgccggcggccucgccacccucguccucaucaucugcuccaucgccugcugccgccgcgccaagcgcaccgagucccgccgccgcggcuccggcgaguccggcaagaaggccaccgccaccccccgcacccgcaaggucgucuccuccugggagcucuacaagcgcgagggcgacgcccgccucuga

SEQ ID NO: 127585 - RNA, 1575 nt, Artificial Sequence
  derived and/or modified CDS sequence (opt2) from glycoprotein__RABV__KF663531.1
augaucccccagguccuccucuucgucccccuccucgucuucuccuccugcuucggcaaguuccccaucuacaccauccccgacaagcucggccccuggucccccaucgacauccaccaccucuccugccccaacaaccucgucgucgaggacgagggcugcaccaaccucuccggcuucuccuacauggagcucaaggucggcuacaucuccgccaucaaggucaacggcuucaccugcaccggcgucgucaccgaggccgagaccuacaccaacuucgucggcuacgucaccaccaccuucaagcgcaagcacuuccgccccaugcccgacgccugccgcgccgccuacaacuggaaggucgccggcgacccccgcuacgaggagucccuccacaaccccuaccccgacuaccacuggcuccgcaccgucaagaccaccaaggagucccucgucaucaucucccccuccgucgccgaccucgaccccuacgacaagucccuccacucccgcgucuuccccggcggcaagugcuccggcaucaccgucuccuccaccugcugcuccaccaaccacgacuacaccaucuggaugcccgagaacccccgccucggcaccuccugcgacaucuucaccaacucccgcggcaagcgcgccuccaagggcggcaagaccugcggcuucgucgacgagcgcggccucugcaagucccucaagggcgccugcaagcucaagcucugcggcguccucggccuccgccucauggacggcaccugggucgccauccagaccuccgacgagaucaaguggugcccccccgaccagcucgucaaccuccacgacuuccacuccgacgagaucgagcacuucgucgucgaggagcucgucaagaagcgcgaggagugccucgacgcccucgagaccaucaugaccaccaaguccgucuccuuccgccgccucucccaccuccgcaagcucguccccggcuucggcaaggccuacaccaucuucaacaagacccucauggaggccgacgcccacuacaaguccauccgcaccuggaacgagaucauccccuccaagggcugccuccgcgucggcggccgcugccacccccacgucaacggcgucuucuucaacggcaucauccucggccccgacggccacguccucauccccgagaugcaguccucccuccuccaccagcacauggagcuccucgaguccuccgucaucccccucaugcacccccucgccgaccccuccaccgucuucaaggacggcgacgaggccgaggacuucgucgagguccaccuccccgacguccacaagcagaucuccggcgucgaccucggccuccccaacuggggcaaguacguccucaucuccgccggcgcccucaccgcccucaugcucaccaucuuccucaugaccugcugccgcaagaccaaccgcgccggcuccauccagcacucccccggcgagaccggccgcaaggucuccgucaccucccacaacggccgcgucaucucccucugggaguccuacaaguccggcuccgagaccaagcucuga

SEQ ID NO: 127586 - RNA, 1575 nt, Artificial Sequence
  derived and/or modified CDS sequence (opt2) from glycoprotein__RABV__KF663532.1
augaucccccagguccuccucuucgucccccuccucgccuucuccuccugcuucggcaaguuccccaucuacaccauccccgacaagcucggccccuggucccccaucgacauccaccaccucuccugccccaacaaccucgucgucgaggacgagggcugcaccaaccucuccggcuucuccuacauggagcucaaggucggcuacaucuccgccaucaaggucaacggcuucaccugcaccggcgucgucaccgaggccgagaccuacaccaacuucgucggcuacgucaccaccaccuucaagcgcaagcacuuccgccccaugcccgacgccugccgcgccgccuacaacuggaaggucgccggcgacccccgcuacgaggagucccuccacaaccccuaccccgacuaccacuggcuccgcaccgucaagaccaccaaggagucccucgucaucaucucccccuccgucgccgaccucgaccccuacgacaagucccuccacucccgcgucuuccccggcggcaagugcuccggcaucaccgucuccuccaccugcugcuccaccaaccacgacuacaccaucuggaugcccgagaacccccgccucggcaccuccugcgacaucuucaccaacucccgcggcaagcgcgccuccaagggcggcaagaccugcggcuucgucgacgagcgcggccucuacaagucccucaagggcgccugcaagcucaagcucugcggcguccucggccucggccucauggacggcaccugggucgccauccagaccuccgacgagaucaaguggugcccccccgaccagcucgucaaccuccacgacuuccacuccgacgagaucgagcaccucgucgucgaggagcucgucaagaagcgcgaggagugccucgacgcccucgagaccaucaugaccaccaaguccgucuccuuccgccgccucucccaccuccgcaagcucguccccggcuucggcaaggccuacaccaucuucaacaagacccucauggaggccgacgcccacuacaaguccauccgcaccuggaacgagaucauccccuccaagggcugccuccgcgucggcggccgcugccacccccacgucaacggcgucuucuucaacggcaucauccucggccccgacggccacguccucauccccgagaugcaguccucccuccuccaccagcacauggagcuccucgaguccuccgucaucccccucaugcacccccucgccgaccccuccaccgucuucaaggacggcgacgaggccgaggacuucgucgagguccaccuccccgacguccacaagcagaucuccggcgucgaccucggccuccccaacuggggcaaguacguccucaucuccgccggcgcccucaccgcccucaugcucaccaucuuccucaugaccugcugccgcaagaccaaccgcgccggcuccauccagcacucccccggcgagaccggccgcaaggucuccgucaccucccacaacggccgcgucaugauccucugggaguccuacaaguccggcuccgagaccaagcucuga

SEQ ID NO: 127587 - RNA, 1575 nt, Artificial Sequence
  derived and/or modified CDS sequence (opt2) from glycoprotein__RABV__KF663533.1
augaucccccagguccuccucuucgucccccuccucgacuucuccuccugcuucggcaaguuccccaucuacaccauccccgacaagcucggccccuggucccccaucgacauccaccaccucuccugccccaacaaccucgucgucgaggacgagggcugcaccaaccucuccggcuucuccuacauggagcucaaggucggcuacaucuccgccaucaaggucaacggcuucaccugcaccggcgucgucaccgaggccgagaccuacaccaacuucgucggcuacgucaccaccaccuucaagcgcaagcacuuccgccccaugcccgacgccugccgcgccgccuacaacuggaaggucgccggcgacccccgcuacgaggagucccuccacaaccccuaccccgacuaccacuggcuccgcaccgucaagaccaccaaggagucccucgucaucaucucccccuccgucgccgaccucgaccccuacgacaagucccuccacucccgcgucuuccccggcggcaagugcuccggcaucaccgucuccuccaccugcugcuccaccaaccacgacuacaccaucuggaugcccgagaacccccgccucggcaccuccugcgacaucuucaccaacucccgcggcaagcgcgccuccaagggcggcaagaccugcggcuucgaggacgagcgcggccucuacaagucccucaucggcgccugcaagcucaagcucugcggcguccucggccuccgccgcauggacggcaccugggucgccauccagaccuccgacaagaucaagcgcugcccccccgaccagcucgucaaccuccacgacuuccacuccgacgagaucgagcaccucgucgucgaggagcucgucaagaagcgcgaggagugccucgacgcccucgagaccaucaugaccaccaaguccgucuccuuccgccgccucucccaccuccgcaagcucguccccggcuucggcaaggccuacaccaucuucaacaagacccucauggaggccgacgcccacuacaaguccauccgcaccuggaacgagaucauccccuccaagggcugccuccgcgucggcggccgcugccacccccacgucaacggcgucuucuucaacggcaucauccucggccccgacggccacguccucauccccgagaugcaguccucccuccuccaccagcacauggagcuccucgaguccuccgucaucccccucaugcacccccucgccgaccccuccaccgucuucaaggacggcgacgaggccgaggacuucgucgagguccaccuccccgacguccacaagcagaucuccggcgucgaccucggccuccccaacuggggcaaguacguccucaucuccgccggcgcccucaccgcccucaugcucaccaucuuccucaugaccugcugccgcaagaccaaccgcgccggcuccauccagcacucccccggcgagaccggccgcaaggucuccgucaccucccacaacggccgcgucaucucccucugggaguccuacaaguccgaguccgagaccaagcucuga

SEQ ID NO: 127588 - RNA, 1575 nt, Artificial Sequence
  derived and/or modified CDS sequence (opt2) from glycoprotein__RABV__KF663534.1
augaucccccagguccuccucuucgucccccuccucgucuucuccuccugcuucggcaaguuccccaucuacaccauccccgacaagcucggccccuggucccccaucgacauccaccaccucuccugccccaacaaccucgucgucgaggacgagggcugcaccaaccucuccggcuucuccuacauggagcucaaggucggcuacaucuccgccaucaaggucaacggcuucaccugcaccggcgucgucaccgaggccgagaccuacaccaacuucgucggcuacgucaccaccaccuucaagcgcaagcacuuccgccccaugcccgacgccugccgcgccgccuacaacuggaaggucgccggcgacccccgcuacgaggagucccuccacaaccccuaccccgacuaccacuggcuccgcaccgucaagaccaccaaggagucccucgucaucaucucccccuccgucgccgaccucgaccccuacgacaagucccuccacucccgcgucuuccccggcggcaagugcuccggcaucaccgucuccuccaccugcugcuccaccaaccacgacuacaccaucuggaugcccgagaacccccgccucggcaccuccugcgacaucuucaccaacucccgcggcaagcgcgccuccaagggcggcaagaccugcggcuucggcgacgagcgcggccucuacaagucccucaacggcgccugcaagcucaagcucugcggcguccucggccuccgccgcauggacggcaccugggucgccauccagaccuccgacgagaucaaguggugcccccccgaccagcucgucaaccuccacgacuuccacuccgacgagaucgagcaccucgucgucgaggagcucgucaagaagcgcgaggagugccucgacgcccucgagaccaucaugaccaccaaguccgucuccuuccgccgccucucccaccuccgcaagcucguccccggcuucggcaaggccuacaccaucuucaacaagacccucauggaggccgacgcccacuacaaguccauccgcaccuggaacgagaucauccccuccaagggcugccuccgcgucggcggccgcugccacccccacgucaacggcgucuucuucaacggcaucauccucggccccgacggccacguccucauccccgagaugcaguccucccuccuccaccagcacauggagcuccucgaguccuccgucaucccccucaugcacccccucgccgaccccuccaccgucuucaaggacggcgacgaggccgaggacuucgucgagguccaccuccccgacguccacaagcagaucuccggcgucgaccucggccuccccaacuggggcaaguacgucaugaucuccgccggcgcccucaccgcccucaugcucaccaucuuccucaugaccugcugccgcaagaccaaccgcgccggcuccauccagcacucccccggcgagaccggccgcaaggucuccgucaccucccacaacggccgcgucaucucccucugggaguccuacaaguccgaguccgagaccaagcucuga

SEQ ID NO: 127589 - RNA, 1575 nt, Artificial Sequence
  derived and/or modified CDS sequence (opt2) from glycoprotein__RABV__KF663535.1
augaucccccagguccuccucuucgucccccuccucgucaucuccuccugcuucggcaaguuccccaucuacaccauccccgacaagcucggccccuggucccccaucgacauccaccaccucuccugccccaacaaccucgucgucgaggacgagggcugcaccaaccucuccggcuucuccuacauggagcucaaggucggcuacaucuccgccaucaaggucaacggcuucaccugcaccggcgucgucaccgaggccgagaccuacaccaacuucgucggcuacgucaccaccaccuucaagcgcaagcacuuccgccccaugcccgacgccugccgcgccgccuacaacuggaaggucgccggcgacccccgcuacgaggagucccuccacaaccccuaccccgacuaccacuggcuccgcaccgucaagaccaccaaggagucccucgucaucaucucccccuccgucgccgaccucgaccccuacgacaagucccuccacucccgcgucuuccccggcggcaagugcuccggcaucaccgucuccuccaccugcugcuccaccaaccacgacuacaccaucuggaugcccgagaacccccgccucggcaccuccugcgacaucuucaccaacucccgcggcaagcgcgccuccaagggcggcaagaccugcggcuucgucgacgagcgcggccucuacaagucccucaagggcgccugcaagcucaagcucugcggcguccucggccuccgccucauggacggcaccugggucgccauccagaccuccgacgagaucaaguggugcccccccgaccagcucgucaaccuccacgacuuccacuccgacgagaucgagcaccucgucgucgaggagcucgucaagaagcgcgaggagugccucgacgcccucgagaccaucaugaccaccaaguccgucuccuuccgccgccucucccaccuccgcaagcucguccccggcuucggcaaggccuacaccaucuucaacaagacccucauggaggccgacgcccacuacaaguccauccgcaccuggaacgagaucauccccuccaagggcugccuccgcgucggcggccgcugccacccccacgucaacggcgucuucuucaacggcaucauccucggccccgacggccacguccucauccccgagaugcaguccucccuccuccaccagcacauggagcuccucgaguccuccgucaucccccucaugcacccccucgccgaccccuccaccgucuucaaggacggcgacgaggccgaggacuucgucgagguccaccuccccgacguccacaagcagaucuccggcgucgaccucggccuccccaacuggggcaaguacguccucaucuccgccggcgcccucaccgcccucaugcucaccaucuuccucaugaccugcugccgcaagaccaaccgcgccggcuccauccagcacucccccggcgagaccggccgcaaggucuccgucaccucccacaacggccgcgucaucuuccucugggaguccuacaaguccggcuccgagaccaagcucuga

SEQ ID NO: 127590 - RNA, 1575 nt, Artificial Sequence
  derived and/or modified CDS sequence (opt2) from glycoprotein__RABV__KF663536.1
augaucccccagguccuccucuucgucccccuccucgucuucuccuccugcuucggcaaguuccccaucuacaccauccccgacaagcucggccccuggucccccaucgacauccaccaccucuccugccccaacaaccucgucgucgaggacgagggcugcaccaaccucuccggcuucuccuacauggagcucaaggucggcuacaucuccgccaucaaggucaacggcuucaccugcaccggcgucgucaccgaggccgagaccuacaccaacuucgucggcuacgucaccaccaccuucaagcgcaagcacuuccgccccaugcccgacgccugccgcgccgccuacaacuggaaggucgccggcgacccccgcuacgaggagucccuccacaaccccuaccccgacuaccacuggcuccgcaccgucaagaccaccaaggagucccucgucaucaucucccccuccgucgccgaccucgaccccuacgacaagucccuccacucccgcgucuuccccggcggcaagugcuccggcaucaccgucuccuccaccugcugcuccaccaaccacgacuacaccaucuggaugcccgagaacccccgccucggcaccuccugcgacaucuucaccaacucccgcggcaagcgcgccuccaagggcggcaagaccugcggcuucgucgacgagcgcggccucugcaagucccucaagggcgccugcaagcucaagcucugcggcguccucggccuccgccucauggacggcaccugggucgccauccagaccuccgacgagaucaaguggugcccccccgaccagcucgucaaccuccacgacuuccacuccgacgagaucgagcaccucgucgucgaggagcucgucaagaagcgcgaggagugccucgacgcccucgagaccaucaugaccaccaaguccgucuccuuccgccgccucucccaccuccgcaagcucguccccggcuucggcaaggccuacaccaucuucaacaagacccucauggaggccgacgcccacuacaaguccauccgcaccuggaacgagaucauccccuccaagggcugccuccgcgucggcggccgcugccacccccacgucaacggcgucuucuucaacggcaucauccucggccccgacggccacguccucauccccgagaugcaguccucccuccuccaccagcacauggagcuccucgaguccuccgucaucccccucaugcacccccucgccgaccccuccaccgucuucaaggacggcgacgaggccgaggacuucgucgagguccaccuccccgacguccacaagcagaucuccggcgucgaccucggccuccccaacuggggcaaguacguccucaucuccgccggcgcccucaccgcccucaugcucaccaucuuccucaugaccugcugccgcaagaccaaccgcgccggcuccauccagcacucccccggcgagaccggccgcaaggucuccgucaccucccacaacggccgcgucaucucccucugggaguccuacaaguccggcuccgagaccaagcucuga

SEQ ID NO: 127591 - RNA, 1575 nt, Artificial Sequence
  derived and/or modified CDS sequence (opt2) from glycoprotein__RABV__KF663537.1
augaucccccagguccuccucuucgucccccuccucgacuucuccuccugcuucggcaaguuccccaucuacaccauccccgacaagcucggccccuggucccccaucgacauccaccaccucuccugccccaacaaccucgucgucgaggacgagggcugcaccaaccucuccggcuucuccuacauggagcucaaggucggcuacaucuccgccaucaaggucaacggcuucaccugcaccggcgucgucaccgaggccgagaccuacaccaacuucgucggcuacgucaccaccaccuucaagcgcaagcacuuccgccccaugcccgacgccugccgcgccgccuacaacuggaaggucgccggcgacccccgcuacgaggagucccuccacaaccccuaccccgacuaccacuggcuccgcaccgucaagaccaccaaggagucccucgucaucaucucccccuccgucgccgaccucgaccccuacgacaagucccuccacucccgcgucuuccccggcggcaagugcuccggcaucaccgucuccuccaccugcugcuccaccaaccacgacuacaccaucuggaugcccgagaacccccgccucggcaccuccugcgacaucuucaccaacucccgcggcaagcgcgccuccaagggcggcaagaccugcggcuucgucgacgagcgcggccucuacaagucccucaacggcgccugcaagcucaagcucugcggcguccucggccuccgccgcauggacggcaccugggucgccauccagaccuccgacgagaucaaguggugcccccccgaccagcucgucaaccuccacgacuuccacuccgacgagaucgagcaccucgucgucgaggagcucgucaagaagcgcgaggagugccucgacgcccucgagaccaucaugaccaccaaguccgucuccuuccgccgccucucccaccuccgcaagcucguccccggcuucggcaaggccuacaccaucuucaacaagacccucauggaggccgacgcccacuacaaguccauccgcaccuggaacgagaucauccccuccaagggcugccuccgcgucggcggccgcugccacccccacgucaacggcgucuucuucaacggcaucauccucggccccgacggccacguccucauccccgagaugcaguccucccuccuccaccagcacauggagcuccucgaguccuccgucaucccccucaugcacccccucgccgaccccuccaccgucuucaaggacggcgacgaggccgaggacuucgucgagguccaccuccccgacguccacaagcagaucuccggcgucgaccucggccuccccaacuggggcaaguacguccucaucuccgccggcgcccucaccgcccucaugcucaccaucuuccucaugaccugcugccgcaagaccaaccgcgccggcuccauccagcacucccccggcgagaccggccgcaaggucuccgucaccucccacaacggccgcgucaucucccucugggaguccuacaaguccgaguccgagaccaagcucuga

SEQ ID NO: 127592 - RNA, 1575 nt, Artificial Sequence
  derived and/or modified CDS sequence (opt2) from glycoprotein__RABV__KF663538.1
augaucccccagguccuccucuucgucccccuccucgucuucuccuccugcuucggcaaguuccccaucuacaccauccccgacaagcucggccccuggucccccaucgacauccaccaccucuccugccccaacaaccucgucgucgaggacgagggcugcaccaaccucuccggcuucuccuacauggagcucaaggucggcuacaucuccgccaucaaggucaacggcuucaccugcaccggcgucgucaccgaggccgagaccuacaccaacuucgucggcuacgucaccaccaccuucaagcgcaagcacuuccgccccaugcccgacgccugccgcgccgccuacaacuggaaggucgccggcgacccccgcuacgaggagucccuccacaaccccuaccccgacuaccacuggcuccgcaccgucaagaccaccaaggagucccucgucaucaucucccccuccgucgccgaccucgaccccuacgacaagucccuccacucccgcgucuuccccggcggcaagugcuccggcaucaccgucuccuccaccugcugcuccaccaaccacgacuacaccaucuggaugcccgagaacccccgccucggcaccuccugcgacaucuucaccaacucccgcggcaagcgcgccuccaagggcggcaagaccugcggcuucgucgacgagcgcggccucuacaagucccucaagggcgccugcaagcucaagcucugcggcguccucggccuccgccucauggacggcaccugggucgccauccagaccuccgacgagaucauccgcugcccccccgaccagcucgucaaccuccacgacuuccacuccgacgagaucgagcaccucgucgucgaggagcucgucaagaagcgcgaggagugccucgacgcccucgagaccaucaugaccaccaaguccgucuccuuccgccgccucucccaccuccgcaagcucguccccggcuucggcaaggccuacaccaucuucaacaagacccucauggaggccgacgcccacuacaaguccauccgcaccuggaacgagaucauccccuccaagggcugccuccgcgucggcggccgcugccacccccacgucaacggcgucuucuucaacggcaucauccucggccccgacggccacguccucauccccgagaugcaguccucccuccuccaccagcacauggagcuccucgaguccuccgucaucccccucaugcacccccucgccgaccccuccaccgucuucaaggacggcgacgaggccgaggacuucgucgagguccaccuccccgacguccacaagcagaucuccggcgucgaccucggccuccccaacuggggcaaguacguccucaucuccgccggcgcccucaccgcccucaugcucaccaucuuccucaugaccugcugccgcaagaccaaccgcgccggcuccauccagcacucccccggcgagaccggccgcaaggucuccgucaccucccacaacggccgcgucaucucccucugggaguccuacaaguccgaguccgagaccaagcucuga

SEQ ID NO: 127593 - RNA, 1575 nt, Artificial Sequence
  derived and/or modified CDS sequence (opt2) from glycoprotein__RABV__KF663539.1
augaucccccagguccuccucuucgucccccuccucgucuucuccuccugcuucggcaaguuccccaucuacaccauccccgacaagcucggccccuggucccccaucgacauccaccaccucuccugccccaacaaccucgucgucgaggacgagggcugcaccaaccucuccggcuucuccuacauggagcucaaggucggcuacaucuccgccaucaaggucaacggcuucaccugcaccggcgucgucaccgaggccgagaccuacaccaacuucgucggcuacgucaccaccaccuucaagcgcaagcacuuccgccccaugcccgacgccugccgcgccgccuacaacuggaagauggccggcgacccccgcuacgaggagucccuccacaaccccuaccccgacuaccacuggcuccgcaccgucaagaccaccaaggagucccucgucaucaucucccccuccgucgccgaccucgaccccuacgacaagucccuccacucccgcgucuuccccggcggcaagugcuccggcaucaccgucuccuccaccugcugcuccaccaaccacgacuacaccaucuggaugcccgagaacccccgccucggcaccuccugcgacaucuucaccaacucccgcggcaagcgcgccuccaagggcggcaagaccugcggcuucggcgacgagcgcggccucuacaagucccuccgcggcgccugcaagcucaagcucugcggcguccucggccuccgccucauggacggcaccugggucgucauccagaccuccgacgagaucaaguggugcucccccgaccagcucgucaaccuccacgacuuccacuccgacgagaucgagcaccucgucgucgaggagcucgucaagaagcgcgaggagugccucgacgcccucgagaccaucaugaccaccaaguccgucuccuuccgccgccucucccaccuccgcaagcucguccccggcuucggcaaggccuacaccaucuucaacaagacccucauggaggccgacgcccacuacaaguccauccgcaccuggaacgagaucauccccuccaagggcugccuccgcgucggcggccgcugccacccccacgucaacggcgucuucuucaacggcaucauccucggccccgacggccacguccucauccccgagaugcaguccucccuccuccaccagcacauggagcuccucgaguccuccgucaucccccucaugcacccccucgccgaccccuccaccgucuucaaggacggcgacgaggccgaggacuucgucgagguccaccuccccgacguccacaagcagaucuccggcgucgaccucggccuccccaacuggggcaaguacguccucaucuccgccggcgcccucaccgcccucaugcucaugaucuuccucaugaccugcugccgcaagaccaaccgcgccgaguccauccagcacucccccggcgagaccggccgcaaggucuccgucaccucccacaacggccgcgucaucuccuccugggaguccuacaaguccgaguccgagaccaagcucuga

SEQ ID NO: 127594 - RNA, 1575 nt, Artificial Sequence
  derived and/or modified CDS sequence (opt2) from glycoprotein__RABV__KF663540.1
augaucccccagguccuccucuucgucccccuccucgucuucuccuccugcuucggcaaguuccccaucuacaccauccccgacaagcucggccccuggucccccaucgacauccaccaccucuccugccccaacaaccucgucgucgaggacgagggcugcaccaaccucuccggcuucuccuacauggagcucaaggucggcuacaucuccgccaucaaggucaacggcuucaccugcaccggcgucgucaccgaggccgagaccuacaccaacuucgucggcuacgucaccaccaccuucaagcgcaagcacuuccgccccaugcccgacgccugccgcgccgccuacaacuggaagauggccggcgacccccgcuacgaggagucccuccacaaccccuaccccgacuaccacuggcuccgcaccgucaagaccaccaaggagucccucgucaucaucucccccuccgucgccgaccucgaccccuacgacaagucccuccacucccgcgucuuccccggcggcaagugcuccggcaucaccgucuccuccaccugcugcuccaccaaccacgacuacaccaucuggaugcccgagaacccccgccucggcaccuccugcgacaucuucaccaacucccgcggcaagcgcgccuccaagggcggcaagaccugcggcuucgucgacgagcgcggccucuacaagucccucaccggcgccugcaagcucaagcucugcggcguccucggccucucccucauggacggcaccugggucgccauccagaccuccgacgagaucaaguggugcucccccgaccagcucgucaaccuccacgacuuccacuccgacgagaucgagcaccucgucgucgaggagcucgucaagaagcgcgaggagugccucgacgcccucgagaccaucaugaccaccaaguccgucuccuuccgccgccucucccaccuccgcaagcucguccccggcuucggcaaggccuacaccaucuucaacaagacccucauggaggccgacgcccacuacaaguccauccgcaccuggaacgagaucauccccuccaagggcugccuccgcgucggcggccgcugccacccccacgucaacggcgucuucuucaacggcaucauccucggccccgacggccacguccucauccccgagaugcaguccucccuccuccaccagcacauggagcuccucgaguccuccgucaucccccucaugcacccccucgccgaccccuccaccgucuucaaggacggcgacgaggccgaggacuucgucgagguccaccuccccgacguccacaagcagaucuccggcgucgaccucggccuccccaacuggggcaaguacguccucaucuccgccggcgcccucaccgcccucaugcucaugaucuuccucaugaccugcugccgcaagaccaaccgcgccgaguccauccagcacucccccggcgagaccggccgcaaggucuccgucaccucccacaacggccgcgucaucuccuccugggaguccuacaaguccgaguccgagaccaagcucuga

SEQ ID NO: 127595 - RNA, 1575 nt, Artificial Sequence
  derived and/or modified CDS sequence (opt2) from glycoprotein__RABV__KF663541.1
augaucccccagguccuccucuucgucccccuccucgucuucuccuccugcuucggcaaguuccccaucuacaccauccccgacaagcucggccccuggucccccaucgacauccaccaccucuccugccccaacaaccucgucgucgaggacgagggcugcaccaaccucuccggcuucuccuacauggagcucaaggucggcuacaucuccgccaucaaggucaacggcuucaccugcaccggcgucgucaccgaggccgagaccuacaccaacuucgucggcuacgucaccaccaccuucaagcgcaagcacuuccgccccaugcccgacgccugccgcgccgccuacaacuggaagauggccggcgacccccgcuacgaggagucccuccacaaccccuaccccgacuaccacuggcuccgcaccgucaagaccaccaaggagucccucgucaucaucucccccuccgucgccgaccucgaccccuacgacaagucccuccacucccgcgucuuccccggcggcaagugcuccggcaucaccgucuccuccaccugcugcuccaccaaccacgacuacaccaucuggaugcccgagaacccccgccucggcaccuccugcgacaucuucaccaacucccgcggcaagcgcgccuccaagggcggcaagaccugcggcuucgucgacgagcgcggccucuacaaguccuccaagggcgccugcaagcucaagcucugcggcguccucggccuccgccucauggacggcaccugggucgccauccagaccuccgacgagaucaaguggugcucccccgaccagcucgucaaccuccacgacuuccacuccgacgagaucgagcaccucgucgucgaggagcucgucaagaagcgcgaggagugccucgacgcccucgagaccaucaugaccaccaaguccgucuccuuccgccgccucucccaccuccgcaagcucguccccggcuucggcaaggccuacaccaucuucaacaagacccucauggaggccgacgcccacuacaaguccauccgcaccuggaacgagaucauccccuccaagggcugccuccgcgucggcggccgcugccacccccacgucaacggcgucuucuucaacggcaucauccucggccccgacggccacguccucauccccgagaugcaguccucccuccuccaccagcacauggagcuccucgaguccuccgucaucccccucaugcacccccucgccgaccccuccaccgucuucaaggacggcgacgaggccgaggacuucgucgagguccaccuccccgacguccacaagcagaucuccggcgucgaccucggccuccccaacuggggcaaguacguccucaucuccgccggcgcccucaccgcccucaugcucaugaucuuccucaugaccugcugccgcaagaccaaccgcgccgaguccauccagcacucccccggcgagaccggccgcaaggucuccgucaccucccacaacggccgcgucaucuccuccugggaguccuacaaguccggcuccgagaccaagcucuga

SEQ ID NO: 127596 - RNA, 1575 nt, Artificial Sequence
  derived and/or modified CDS sequence (opt2) from glycoprotein__RABV__KF663542.1
auguucccccccguccuccucuucgucccccuccucgucuucuccuccugcuucggcaaguuccccaucuacaccauccccgacaagcucggccccuggucccccaucgacauccaccaccucuccugccccaacaaccucgucgucgaggacgagggcugcaccaaccucuccggcuucuccuacauggagcucaaggucggcuacaucuccgccaucaaggucaacggcuucaccugcaccggcgucgucaccgaggccgagaccuacaccaacuucgucggcuacgucaccaccaccuucaagcgcaagcacuuccgccccaugcccgacgccugccgcgccgccuacaacuggaaggucgccggcgacccccgcuacgaggagucccuccacaaccccuaccccgacuaccacuggcuccgcaccgucaagaccaccaaggagucccucgucaucaucucccccuccgucgccgaccucgaccccuacgacaagucccuccacucccgcgucuuccccggcggcaagugcuccggcaucaccgucuccuccaccugcugcuccaccaaccacgacuacaccaucuggaugcccgagaacccccgccucggcaccuccugcgacaucuucaccaacucccgcggcaagcgcgccuccaagggcggcaagaccugcggcuuccgcgacgagcgcggccucuacaagucccucaagggcgccugcaagcucaagcucugcggcguccucggccuccgccucauggacggcaccugggucgccacccagaccuccaacgagaucaaguggugcccccccgaccagcucgucaaccuccacgacuuccacuccgacgagaucgagcaccucgucgucgaggagcucgucaagaagcgcgaggagugccucgacgcccucgagaccaucaugaccaccaaguccgucuccuuccgccgccucucccaccuccgcaagcucguccccggcuucggcaaggccuacaccaucuucaacaagacccucauggaggccgacgcccacuacaaguccauccgcaccuggaacgagaucauccccuccaagggcugccuccgcgucggcggccgcugccacccccacgucaacggcgucuucuucaacggcaucauccucggccccgacggccacguccucauccccgagaugcaguccucccuccuccaccagcacauggagcuccucgaguccuccgucaucccccucaugcacccccucgccgaccccuccaccgucuucaaggacggcgacgaggccgaggacuucgucgagguccaccuccccgacguccacaagcagaucuccggcgucgaccucggccuccccaacuggggcaaguacguccucaucuccgccggcgcccucaccgcccucaugcucaccaucuuccucaugaccugcugccgcaagaccaaccgcgccggcuccauccagcacucccccggcgagaccggccgcaaggucuccgucaccucccacaacggccgcgucaucuuccucugggagucccacaucuccggcuccgagaccaagcucuga

SEQ ID NO: 127597 - RNA, 1575 nt, Artificial Sequence
  derived and/or modified CDS sequence (opt2) from glycoprotein__RABV__KF663543.1
auguucccccagguccuccucuucgucccccuccucgucuucuccuccugcuucggcaaguuccccaucuacaccauccccgacaagcucggccccuggucccccaucgacauccaccaccucuccugccccaacaaccucgucgucgaggacgagggcugcaccaaccucuccggcuucuccuacauggagcucaaggucggcuacaucuccgccaucaaggucaacggcuucaccugcaccggcgucgucaccgaggccgagaccuacaccaacuucgucggcuacgucaccaccaccuucaagcgcaagcacuuccgccccaugcccgacgccugccgcgccgccuacaacuggaaggucgccggcgacccccgcuacgaggagucccuccacaaccccuaccccgacuaccacuggcuccgcaccgucaagaccaccaaggagucccucgucaucaucucccccuccgucgccgaccucgaccccuacgacaagucccuccacucccgcgucuuccccggcggcaagugcuccggcaucaccgucuccuccaccugcugcuccaccaaccacgacuacaccaucuggaugcccgagaacccccgccucggcaccuccugcgacaucuucaccaacucccgcggcaagcgcgccuccaagggcggcaagaccugcggcuucgaggacgagcgcggccucuacaagucccucaccggcgccugcaagcucaagcucugcggcguccucggccuccgccucauggacggcaccugggucgccauccagaccuccgacgagaucaaguggugcccccccgaccagcucgucaaccuccacgacuuccacuccgacgagaucgagcaccucgucgucgaggagcucgucaagaagcgcgaggagugccucgacgcccucgagaccaucaugaccaccaaguccgucuccuuccgccgccucucccaccuccgcaagcucguccccggcuucggcaaggccuacaccaucuucaacaagacccucauggaggccgacgcccacuacaaguccauccgcaccuggaacgagaucauccccuccaagggcugccuccgcgucggcggccgcugccacccccacgucaacggcgucuucuucaacggcaucauccucggccccgacggccacguccucauccccgagaugcaguccucccuccuccaccagcacauggagcuccucgaguccuccgucaucccccucaugcacccccucgccgaccccuccaccgucuucaaggacggcgacgaggccgaggacuucgucgagguccaccuccccgacguccacaagcagaucuccggcgucgaccucggccuccccaacuggggcaaguacguccucaucuccgccggcgcccucaccgcccucaugcucaccaucuuccucaugaccugcugccgcaagaccaaccgcgccggcuccauccagcacucccccggcgagaccggccgcaaggucuccgucaccucccacaacggccgcgucaucucccucugggaguccuacaaguccggcuccgagaccaagcucuga

SEQ ID NO: 127598 - RNA, 1575 nt, Artificial Sequence
  derived and/or modified CDS sequence (opt2) from glycoprotein__RABV__KF663544.1
auguucccccagguccuccucuucgucccccuccucgucuucuccuccugcuucggcaaguuccccaucuacaccauccccgacaagcucggccccuggucccccaucgacauccaccaccucuccugccccaacaaccucgucgucgaggacgagggcugcaccaaccucuccggcuucuccuacauggagcucaaggucggcuacaucuccgccaucaaggucaacggcuucaccugcaccggcgucgucaccgaggccgagaccuacaccaacuucgucggcuacgucaccaccaccuucaagcgcaagcacuuccgccccaugcccgacgccugccgcgccgccuacaacuggaaggucgccggcgacccccgcuacgaggagucccuccacaaccccuaccccgacuaccacuggcuccgcaccgucaagaccaccaaggagucccucgucaucaucucccccuccgucgccgaccucgaccccuacgacaagucccuccacucccgcgucuuccccggcggcaagugcuccggcaucaccgucuccuccaccugcugcuccaccaaccacgacuacaccaucuggaugcccgagaacccccgccucggcaccuccugcgacaucuucaccaacucccgcggcaagcgcgccuccaagggcggcaagaccugcggcuucgaggacgagcgcggccucuacaagucccucaagggcgccugcaagcucaagcucugcggcguccucggccuccgccgcauggacggcaccugggucgccauccagaccuccgacgagaucaaguggugcccccccgaccagcucgucaaccuccacgacuuccacuccgacgagaucgagcaccucgucgucgaggagcucgucaagaagcgcgaggagugccucgacgcccucgagaccaucaugaccaccaaguccgucuccuuccgccgccucucccaccuccgcaagcucguccccggcuucggcaaggccuacaccaucuucaacaagacccucauggaggccgacgcccacuacaaguccauccgcaccuggaacgagaucauccccuccaagggcugccuccgcgucggcggccgcugccacccccacgucaacggcgucuucuucaacggcaucauccucggccccgacggccacguccucauccccgagaugcaguccucccuccuccaccagcacauggagcuccucgaguccuccgucaucccccucaugcacccccucgccgaccccuccaccgucuucaaggacggcgacgaggccgaggacuucgucgagguccaccuccccgacguccacaagcagaucuccggcgucgaccucggccuccccaacuggggcaaguacguccucaucuccgccggcgcccucaccgcccucaugcucaccaucuuccucaugaccugcugccgcaagaccaaccgcgccggcuccauccagcacucccccggcgagaccggccgcaaggucuccgucaccucccacaacggccgcgucaucucccucugggaguccuacaaguccggcuccgagaccaagcucuga

SEQ ID NO: 127599 - RNA, 1575 nt, Artificial Sequence
  derived and/or modified CDS sequence (opt2) from glycoprotein__RABV__KF663545.1
auguucccccagguccuccucuucgucccccuccucgucuucuccuccugcuucggcaaguuccccaucuacaccauccccgacaagcucggccccuggucccccaucgacauccaccaccucuccugccccaacaaccucgucgucgaggacgagggcugcaccaaccucuccggcuucuccuacauggagcucaaggucggcuacaucuccgccaucaaggucaacggcuucaccugcaccggcgucgucaccgaggccgagaccuacaccaacuucgucggcuacgucaccaccaccuucaagcgcaagcacuuccgccccaugcccgacgccugccgcgccgccuacaacuggaaggucgccggcgacccccgcuacgaggagucccuccacaaccccuaccccgacuaccacuggcuccgcaccgucaagaccaccaaggagucccucgucaucaucucccccuccgucgccgaccucgaccccuacgacaagucccuccacucccgcgucuuccccggcggcaagugcuccggcaucaccgucuccuccaccugcugcuccaccaaccacgacuacaccaucuggaugcccgagaacccccgccucggcaccuccugcgacaucuucaccaacucccgcggcaagcgcgccuccaagggcggcaagaccugcggcuucggcgacgagcgcggccucuacaagucccucaagggcgccugcaagcucaagcucugcggcguccucggccuccgccucauggacggcaccugggucgccauccagaccuccgacgagaucaaguggugcccccccgaccagcucgucaaccuccacgacuuccacuccgacgagaucgagcaccucgucgucgaggagcucgucaagaagcgcgaggagugccucgacgcccucgagaccaucaugaccaccaaguccgucuccuuccgccgccucucccaccuccgcaagcucguccccggcuucggcaaggccuacaccaucuucaacaagacccucauggaggccgacgcccacuacaaguccauccgcaccuggaacgagaucauccccuccaagggcugccuccgcgucggcggccgcugccacccccacgucaacggcgucuucuucaacggcaucauccucggccccgacggccacguccucauccccgagaugcaguccucccuccuccaccagcacauggagcuccucgaguccuccgucaucccccucaugcacccccucgccgaccccuccaccgucuucaaggacggcgacgaggccgaggacuucgucgagguccaccuccccgacguccacaagcagaucuccggcgucgaccucggccuccccaacuggggcaaguacguccucaucuccgccggcgcccucaccgcccucaugcucaugaucuuccucaugaccugcugccgcaagaccaaccgcgccgaguccauccagcacucccccggcgagaccggccgcaaggucuccgucaccucccacaacggccgcgucaucuccuccugggaguccuacaaguccggcuccgagaccaagcucuga

SEQ ID NO: 127600 - RNA, 1575 nt, Artificial Sequence
  derived and/or modified CDS sequence (opt2) from glycoprotein__RABV__KF663546.1
auguucccccagguccuccucuucgucccccuccucgucuucuccuccugcuucggcaaguuccccaucuacaccauccccgacaagcucggccccuggucccccaucgacauccaccaccucuccugccccaacaaccucgucgucgaggacgagggcugcaccaaccucuccggcuucuccuacauggagcucaaggucggcuacaucuccgccaucaaggucaacggcuucaccugcaccggcgucgucaccgaggccgagaccuacaccaacuucgucggcuacgucaccaccaccuucaagcgcaagcacuuccgccccaugcccgacgccugccgcgccgccuacaacuggaaggucgccggcgacccccgcuacgaggagucccuccacaaccccuaccccgacuaccacuggcuccgcaccgucaagaccaccaaggagucccucgucaucaucucccccuccgucgccgaccucgaccccuacgacaagucccuccacucccgcgucuuccccggcggcaagugcuccggcaucaccgucuccuccaccugcugcuccaccaaccacgacuacaccaucuggaugcccgagaacccccgccucggcaccuccugcgacaucuucaccaacucccgcggcaagcgcgccuccaagggcggcaagaccugcggcuucgucgacgagcgcggccucuacaagucccucaagggcgccugcaagcucaagcucugcggcguccucggccuccgccucauggacggcaccugggucgccauccagaccuccgacgagaucaaguggugcccccccgaccagcucgucaaccuccacgacuuccacuccgacgagaucgagcaccucgucgucgaggagcucgucaagaagcgcgaggagugccucgacgcccucgagaccaucaugaccaccaaguccgucuccuuccgccgccucucccaccuccgcaagcucguccccggcuucggcaaggccuacaccaucuucaacaagacccucauggaggccgacgcccacuacaaguccauccgcaccuggaacgagaucauccccuccaagggcugccuccgcgucggcggccgcugccacccccacgucaacggcgucuucuucaacggcaucauccucggccccgacggccacguccucauccccgagaugcaguccucccuccuccaccagcacauggagcuccucgaguccuccgucaucccccucaugcacccccucgccgaccccuccaccgucuucaaggacggcgacgaggccgaggacuucgucgagguccaccuccccgacguccacaagcagaucuccggcgucgaccucggccuccccaacuggggcaaguacguccucaucuccgccggcgcccucaccgcccucaugcuccccaucuuccucaugaccugcugccgcaagaccaaccgcgccggcuccauccagcccucccccggcgagaccggccgcaaggucuccgucaccucccacaacggccgcgucaucucccucugggaguccuacaaguccggcuccgagaccaagcucuga

SEQ ID NO: 127601 - RNA, 1575 nt, Artificial Sequence
  derived and/or modified CDS sequence (opt2) from glycoprotein__RABV__KF709069.1
auggucccccaggcccuccucuucgucccccuccucgucuucuccaugugcuucggcaaguuccccaucuacaccauccccgacaagcucggccccuggucccccaucgacauccaccaccucuccugccccaacaaccucgucgucgaggacgagggcugcaccaaccucuccggcuucuccuacauggagcucaaggucggcuacaucuccgccaucaaggucaacggcuucaccugcaccggcgucgucaccgaggccgagaccuacaccaacuucgucggcuacgucaccaccauguucaagcgcaagcacuuccgccccacccccgacgccugccgcgccgccuacaacuggaagauggccggcgacccccgcuacgaggagucccuccacaaccccuaccccgacuaccacuggcuccgcaccgucaagaccaccaaggagucccucgucaucaucucccccuccgucgccgaccucgaccccuacgacaagucccuccacucccgcgucuuccccaacggcaagugcuccggcaucaccaucuccuccaccuacugccccaccaaccacgacuacaccaucuggcuccccgagaacccccgccucggcaccuccugcgacaucuucaccaacucccgcggcaagcgcgccuccaagggcuccaagaccugcggcuucgucgacgagcgcggccucuacaagucccucaagggcgccugcaagcucaagcucugcggcguccucggccuccgccucauggacggcaccugggucgccaugcaggccuccgacgagaccaaguggugcccccccgaccagcucgucaaccuccacgacuuccgcuccgacgagaucgagcacuucgucgucgaggagcucgucaagaagcgcgaggagugccucgacgcccucgaguccaucaugaccaccaaguccgucuccuuccgccgccucucccaccuccgcaagcucguccccggcuucggcaaggccuacaccaucuucaacaagacccucauggaggccgacgcccacuacaaguccguccgcaccuggaacgagaucauccccuccaagggcugccuccgcgucggcggccgcugccacccccacgucaacggcgucuucuucaacggcaucauccucggccccgacggccacguccucauccccgagaugcaguccucccuccuccagcagcacauggagcuccucgaguccuccgucaucccccucaugcacccccucgccgaccccuccaccgucuucaaggacggcgacgaggccgagaacuucgucgagguccaccuccccgacguccacaagcagaucuccggcgucgaccucggccuccccaacuggggcaaguacguccucgucuccgccggcguccucaucgcccucaugcucaucaucuuccucaugaccugcugcggccgcgucaaccgccccaaguccacccagcacaaccucggcggcaccggccgcgaggucuccgucaccccccaguccggcaaggucaucuccuccugggaguccuacaaguccggcggcgagacccgccucuga

SEQ ID NO: 127602 - RNA, 1575 nt, Artificial Sequence
  derived and/or modified CDS sequence (opt2) from glycoprotein__RABV__KF709070.1
auggucccccaggcccuccucuucgucccccuccucgucuucuccaugugcuucggcaaguuccccaucuacaccauccccgacaagcucggccccuggucccccaucgacauccaccaccucuccugccccaacaaccucgucgucgaggacgagggcugcaccaaccucuccggcuucuccuacauggagcucaaggucggcuacaucuccgccaucaaggucaacggcuucaccugcaccggcgucgucaccgaggccgagaccuacaccaacuucgucggcuacgucaccaccauguucaagcgcaagcacuuccgccccacccccgacgccugccgcgccgccuacaacuggaagauggccggcgacccccgcuacgaggagucccuccacaaccccuaccccgacuaccacuggcuccgcaccgucaagaccaccaaggagucccucgucaucaucucccccuccgucgccgaccucgaccccuacgacaagucccuccacucccgcgucuuccccaacggcaagugcuccggcaucaccaucuccuccaccuacugccccaccaaccacgacuacaccaucuggcuccccgagaacccccgccucggcaccuccugcgacaucuucaccaacucccgcggcaagcgcgccuccaagggcuccaagaccugcggcuucgucgacgagcgcggccucuacaagucccucaagggcgccugcaagcucaagcucugcggcguccucggccuccgccucauggacggcaccugggucgccaugcaggccuccgacgagaccaaguggugcccccccgaccagcucgucaaccuccacgacuuccgcuccgacgagaucgagcaccucgucgucgaggagcucgucaagaagcgcgaggagugccucgacgcccucgaguccaucaugaccaccaaguccgucuccuuccgccgccucucccaccuccgcaagcucguccccggcuucggcaaggccuacaccaucuucaacaagacccucauggaggccgacgcccacuacaaguccguccgcaccuggaacgagaucauccccuccaagggcugccuccgcgucggcggccgcugccacccccacgucaacggcgucuucuucaacggcaucauccucggccccgacggccacguccucauccccgagaugcaguccucccuccuccagcagcacauggagcuccucgaguccuccgucaucccccucaugcacccccucgccgaccccuccaccgucuucaaggacggcgacgaggccgagaacuucgucgagguccaccuccccgacguccacaagcagaucuccggcgucgaccucggccuccccaacuggggcaaguacguccucgucuccgccggcguccucaucgcccucaugcucaucaucuuccucaugaccugcugcggccgcgucaaccgccccaaguccacccagcacaaccucggcggcaccggccgcgaggucuccgucaccccccaguccggcaaggucaucuccuccugggaguccuacaaguccggcggcgagacccgccucuga

SEQ ID NO: 127603 - RNA, 1575 nt, Artificial Sequence; identical to SEQ ID NO: 127143
  derived and/or modified CDS sequence (opt2) from glycoprotein__RABV__KF709071.1

SEQ ID NO: 127604 - RNA, 1575 nt, Artificial Sequence; identical to SEQ ID NO: 127143
  derived and/or modified CDS sequence (opt2) from glycoprotein__RABV__KF709072.1

SEQ ID NO: 127605 - RNA, 1575 nt, Artificial Sequence
  derived and/or modified CDS sequence (opt2) from glycoprotein__RABV__KF709074.1
auggucccccaggcccuccucuucgucccccuccucgucuuccccaugugcuucggcaaguuccccaucuacaccauccccgacaagcucggccccuggucccccaucgacauccaccaccucuccugccccaacaaccucgucgucgaggacgagggcugcaccaaccucuccggcuucuccuacauggagcucaaggucggcuacaucuccgccaucaaggucaacggcuucaccugcaccggcgucgucaccgaggccgagaccuacaccaacuucgucggcuacgucaccaccaccuucaagcgcaagcacuuccgccccacccccgacgccugccgcgccgccuacaacuggaagauggccggcgacccccgcuacgaggagucccuccacaaccccuaccccgacuaccacuggcuccgcaccgucaagaccaccaaggagucccucgucaucaucucccccuccgucgccgaccucgaccccuacgacaagucccuccacucccgcgucuuccccaacggcaagugcuccggcaucaccaucuccuccaccuacugccccaccaaccacgacuacaccaucuggcuccccgagaacccccgccucggcaccuccugcgacaucuucaccaacucccgcggcaagcgcgccuccaagggcuccaagaccugcggcuucgucgacgagcgcggccucuacaagucccucaagggcgccugcaagcucaagcucugcggcguccucggccuccgccucauggacggcaccugggucgccaugcaggccuccgacgagaccaaguggugcccccccgaccagcucgucaaccuccacgacuuccgcuccgacgagaucgagcaccucgucgucgaggagcucgucaagaagcgcgaggagugccucgacgcccucgaguccaucaugaccaccaaguccgucuccuuccgccgccucucccaccuccgcaagcucguccccggcuucggcaaggccuacaccaucuucaacaagacccucauggaggccgacgcccacuacaaguccguccgcaccuggaacgagaucauccccuccaagggcugccuccgcgucggcggccgcugcuacccccacgucaacggcgucuucuucaacggcaucauccucggccccgacggccacguccucauccccgagaugcaguccucccuccuccagcagcacauggagcuccucgaguccuccgucaucccccucaugcacccccucgccgaccccuccaccgucuucaaggacggcgacgaggccgagaacuucgucgagguccaccuccccgacguccacaagcagaucuccggcgucgaccucggccuccccaacuggggcaaguacguccucgucuccgccggcguccucaucgcccucaugcucaucaucuuccucaugaccugcugcggccgcgucaaccgccccaaguccacccagcacaaccucggcggcaccggccgcgaggucuccgucaccccccaguccggcaaggucaucuccuccugggaguccuacaaguccggcggcgagacccgccucuga

SEQ ID NO: 127606 - RNA, 1575 nt, Artificial Sequence
  derived and/or modified CDS sequence (opt2) from glycoprotein__RABV__KF709075.1
auggucccccaggcccuccucuucgucccccuccucgucuucuccaugugcuucggcaaguuccccaucuacaccauccccgacaagcucggccccuggucccccaucgacauccaccaccucuccugccccaacaaccucgucgucgaggacgagggcugcaccaaccucuccggcuucuccuacauggagcucaaggucggcuacaucuccgccaucaaggucaacggcuucaccugcaccggcgucgucaccgaggccgagaccuacaccaacuucgucggcuacgucaccaccaccuucaagcgcaagcacuuccgccccacccccgacgccugccgcgccgccuacaacuggaagauggccggcgacccccgcuacgaggagucccuccacaaccccuaccccgacuaccacuggcuccgcaccgucaagaccaccaaggagucccucgucaucaucucccccuccgucgccgaccucgaccccuacgacaagucccuccacucccgcgucuuccccaacggcaagugcuccggcaucaccaucuccuccaccuacugccccaccaaccacgacuacaccaucuggcuccccgagaacccccgccucggcaccuccugcgacaucuucaccaacucccgcggcaagcgcgccuccaagggcuccaagaccugcggcuucgucgacgagcgcggccucuacaagucccucaagggcgccugcaagcucaagcucugcggcguccucggccuccgccucauggacggcaccugggucgccaugcaggccuccgacgagaccaaguggugcccccccgaccagcucgucaaccuccacgacuuccgcuccgacgagaucgagcaccucgucgucgaggagcucgucaagaagcgcgaggagugccucgacgcccucgaguccaucaugaccaccaaguccgucuccuuccgccgccucucccaccuccgcaagcucguccccggcuucggcaaggccuacaccaucuucaacaagacccucauggaggccgacgcccacuacaaguccguccgcaccuggaacgagaucauccccuccaagggcugccuccgcgucggcggccgcugccacccccacgucaacggcgucuucuucaacggcaucauccucggccccgacggccacguccucauccccgagaugcaguccucccuccuccagcagcacauggagcuccucgaguccuccgucaucccccucaugcacccccucgccgaccccuccaccgucuucaaggacggcgacgaggccgagaacuucgucgagguccaccuccccgacguccacaagcagaucuccggcgucgaccucggccuccccaacuggggcaaguacguccucgucuccgccggcguccucaucgcccucaugcucaucaucuuccucaugaccugcugcggccgcgucaaccgccccgaguccacccagcacaaccucggcggcaccggccgcgaggucuccgucaccccccaguccggcaaggucaucuccuccugggaguccuacaaguccggcggcgagacccgccucuga

SEQ ID NO: 127607 - RNA, 1575 nt, Artificial Sequence; identical to SEQ ID NO: 127606
  derived and/or modified CDS sequence (opt2) from glycoprotein__RABV__KF709076.1

SEQ ID NO: 127608 - RNA, 1575 nt, Artificial Sequence
  derived and/or modified CDS sequence (opt2) from glycoprotein__RABV__KF709077.1
auggucccccaggcccuccucuucgucccccuccucgucuucuccaugugcuucggcaaguuccccaucuacaccauccccgacaagcccggccccuggucccccaucgacauccaccaccucuccugccccaacaaccucgucgucgaggacgagggcugcaccaaccucuccggcuucuccuacauggagcucaaggucggcuacaucuccgccaucaaggucaacggcuucaccugcaccggcgucgucaccgaggccgagaccuacaccaacuucgucggcuacgucaccaccaccuucaagcgcaagcacuuccgccccacccccgacgccugccgcgccgccuacaacuggaagauggccggcgacccccgcuacgaggagucccuccacaaccccuaccccgacuaccacuggcuccgcaccgucaagaccaccaaggagucccucgucaucaucucccccuccgucgccgaccucgaccccuacgacaagucccuccacucccgcgucuuccccaacgagaagugcuccggcaucaccaucuccuccaccuacugccccaccaaccacgacuacaccaucuggcuccccgagaacccccgccucggcaccuccugcgacaucuucaccaacucccgcggcaagcgcgccuccaagggcuccaagaccugcggcuucgucgacgagcgcggccucuacaagucccucaagggcgccugcaagcucaagcucugcggcguccucggccuccgccucauggacggcaccugggucgccaugcaggccuccgacgagaccaaguggugcccccccgaccagcucgucaaccuccacgacuuccgcuccgacgagaucgagcaccucgucgucgaggagcucgucaagaagcgcgaggagugccucgacgcccucgaguccaucaugaccaccaaguccgucuccuuccgccgccucucccaccuccgcaagcucguccccggcuucggcaaggccuacaccaucuucaacaagacccucauggaggccgacgcccacuacaaguccguccgcaccuggaacgagaucauccccuccaagggcugccuccgcgucggcggccgcugccacccccacgucaacggcgucuucuucaacggcaucauccucggccccgacggccacguccucauccccgagaugcaguccucccuccuccagcagcacauggagcuccucgaguccuccgucaucccccucaugcacccccucgccgaccccuccaccgucuucaaggacggcgacgaggccgagaacuucgucgagguccaccuccccgacguccacaagcagaucuccggcgucgaccucggccuccccaacuggggcaaguacguccucgucuccgccggcguccucaucgcccucaugcucaucaucuuccucaugaccugcugcggccgcgucaaccgccccgaguccacccagcacaaccucggcggcaccggccgcgaggucuccgucaccccccaguccggcaaggucaucuccuccugggaguccuacaaguccggcggcgagacccgccucuga

SEQ ID NO: 127609 - RNA, 1575 nt, Artificial Sequence
  derived and/or modified CDS sequence (opt2) from glycoprotein__RABV__KF709078.1
auggucccccaggcccuccucuucgucccccuccucgucuucuccaugugcuucggcaaguuccccaucuacaccauccccgacaagcucggccccuggucccccaucgacauccaccaccucuccugccccaacaaccucgucgucgaggacgagggcugcaccaaccucuccggcuucuccuacauggagcucaaggucggcuacaucuccgccaucaaggucaacggcuucaccugcaccggcgucgucaccgaggccgagaccuacaccaacuucgucggcuacgucaccaccaccuucaagcgcaagcacuuccgccccacccccgacgccugccgcgccgccuacaacuggaagauggccggcgacccccgcuacgaggagucccuccacaaccccuaccccgacuaccacuggcuccgcaccgucaagaccaccaaggagucccucgucaucaucucccccuccgucgccgaccucgaccccuacgacaagucccuccacucccgcguccuccccaacggcaagugcuccggcaccaccaccuccuccaccuacugccccaccaaccacgacuacaccaucuggcuccccgagaacccccgccucggcaccuccugcgacaucuucaccaacucccgcggcaagcgcgccuccaagggcuccaagaccugcggcuucgucgacgagcgcggccucuacaagucccucaagggcgccugcaagcucaagcucugcggcguccucggccuccgccucauggacggcaccugggucgccaugcaggccuccgacgagaccaaguggugcccccccgaccagcucgucaaccuccacgacuuccgcuccgacgagaucgagcaccucgucgucgaggagcucgucaagaagcgcgaggagugccucgacgcccucgaguccaucaugaccaccaaguccgucuccuuccgccgccucucccaccuccgcaagcucguccccggcuucggcaaggccuacaccaucuucaacaagacccucauggaggccgacgcccacuacaaguccguccgcaccuggaacgagaucauccccuccaagggcugccuccgcgucggcggccgcugccacccccacgucaacggcgucuucuucaacggcaucauccucggccccgacggccacguccucauccccgagaugcaguccucccuccuccagcagcacauggagcuccucgaguccuccgucaucccccucaugcacccccucgccgaccccuccaccgucuucaaggacggcgacgaggccgagaacuucgucgagguccaccuccccgacguccacaagcagaucuccggcgucgaccucggccuccccaacuggggcaaguacguccucgucuccgccggcguccucaucgcccucaugcucaucaucuuccucaugaccugcugcggccgcgucaaccgccccgaguccacccagcacaaccucggcggcaccggccgcgaggucuccgucaccccccaguccggcaaggucaucuccuccugggaguccuacaaguccggcggcgagacccgccucuga

SEQ ID NO: 127610 - RNA, 1575 nt, Artificial Sequence
  derived and/or modified CDS sequence (opt2) from glycoprotein__RABV__KF709080.1
auggucccccaggcccuccucuucgucccccuccucgucuucuccaugugcuucggcaaguuccccaucuacaccauccccgacaagcucggccccuggucccccaucgacauccaccaccucuccugccccaacaaccucgucgucgaggacgagggcugcaccaaccucuccggcuucuccuacauggagcucaaggucggcuacaucuccgccaucaaggucaacggcuucaccugcaccggcgucgucaccgaggccgagaccuacaccaacuucgucggcuacgucaccaccaccuucaagcgcaagcacuuccgccccacccccgacgccugccgcgccgccuacaacuggaagauggccggcgacccccgcuacgaggagucccuccacaaccccuaccccgacuaccacuggcuccgcaccgucaagaccaccaaggagucccucgucaucaucucccccuccgucgccgaccucgaccccuacgacaagucccuccacucccgcgucuuccccaacggcaagugcuccggcaucaccaucuccuccaccuacugccccaccaaccacgacuacaccaucuggcuccccgagaacccccgccucggcaccuccugcgacaucuucaccaacucccgcggcaagcgcgccuccaagggcuccaagaccugcggcuucgucgacgagcgcggccucuacaagucccucaagggcgccugcaagcucaagcucugcggcguccucggccuccgccucauggacggcaccugggucgccaugcaggccuccgacgagaccaaguggugcccccccgaccagcucgucaaccuccacgacuuccgcuccgacgagaucgagcaccucgccgucgaggagcucgucaagaagcgcgaggagugccucgacgcccucgaguccaucaugaccaccaaguccgucuccuuccgccgccucucccaccuccgcaagcucguccccggcuucggcaaggccuacaccaucuucaacaagacccucauggaggccgacgcccacuacaaguccguccgcaccuggaacgagaucauccccuccaagggcugccuccgcgucggcggccgcugccacccccacgucaacggcgucuucuucaacggcaucauccucggccccgacggccacguccucauccccgagaugcaguccucccuccuccagcagcacauggagcuccucgaguccuccgucaucccccucaugcacccccucgccgaccccuccaccgucuucaaggacggcgacgaggccgagaacuucgucgagguccaccuccccgacguccacaagcagaucuccggcgucgaccucggccuccccaacuggggcaaguacguccucgucuccgccggcguccucaucgcccucaugcucaucaucuuccucaugaccugcugcggccgcgucaaccgccccgaguccacccagcacaaccucggcggcaccggccgcgaggucuccgucaccccccaguccggcaaggucaucuccuccugggaguccuacaaguccggcggcgagacccgccucuga

SEQ ID NO: 127611 - RNA, 1575 nt, Artificial Sequence; identical to SEQ ID NO: 127422
  derived and/or modified CDS sequence (opt2) from glycoprotein__RABV__KF726852.1

SEQ ID NO: 127612 - RNA, 1575 nt, Artificial Sequence
  derived and/or modified CDS sequence (opt2) from glycoprotein__RABV__KF726853.1
augaucucccaggccuuccucuucgucccccuccucgccuucucccccugcuucggcaaguuccccaucuacaccauccccgacaagcucggccccuggucccccaucgacauccaccaccucuccugccccaacaaccucgucgucgaggacgagggcugcaccaaccucuccggcuucuccuacauggagcucaaggucggcuacaucuccgccaucaaggucaacggcuucaccugcaccggcgucgucaccgaggccgagaccuacaccaacuucgucggcuacgucaccaccaccuucaagcgcaagcacuuccgccccaugcccgacgccugccgcaccgccuacuccuggaagauggccggcgacccccgcuacgaggagucccuccacaaccccuaccccgacuaccacuggcuccgcaccgucaagaccaccaaggagucccucgucaucaucucccccuccgucgccgaccucgaccccuacgacaagucccuccacucccgcgucuuccccggcggcaagugcuccggccucaccgucuccuccaccugcugcuccaccaaccacgacuacaccaucuggaugcccgagaacccccgccucggcaccuccugcgacaucuucaccaacucccgcggcaagcgcgccuccaagggcggcaagaccugcggcuucgucgacgagcgcggccucuacaagucccucaagggcgccugcaagcucaagcucugcggcgucuccggccuccgccucauggacggcaccugggucgccauccagaccuccgacgagaucaaguggugcucccccgaccagcucgucaaccuccacgaccuccacuccgacgagaucgagcaccucgucgucgaggagcucgucaagaagcgcgaggagugccucgacgcccucgaguccaucaugaccaccaaguccgucuccuuccgccgccucucccaccuccgcaagcucguccccggcuucggcaaggccuacaccaucuucaacaagacccucauggaggccgacgcccacuacaaguccauccgcaccuggaacgagaucauccccuccaagggcugccuccgcgucggcggccgcugccacccccacgucaacggcgucuucuucaacggcaucauccucggccccgacggccacguccucauccccgagaugcaguccucccuccuccaccagcacauggagcuccucgaguccuccgucaucccccucaugcacccccucgccgaccccuccaccgucuucaaggacggcgacgaggccgaggacuucgucgagguccaccuccccgacgcccacaagcagaucuccggcgucgaccucggccuccccaacuggggcaaguacguccucauguccgccggcgcccucaccgcccucaugcucaugaucuuccucaugaccugcugccgcaagaccaaccgcgccgaguccaugccccacucccccggcgagaccggccgcaaggucucccucaccucccacaacggccgcgucaucuccuccugggaguccuacaaguccggcggcgagaccaagcucuga

SEQ ID NO: 127613 - RNA, 1575 nt, Artificial Sequence
  derived and/or modified CDS sequence (opt2) from glycoprotein__RABV__KJ004416.1
augaucccccagguccuccucuucgucccccuccucgucuucuccuccugcuucggcaaguuccccaucuacaccauccccgacaagcucggccccuggucccccaucgacauccaccaccucuccugccccaacaaccucgucgucgaggacgagggcugcaccaaccucuccggcuucuccuacauggagcucaaggucggcuacaucuccgccaucaaggucaacggcuucaccugcaccggcgucgucaccgaggccgagaccuacaccaacuucgucggcuacgucaccaccaccuucaagcgcaagcacuuccgccccaugcccgacgccugccgcgccgccuacaacuggaagauggccggcgacccccgcuacgaggagucccuccacaaccccuaccccgacuaccacuggcuccgcaccgucaagaccaccaaggagucccucgucaucaucucccccuccgucgccgaccucgaccccuacgacaagucccuccacucccgcgucuuccccggcggcaagugcuccggcaucaccgucuccuccaccugcugcuccaccaaccacgacuacaccaucuggaugcccgagaacccccgccucggcaccuccugcgacaucuucaccaacucccgcggcaagcgcgccuccaagggcggcaagaccugcggcuucgucgacgagcgcggccucuacaagucccucaagggcgccugcaagcucaagcucugcggcguccucggccuccgccucauggacggcaccugggucgccauccagaccuccgacgagaccaaguggugcucccccgaccagcucgucaaccuccacgacuuccacuccgacgagaucgagcaccucgucgucgaggagcucgucaagaagcgcgaggagugccucgacgcccucgagaccaucaugaccaccaaguccgucuccuuccgccgccucucccaccuccgcaagcucguccccggcuucggcaaggccuacaccaucuucaacaagacccucauggaggccgacgcccacuacaaguccauccgcaccuggaacgagaucauccccuccaagggcugccuccgcgucggcggccgcugccacccccacgucaacggcgucuucuucaacggcaucauccucggccccgacggccacguccucauccccgagaugcaguccucccuccuccaccagcacauggagcuccucgaguccuccgucaucccccucaugcacccccucgccgaccccuccaccgucuucaaggacggcgacgaggccgaggacuucgucgagguccaccuccccgacguccacaagcagaucuccggcgucgaccucggccuccccaacuggggcaaguacguccucaucuccgccggcgcccucaccgcccucauguucaccaucuuccucaugaccugcugccgcaagaccaaccgcgccggcuccauccagcucucccccggcgagaccggccgcaaggucuccgucaccucccacaacggccgcgucaucuccuccugggaguccuacaaguccggcuccgagaccaagcucuga

SEQ ID NO: 127614 - RNA, 1575 nt, Artificial Sequence
  derived and/or modified CDS sequence (opt2) from glycoprotein__RABV__KJ174608.1
augaucccccaggcccuccucuccgucccccuccucaucuccucccucugcuucggcaaguuccccaucuacaccauccccgagaagcucggccccuggucccccaucgacauccaccaccucuccugccccaacaaccucgucgucgaggacgagggcugcaacucccucuccggcuucuccuacauggagcucaaggucggcuacaucuccgccaucaaggucaacggcuucaccugcaccggcgucgucaccgaggccgagaccuacaccaacuucgucggcuacgucaccaccaccuucaagcgcaagcacuuccgccccaugcccgacgccugccgcgccgccuacaacuggaagaccgccggcgacccccgcuacgaggagucccuccacaaccccuaccccgacuaccacuggcuccgcaccgucaagaccaccaaggagucccucaucaucaucucccccuccgucgccgaccucgaccccuacgacaagucccuccacucccgcaucuuccccggcggcaagugccucggcaucaccaucuccuccaccuacugcuccaccaaccacgacuacaccaucuggaugcccgaggaggcccgccucggcaccuccugcgacaucuucaccaacuccaagggcaagcgcgccuccaagggcggccgcaccugcggcuucgucgacgagcgcggccucuacaagucccucaagggcgccugcaagcucaagcucugcggcguccccggccuccgccucauggacggcaccugggucgccauccagacccccaacgagaccaaguggugcucccccgaccagcucgucaacguccacgacuuccgcuccgacgagaucgagcaccucgucgucgaggagcucauccgcaagcgcgaggagugccucgacgcccucgaguccaucaugaccaccaaguccgucuccuuccgccgccucuccaaccuccgcaagcucguccccggcuucggcaaggccuacaccaucuucaacaagacccucauggaggccgacgcccacuacaaguccguccgcaccuggaacgagaucauccccucccgcggcugccucaaggucggcggccgcugccacccccacgucaacggcgucuucuucaacggcaucauccucggccccgacggccacauccucauccccgagaugcaguccucccuccuccagcagcacauggagcuccucgaguccuccgucaucccccucauccacccccucgccgaccccuccaccgucuucaaggacggcgacgaggccgaggacuucgucgagguccaccuccccgacguccaccagcaggucuccggcgucgaccucggccuccccgacuggggcaaguacguccucauguccgccggcgcccucgccaccgucaugcucaccaucuuccucaucaccugcugccgccgcgucaagcgcaccgaguccauccagcagucccucggcgaguccggccgcaaggucuccgucaccccccagaacggcaaggucauguccuccugggaguacuacaaguccggcggcggcacccgccucuga

SEQ ID NO: 127615 - RNA, 1575 nt, Artificial Sequence; identical to SEQ ID NO: 127451
  derived and/or modified CDS sequence (opt2) from glycoprotein__RABV__KJ174609.1

SEQ ID NO: 127616 - RNA, 1575 nt, Artificial Sequence
  derived and/or modified CDS sequence (opt2) from glycoprotein__RABV__KJ174615.1
augaucccccaggcccuccucuccgucccccuccucaucuccucccucugcuucggcaaguuccccaucuacaccauccccgagaagcucggccccuggucccccaucgacauccaccaccucuccugccccaacaaccucgucgucgaggacgagggcugcaacucccucuccggcuucuccuacauggagcucaaggucggcuacaucuccgccaucaaggucaacggcuucaccugcaccggcgucgucaccgaggccgagaccuacaccaacuucgucggcuacgucaccaccaccuucaagcgcaagcacuuccgccccauggccgacgccugccgcgccgccuacaacuggaagaccgccggcgacccccgcuacgaggagucccuccacaaccccuaccccgacuaccacuggcuccgcaccgucaagaccaccaaggagucccucaucaucaucucccccuccgucgccgaccucgaccccuacgacaagucccuccacucccgcaucuuccccggcggcaagugccucggcaucaccaucuccuccaccuacugcuccaccaaccacgacuacaccaucuggaugcccgaggaggcccgccucggcaccuccugcgacaucuucaccaacuccaagggcaagcgcgccuccaagggcggccgcaccugcggcuucgucgacgagcgcggccucuacaagucccucaagggcgccugcaagcucaagcucugcggcguccccggccuccgccucauggacggcaccugggucgccauccagacccccaacgagaccaaguggugcucccccgaccagcucgucaacguccacgacuuccgcuccgacgagaucgagcaccucgucgucgaggagcucauccgcaagcgcgaggagugccucgacgcccucgaguccaucaugaccaccaaguccgucuccuuccgccgccucuccaaccuccgcaagcucguccccggcuucggcaaggccuacaccaucuucaacaagacccucauggaggccgacgcccacuacaaguccguccgcaccuggaacgagaucauccccucccgcggcugccucaaggucggcggccgcugccacccccacgucaacggcgucuucuucaacggcaucauccucggccccgacggccacauccucauccccgagaugcaguccucccuccuccagcagcacauggagcuccucgaguccuccgucaucccccucauccacccccucgccgaccccuccaccgucuucaaggacggcgacgaggccgaggacuucgucgagguccaccuccccgacguccaccagcaggucuccggcgucgaccucggccuccccgacuggggcaaguacguccucauguccgccggcgcccucgccaccgucaugcucaccaucuuccucaucaccugcugccgccgcgucaagcgcaccgaguccauccagcagggccccggcgaguccggccgcaagcucuccgucaccccccagaacggcaaggucauguccuccugggaguacuacaaguccggcggcggcacccgccucuga

SEQ ID NO: 127617 - RNA, 1575 nt, Artificial Sequence
  derived and/or modified CDS sequence (opt2) from glycoprotein__RABV__KJ174616.1
augaucccccaggcccuccucuccgucccccuccucaucuccucccucugcuucggcaaguuccccaucuacaccauccccgagaagcucggccccuggucccccaucgacauccaccaccucuccugccccaacaaccucgucgucgaggacgagggcugcaacucccucuccggcuucuccuacauggagcucaaggucggcuacaucuccgccaucaaggucaacggcuucaccugcaccggcgucgucaccgaggccgagaccuacaccaacuucgucggcuacgucaccaccaccuucaagcgcaagcacuuccgccccaugcccgacgccugccgcgccgccuacaacuggaagaccgccggcgacccccgcuacgaggagucccuccacaaccccuaccccgacuaccacuggcuccgcaccgucaagaccaccaaggagucccucaucaucaucucccccuccgucgccgaccucgaccccuacgacaagucccuccacucccgcaucuuccccggcggcaagugccucggcaucaccaucuccuccaccuacugcuccaccaaccacgacuacaccaucuggaugcccgaggaggcccgccucggcaccuccugcgacaucuucaccaacuccaagggcaagcgcgccuccaagggcggccgcaccugcggcuucgucgacgagcgcggccucuacaagucccucaagggcgccugcaagcucaagcucugcggcguccccggccuccgccucauggacggcaccugggucgccauccagacccccaacgagaccaaguggugcucccccgaccagcucgucaacguccacgacuuccgcuccgacgagaucgagcaccucgucgucgaggagcucauccgcaagcgcgaggagugccucgacgcccucgaguccaucaugaccaccaaguccgucuccuuccgccgccucuccaaccuccgcaagcucguccccggcuucggcaaggccuacaccaucuucaacaagacccucauggaggccgacgcccacuacaaguccguccgcaccuggaacgagaucauccccuccaagggcugccucaaggucggcggccgcugccacccccacgucaacggcgucuucuucaacggcaucauccucggccccgacggccacauccucauccccgagaugcaguccucccuccuccagcagcacauggagcuccucgaguccuccgucaucccccucauccacccccucgccgaccccuccaccgucuucaaggacggcgacgaggccgaggacuucgucgagguccaccuccccgacguccaccagcaggucuccggcgucgaccucggccuccccgacuggggcaaguacguccucauguccgccggcgcccucgccaccgucaugcucaccaucuuccucaucaccugcugccgccgcgucaagcgcaccgaguccguccagcagggccucggcgaguccggccgcaaggucuccgucgccccccagaacggcaaggucauguccuccugggaguacuacaaguccggcggcggcacccgccucuga

SEQ ID NO: 127618 - RNA, 1575 nt, Artificial Sequence
  derived and/or modified CDS sequence (opt2) from glycoprotein__RABV__KJ174617.1
augaucccccaggcccuccucuccgucccccuccucaucuccucccucugcuucggcaaguuccccaucuacaccauccccgagaagcucggccccuggucccccaucgacauccaccaccucuccugccccaacaaccucgucgucgaggacgagggcugcaacucccucuccggcuucuccuacauggagcucaaggucggcuacaucuccgccaucaaggucaacggcuucaccugcaccggcgucgucaccgaggccgagaccuacaccaacuucgucggcuacgucaccaccaccuucaagcgcaagcacuuccgccccaugcccgacgccugccgcgccgccuacaacuggaagaccgccggcgacccccgcuacgaggagucccuccacaaccccuaccccgacuaccacuggcuccgcaccgucaagaccaccaaggagucccucaucaucaucucccccuccgucgccgaccucgaccccuacgacaagucccuccacucccgcaucuuccccggcggcaagugccucggcaucaccaucuccuccaccuacugcuccaccaaccacgacuacaccaucuggaugcccgaggaggcccgccucggcaccuccugcgacaucuucaccaacuccaagggcaagcgcgccuccaagggcggccgcaccugcggcuucgucgacgagcgcggccucuacaagucccucaagggcgccugcaagcucaagcucugcggcguccccggccuccgccucauggacggcaccugggucgccauccagacccccaacgagaccaaguggugcucccccgaccagcucgucaacguccacgacuuccgcuccgacgagaucgagcaccucgucgucgaggagcucauccgcaagcgcgaggagugccucgacgcccucgaguccaucaugaccaccaaguccgucuccuuccgccgccucuccaaccuccgcaagcucguccccggcuucggcaaggccuacaccaucuucaacaagacccucauggaggccgacgcccacuacaaguccguccgcaccuggaacgagaucauccccucccgcggcugccucaaggucggcggccgcugccacccccacgucaacggcgucuucuucaacggcaucauccucggccccgacggccacauccucauccccgagaugcaguccucccuccuccagcagcacauggagcuccucgaguccuccgucaucccccucauccacccccucgccgaccccuccaccgucuucaaggacggcgacgaggccgaggacuucgucgagguccaccuccccgacguccaccagcaggucuccggcgucgaccucggccuccccgacuggggcaaguacguccucauguccgccggcgcccucgccaccgucaugcucaccaucuuccucaucaccugcugccgccgcgucaagcgcaccgaguccauccagcagggccucggcgaguccggccgcaaggucuccgucgccccccagaacggcaaggucauguccuccugggaguacuacaaguccggcggcggcacccgccucuga

SEQ ID NO: 127619 - RNA, 1575 nt, Artificial Sequence
  derived and/or modified CDS sequence (opt2) from glycoprotein__RABV__KJ174618.1
augaucccccaggcccuccucuucguccccuuccucuuccccucccucugccucggcaaguuccccaucuacaccauccccgagaagcucggccccuggucccccaucgacauccaccaccucuccugccccaacaaccucgucgucgaggacgagggcugcgacucccucuccggcuucuccuacauggagcucaaggucggcuacaucuccgccaucaaggucaacggcuucaccugcaccggcgucgucaccgaggccgagaccuacaccaacuucgucggcuacgucaccaccaccuucaagcgcaagcacuuccgccccaugcccgacgccugccgcgccgccuacaacuggaagaccgccggcgacccccgcuacgaggagucccuccacaaccccuaccccgacuaccacuggcuccgcaccgucaagaccaccaaggagucccucaucaucaucucccccuccgucgccgaccucgaccccuacgacaagucccuccacucccgcgucuuccccggcggcaagugccucggcaucaccaucuccuccaccuacugcuccaccaaccacgacuacaccaucuggaugcccgaggaggcccgccucggcaccuccugcgacaucuucaccaacuccaagggcaagcgcgccuccaagggcggccgcaccugcggcuucgucgacgagcgcggccucuacaagucccucaagggcgccugcaagcucaagcucugcggcguccccggccuccgccucauggacggcaccugggucgccauccagacccccggcgagaccaaguggugcucccccgaccagcucgucaaccuccacgacuuccgcuccgacgagaucgagcaccucgucgucgaggagcucaucaagaagcgcgaggagugccucgacgcccucgaguccaucaugaccaccaaguccgucuccuuccgccgccucuccaaccuccgcaagcucguccccggcuucggcaaggccuacaccaucuucaacaagacccucauggaggccgacgcccacuacaaguccauccgcaccugggacgagaucauccccuccaagggcugccuccgcgucggcggccgcugccacccccacgucaacggcgucuucuucaacggcaucauccucggccccgacggccacguccucauccccgagaugcaguccucccuccuccagcagcacauggagcuccucgaguccuccgucaucccccucauccacccccucgccgaccccuccaccgucuucaaggacggcgacgaggccgaggacuucgucgagguccaccuccccgacguccacgagcaggucuccggcgucgaccucggccuccccaacuggggcaaguacguccucaucuccgccggcguccucgccaccgucauccucaccaucuuccuccucaccugcugccgccgcgucaaccgcaccaagcccaagcagcagucccucggcgacuccggccgcaaggucuccgucaccccccagaacggcaaggucauguccuccugggaguacuacaaguccgagggccgcaccucccucuga

SEQ ID NO: 127620 - RNA, 1575 nt, Artificial Sequence
  derived and/or modified CDS sequence (opt2) from glycoprotein__RABV__KJ174619.1
augaucccccaggccuuccucuucguccccuuccucuuccccucccucugccucggcaaguuccccaucuacaccauccccgagaagcucggccccuggucccccaucgacauccaccaccucuccugccccaacaaccucgucgucgaggacgagggcugcgacucccucuccggcuucuccuacauggagcucaaggucggcuacaucuccgccaucaaggucaacggcuucaccugcaccggcgucgucaccgaggccgagaccuacaccaacuucgucggcuacgucaccaccaccuucaagcgcaagcacuuccgccccaugcccgacgccugccgcgccgccuacaacuggaagaccgccggcgacccccgcuacgaggagucccuccacaaccccuaccccgacuaccacuggcuccgcaccgucaagaccaccaaggagucccucaucaucaucucccccuccgucgccgaccucgaccccuacgacaagucccuccacucccgcgucuuccccggcggcaagugccucggcaucaccaucuccuccaccuacugcuccaccaaccacgacuacaccaucuggaugcccgaggaggcccgccucggcaccuccugcgacaucuucaccaacuccaagggcaagcgcgccuccaagggcggccgcaccugcggcuucgucgacgagcgcggccucuacaagucccucaagggcgccugcaagcucaagcucugcggcguccccggccuccgccucauggacggcaccugggucgccauccagacccccggcgagaccaaguggugcucccccgaccagcucgucaaccuccacgacuuccgcuccgacgagaucgagcaccucgucgucgaggagcucaucaagaagcgcgaggagugccucgacgcccucgaguccaucaugaccaccaaguccgucuccuuccgccgccucuccaaccuccgcaagcucguccccggcuucggcaaggccuacaccaucuucaacaagacccucauggaggccgacgcccacuacaaguccauccgcaccugggacgagaucauccccuccaagggcugccuccgcgucggcggccgcugccacccccacgucaacggcgucuucuucaacggcaucauccucggccccgacggccacguccucauccccgagaugcaguccucccuccuccagcagcacauggagcuccucgaguccuccgucaucccccucauccacccccucgccgaccccuccaccgucuucaaggacggcgacgaggccgaggacuucgucgagguccaccuccccgacguccacgagcaggucuccggcgucgaccucggccuccccaacuggggcaaguacguccucaucuccgccggcguccucgccaccgucauccucaccaucuuccuccucaccugcugccgccgcgucaaccgcaccaagcccaagcagcagucccucggcgaguccggccgcaaggucuccgucaccccccagaacggcaaggucauguccuccugggaguacuacaaguccgagggccgcaccucccucuga

SEQ ID NO: 127621 - RNA, 1575 nt, Artificial Sequence
  derived and/or modified CDS sequence (opt2) from glycoprotein__RABV__KJ174620.1
augaucccccaggcccuccucuucguccccuuccucuuccccucccucugccucggcaaguuccccaucuacaccauccccgagaagcucggccccuggucccccaucgacauccaccaccucuccugccccaacaaccucgucgucgaggacgagggcugcgacucccucuccggcuucuccuacauggagcucaaggucggcuacaucuccgccaucaaggucaacggcuucaccugcaccggcgucgucaccgaggccgagaccuacaccaacuucgucggcuacgucaccaccaccuucaagcgcaagcacuuccgccccaugcccgacgccugccgcgccgccuacaacuggaagaccgccggcgacccccgcuacgaggagucccuccacaaccccuaccccgacuaccacuggcuccgcaccgucaagaccaccaaggagucccucaucaucaucucccccuccgucgccgaccucgaccccuacgacaagucccuccacucccgcgucuuccccggcggcaagugccucggcaucaccaucuccuccaccuacugcuccaccaaccacgacuacaccaucuggaugcccgaggaggcccgccucggcaccuccugcgacaucuucaccaacuccaagggcaagcgcgccuccaagggcggcaagaccugcggcuucgucgacgagcgcggccucuacaagucccucaagggcgccugcaagcucaagcucugcggcguccccggccuccgccucauggacggcaccugggucgccauccagacccccggcgagaccaaguggugcucccccgaccagcucgucaaccuccacgacuuccgcuccgacgagaucgagcaccucgucgucgaggagcucaucaagaagcgcgaggagugccucgacgcccucgaguccaucaugaccaccaaguccgucuccuuccgccgccucuccaaccuccgcaagcucguccccggcuucggcaaggccuacaccaucuucaacaagacccucauggaggccgacgcccacuacaaguccauccgcaccugggacgagaucauccccuccaagggcugccuccgcgucggcggccgcugccacccccacgucaacggcgucuucuucaacggcaucauccucggccccgacggccacguccucauccccgagaugcaguccucccuccuccagcagcacauggagcuccucgaguccuccgucaucccccucauccacccccucgccgaccccuccaccgucuucaaggacggcgacgaggccgaggacuucgucgagguccaccuccccgacguccacgagcaggucuccggcgucgaccucggccuccccaacuggggcaaguacguccucaucuccgccggcguccucgccaccgucauccucaccaucuuccuccucaccugcugccgccgcgucaaccgcaccaagcccaagcagcagucccucggcgaguccggccgcaaggucuccgucaccccccagaacggcaaggucauguccuccugggaguacuacaaguccgagggccgcaccucccucuga

SEQ ID NO: 127622 - RNA, 1575 nt, Artificial Sequence
  derived and/or modified CDS sequence (opt2) from glycoprotein__RABV__KJ174622.1
augaucccccaggcccuccucuucguccccuuccucuuccccucccucugccucggcaaguuccccaucuacaccauccccgagaagcucggccccuggucccccaucgacauccaccaccucuccugccccaacaaccucgucgucgaggacgagggcugcgacucccucuccggcuucuccuacauggagcucaaggucggcuacaucuccgccaucaaggucaacggcuucaccugcaccggcgucgucaccgaggccgagaccuacaccaacuucgucggcuacgucaccaccaccuucaagcgcaagcacuuccgccccaugcccgacgccugccgcgccgccuacaacuggaagaccgccggcgacccccgcuacgaggagucccuccacaaccccuaccccgacuaccacuggcuccgcaccgucaagaccaccaaggagucccucaucaucaucucccccuccgucgccgaccucgaccccuacgacaagucccuccacucccgcgucuuccccggcggcaagugccucggcaucaccaucuccuccaccuacugcuccaccaaccacgacuacaccaucuggaugcccgaggaggcccgccucggcaccuccugcgacaucuucaccaacuccaagggcaagcgcgccuccaagggcggccgcaccugcggcuucgucgacgagcgcggccucuacaagucccucaagggcgccugcaagcucaagcucugcggcguccccggccuccgccucauggacggcaccugggucgccauccagacccccggcgagaccaaguggugcucccccgaccagcucgucaaccuccacgacuuccgcuccgacgagaucgagcaccucgucgucgaggagcucaucaagaagcgcgaggagugccucgacgcccucgaguccaucaugaccaccaaguccgucuccuuccgccgccucuccaaccuccgcaagcucguccccggcuucggcaaggccuacaccaucuucaacaagacccucauggaggccgacgcccacuacaaguccauccgcaccugggacgagaucauccccuccaagggcugccuccgcgucggcggccgcugccacccccacgucaacggcgucuucuucaacggcaucauccucggccccgacggccacguccucauccccgagaugcaguccucccuccuccagcagcacauggagcuccucgaguccuccgucaucccccucauccacccccucgccgaccccuccaccgucuucaaggacggcgacgaggccgaggacuucgucgagguccaccuccccgacguccacgagcaggucuccggcgucgaccucggccuccccaacuggggcaaguacguccucaucuccgccggcguccucgccaccgucauccucaccgucuuccuccucaccugcugccgccgcgucaaccgcaccaagcccaagcagcagucccucggcgaguccggccgcaaggucuccgucaccccccagaacggcaaggucauguccuccugggaguacuacaaguccgagggccgcaccucccucuga

SEQ ID NO: 127623 - RNA, 1575 nt, Artificial Sequence
  derived and/or modified CDS sequence (opt2) from glycoprotein__RABV__KJ174623.1
augaucccccaggcccuccucuucguccccuuccucuuccccucccucugccucggcaaguuccccaucuacaccauccccgagaagcucggccccuggucccccaucgacauccaccaccucuccugccccaacaaccucgucgucgaggacgagggcugcgacucccucuccggcuucuccuacauggagcucaaggucggcuacaucuccgccaucaaggucaacggcuucaccugcaccggcgucgucaccgaggccgagaccuacaccaacuucgucggcuacgucaccaccaccuucaagcgcaagcacuuccgccccaugcccgacgccugccgcgccgccuacaacuggaagaccgccggcgacccccgcuacgaggagucccuccacaaccccuaccccgacuaccacuggcuccgcaccgucaagaccaccaaggagucccucaucaucaucucccccuccgucgccgaccucgaccccuacgacaagucccuccacucccgcgucuuccccggcggcaagugccucggcaucaccgucuccuccaccuacugcuccaccaaccacgacuacaccaucuggaugcccgaggaggcccgccucggcaccuccugcgacaucuucaccaacuccaagggcaagcgcgccuccaagggcggccgcaccugcggcuucgucgacgagcgcggccucuacaagucccucaagggcgccugcaagcucaagcucugcggcguccccggccuccgccucauggacggcaccugggucgccauccagacccccggcgagaccaaguggugcucccccgaccagcucgucaaccuccacgacuuccgcuccgacgagaucgagcaccucgucgucgaggagcucaucaagaagcgcgaggagugccucgacgcccucgaguccaucaugaccaccaaguccgucuccuuccgccgccucuccaaccuccgcaagcucguccccggcuucggcaaggccuacaccaucuucaacaagacccucauggaggccgacgcccacuacaaguccguccgcaccugggacgagaucauccccuccaagggcugccuccgcgucggcggccgcugccacccccacgucaacggcgucuucuucaacggcaucauccucggccccgacggccacguccucauccccgagaugcaguccucccuccuccagcagcacauggagcuccucgaguccuccgucaucccccucauccacccccucgccgaccccuccaccgucuucaaggacggcgacgaggccgaggacuucgucgagguccaccuccccgacguccacaagcaggucuccggcgucgaccucggccuccccaacuggggcaaguacguccucaugggcgccggcguccucgccaccgucauccucaccaucuuccuccucaccugcugccgccgcgucaaccgcaccaagcccaagcagcagucccucggcgaguccggccgcaaggucuccgucaccccccagaacggcaaggucauguccuccugggaguacuacaaguccgagggccgcaccucccucuga

SEQ ID NO: 127624 - RNA, 1575 nt, Artificial Sequence; identical to SEQ ID NO: 127443
  derived and/or modified CDS sequence (opt2) from glycoprotein__RABV__KJ174624.1

SEQ ID NO: 127625 - RNA, 1575 nt, Artificial Sequence
  derived and/or modified CDS sequence (opt2) from glycoprotein__RABV__KJ174625.1
augaucccccaggcccuccucuucguccccuuccucuuccccucccucugccucggcaaguuccccaucuacaccauccccgagaagcucggccccuggucccccaucgacauccaccaccucuccugccccaacaaccucgucgucgaggacgagggcugcgacucccucuccggcuucuccuacauggagcucaaggucggcuacaucuccgccaucaaggucaacggcuucaccugcaccggcgucgucaccgaggccgagaccuacaccaacuucgucggcuacgucaccaccaccuucaagcgcaagcacuuccgccccaugcccgacgccugccgcgccgccuacaacuggaagaccgccggcgacccccgcuacgaggagucccuccacaaccccuaccccgacuaccacuggcuccgcaccgucaagaccaccaaggagucccucaucaucaucucccccuccgucgccgaccucgaccccuacgacaagucccuccacucccgcgucuuccccggcggcaagugccucggcaucaccgucuccuccaccuacugcuccaccaaccacgacuacaccaucuggaugcccgaggaggcccgccucggcaccuccugcgacaucuucaccaacuccaagggcaagcgcgccuccaagggcggccgcaccugcggcuucgucgacgagcgcggccucuacaagucccucaagggcgccugcaagcucaagcucugcggcguccccggccuccgccucauggacggcaccugggucgccauccagacccccggcgagaccaaguggugcucccccgaccagcucgucaaccuccacgacuuccgcuccgacgagaucgagcaccucgucgucgaggagcucaucaagaagcgcgaggagugccucgacgcccucgaguccaucaugaccaccaaguccgucuccuuccgccgccucuccaaccuccgcaagcucguccccggcuucggcaaggccuacaccaucuucaacaagacccucauggaggccgacgcccacuacaaguccguccgcaccugggacgagaucauccccuccaagggcugccuccgcgucggcggccgcugccacccccacgucaacggcgucuucuucaacggcaucauccucggccccgacggccacguccucauccccgagaugcaguccucccuccuccagcagcacauggagcuccucgaguccuccgucaucccccucauccacccccucgccgaccccuccaccgucuucaaggacggcgacgaggccgaggacuucgucgagguccaccuccccgacguccacaagcaggucuccggcgucgaccucggccuccccaacuggggcaaguacguccucaugggcgccggcguccucgccaccgucauccucaccaucuuccuccucaccugcugccgccgcgucaaccgcaccaagcccaagcagcagucccucgaggaguccggccgcaaggucuccgucaccccccagaacggcaaggucauguccuccugggaguacuacaaguccgagggccgcaccucccucuga

SEQ ID NO: 127626 - RNA, 1575 nt, Artificial Sequence; identical to SEQ ID NO: 127625
  derived and/or modified CDS sequence (opt2) from glycoprotein__RABV__KJ174626.1

SEQ ID NO: 127627 - RNA, 1575 nt, Artificial Sequence; identical to SEQ ID NO: 127457
  derived and/or modified CDS sequence (opt2) from glycoprotein__RABV__KJ174627.1

SEQ ID NO: 127628 - RNA, 1575 nt, Artificial Sequence; identical to SEQ ID NO: 127285
  derived and/or modified CDS sequence (opt2) from glycoprotein__RABV__KJ174628.1

SEQ ID NO: 127629 - RNA, 1575 nt, Artificial Sequence; identical to SEQ ID NO: 127457
  derived and/or modified CDS sequence (opt2) from glycoprotein__RABV__KJ174629.1

SEQ ID NO: 127630 - RNA, 1575 nt, Artificial Sequence; identical to SEQ ID NO: 127285
  derived and/or modified CDS sequence (opt2) from glycoprotein__RABV__KJ174630.1

SEQ ID NO: 127631 - RNA, 1575 nt, Artificial Sequence
  derived and/or modified CDS sequence (opt2) from glycoprotein__RABV__KJ174631.1
augaucccccaggcccuccucuucgucccccuccucauccccucccucugccucggcgaguuccccaucuacaccauccccgacaagcucggccccuggucccccaucgacauccaccaccucuccugccccaacaaccucgucgccgagaacgacggcugcaccucccucuccggcuucuccuacauggagcucaaggucggcuacaucuccgccaucaaggucaacggcuucaccugcaccggcgucgucaccgaggccgagaccuacaccaacuucgucggcuacgucaccaccaccuucaagcgcaagcacuuccgccccacccccgacgccugccgcgccgcccacgacuggaagauggccggcgacccccgcuacgaggccucccuccagaaccccuaccccgacuaccacuggcuccgcaccgucaagaccaccaaggagucccucgucaucaucucccccuccgucgccgaccucgaccccuacgacaagucccuccacucccgcgucuuccccuccggcaagugccucggcaucaccgucuccuccaccuacugcuccaccaaccacgacuacaccaucuggaugcccgucgagccccgccucggcaccuccugcgacaucuucaccaacucccgcggcaagcgcgccuccaagggcggccgcgucugcggcuucgucgacgagcgcggccucuacaagucccucaagggcgccugccgccucaagcucugcggcguccccggcauccgccuccucgacggcaccugggucuccauccagaccuccgaggacaucaaguggugcccccccgaccgccucgucaaccuccacgacuuccacuccgacgagaucgagcaccucgucgucgccgagcucaucaagcgccgcgagaacugccucgacgcccucgaguccaucaugaccaccaaguccgucuccuuccgccgccucucccaccuccgcaagcucguccccggcuucggcaaggccuacaccaucuucaacaagacccucauggaggccgacgcccacuacaaguccgucaagaccuggaacgaggucauccccuccaagggcugccucgaggucggcggccgcugccacccccacgucaacggcgucuucuucaacggcaucauccucggccccgacggcaacguccucauccccgagaugcaguccucccuccuccagcagcacauggagcuccucgaguccuccgucaucccccucaugcacccccucgccgaccccuccaccgucuucaaggagggcgacgaggccgaggacuucgucgagguccaccuccccgacguccacaagcaggucuccgacgucgaccucggccuccccuccuggggcaaguaccuccucaucggcgccggcgcccucgccauccucauccucgccaucguccucaucaucugcugccgccgcgucaacaagacccgcuccacccagcgcggccaccgcgaguccggcggcaagauguccgucgucccccagaacggcaagaucaucuccuccugggagcucuacaaguccgaguccgagaccggccucuga

SEQ ID NO: 127632 - RNA, 1575 nt, Artificial Sequence
  derived and/or modified CDS sequence (opt2) from glycoprotein__RABV__KJ174632.1
augaucccccaggcccuccucuucgucccccuccucauccccucccucugccucggcgaguuccccaucuacaccauccccgacaagcucggccccuggucccccaucgacauccaccaccucuccugccccaacaaccucgucgccgagaacgacggcugcaccucccucuccggcuucuccuacauggagcucaaggucggcuacaucuccgccaucaaggucaacggcuucaccugcaccggcgucgucaccgaggccgagaccuacaccaacuucgucggcuacgucaccaccaccuucaagcgcaagcacuuccgccccacccccgacgccugccgcgccgcccacgacuggaagauggccggcgacccccgcuacgaggccucccuccagaaccccuaccccgacuaccacuggcuccgcaccgucaagaccaccaaggagucccucgucaucaucucccccuccgucgccgaccucgaccccuacgacaagucccuccacucccgcgucuuccccuccggcaagugccucggcaucaccgucuccuccaccuacugcuccaccaaccacgacuacaccaucuggaugcccgucgagccccgccucggcaccuccugcgacaucuucaccaacucccgcggcaagcgcgccuccaagggcggccgcgucugcggcuucgucgacgagcgcggccucuacaagucccucaagggcgccugccgccucaagcucugcggcguccccggcauccgccuccucgacggcaccugggucuccauccagaccuccgaggacaucaaguggugcccccccgaccgccucgucaaccuccacgacuuccacuccgacgagaucgagcaccucgucgucgccgagcucaucaagcgccgcgagaacugccucgacgcccucgaguccaucaugaccaccaaguccgucuccuuccgccgccucucccaccuccgcaagcucguccccggcuucggcaaggccuacaccaucuucaacaagacccucauggaggccgacgcccacuacaaguccgucaagaccuggaacgaggucauccccuccaagggcugccucgaggucggcggccgcugccacccccacgucaacggcgucuucuucaacggcaucauccucggccccgacggcaacguccucauccccgagaugcaguccucccuccuccagcagcacauggagcuccucgaguccuccgucaucccccucaugcacccccucgccgaccccuccaccgucuucaaggagggcgacgaggccgaggacuucgucgagguccaccuccccgacguccacaagcaggucuccgacgucgaccucggccuccccuccuggggcaaguaccuccucaucuccgccggcgcccucgccauccucauccucgccaucguccucaucaucugcugcaagcgcgucaagaagaccggcuccauccagcgcggccaccgcgaguccggcggcaagauguccgucgucccccagaacggcaagaucaucuccuccugggagcucuacaaguccgaguccgagaccggccucuga

SEQ ID NO: 127633 - RNA, 1575 nt, Artificial Sequence
  derived and/or modified CDS sequence (opt2) from glycoprotein__RABV__KJ174633.1
augaucccccaggcccuccucuucgucccccuccucauccccucccucugccucggcgaguuccccaucuacaccauccccgacaagcucggccccuggucccccaucgacauccaccaccucuccugccccaacaaccucgucgccgagaacgacggcugcaccucccucuccggcuucuccuacauggagcucaaggucggcuacaucuccgccaucaaggucaacggcuucaccugcaccggcgucgucaccgaggccgagaccuacaccaacuucgucggcuacgucaccaccaccuucaagcgcaagcacuuccgccccacccccgacgccugccgcgccgcccacgacuggaagauggccggcgacccccgcuacgaggccucccuccagaaccccuaccccgacuaccacuggcuccgcaccgucaagaccaccaaggagucccucgucaucaucucccccuccgucgccgaccucgaccccuacgacaagucccuccacucccgcgucuuccccuccggcaagugccucggcaucaccgucuccuccaccuacugcuccaccaaccacgacuacaccaucuggaugcccgucgagccccgccucggcaccuccugcgacaucuucaccaacucccgcggcaagcgcgccuccaagggcggccgcgucugcggcuucgucgacgagcgcggccucuacaagucccucaagggcgccugccgccucaagcucugcggcguccccggcauccgccuccucgacggcaccugggucuccauccagaccuccgaggacaucaaguggugcccccccgaccgccucgucaaccuccacgacuuccacuccgacgagaucgagcaccucgucgucgccgagcucaucaagcgccgcgagaacugccucgacgcccucgaguccaucaugaccaccaaguccgucuccuuccgccgccucucccaccuccgcaagcucguccccggcuucggcaaggccuacaccaucuucaacaagacccucauggaggccgacgcccacuacaaguccgucaagaccuggaacgaggucauccccuccaagggcugccucgaggucggcggccgcugccacccccacgucaacggcgucuucuucaacggcaucauccucggccccgacggcaacguccucauccccgagaugcagcccucccuccuccagcagcacauggagcuccucgaguccuccgucaucccccucaugcacccccucgccgaccccuccaccgucuucaaggagggcgacgaggccgaggacuucgucgagguccaccuccccgacguccacaagcaggucuccgacgucgaccucggccuccccuccuggggcaaguaccuccucaucuccgccggcgcccucgccauccucauccucgccaucguccucaugaucugcugccgccgcgucaacaagaccggcuccacccagcgcggccaccgcgaguccggcggcaagauguccgucgucccccagaacggcaagaucaucuccuccugggagcucuacaaguccgaguccgagaccggccucuga

SEQ ID NO: 127634 - RNA, 1575 nt, Artificial Sequence
  derived and/or modified CDS sequence (opt2) from glycoprotein__RABV__KJ174634.1
augaucccccaggccauccucuucgucccccuccucauccccucccucugccucggcgaguuccccaucuacaccauccccgacaagcucggccccuggucccccaucgacauccaccaccucuccugccccaacaaccucgucgccgagaacgacggcugcaccucccucuccggcuucuccuacauggagcucaaggucggcuacaucuccgccaucaaggucaacggcuucaccugcaccggcgucgucaccgaggccgagaccuacaccaacuucgucggcuacgucaccaccaccuucaagcgcaagcacuuccgccccacccccgacgccugccgcgccgcccacgacuggaagauggccggcgacccccgcuacgaggccucccuccagaaccccuaccccgacuaccacuggcuccgcaccgucaagaccaccaaggagucccucgucaucaucucccccuccgucgccgaccucgaccccuacgacaaguuccuccacucccgcgucuuccccuccggcaagugccucggcaucaccgucuccuccaccuacugcuccaccaaccacgacuacaccaucuggaugcccgucgagccccgccucggcaccuccugcgacaucuucaccaacucccgcggcaagcgcgccuccaagggcggccgcgucugcggcuucgucgacgagcgcggccucuacaagucccucaagggcgccugccgccucaagcucugcggcguccccggcauccgccuccucgacggcaccugggucuccauccagaccuccgaggacaucaaguggugcccccccgaccgccucgucaaccuccacgacuuccacuccgacgagaucgagcaccucgucgucgccgagcucaucaagcgccgcgagaacugccucgacgcccucgaguccaucaugaccaccaaguccgucuccuuccgccgccucucccaccuccgcaagcucguccccggcuucggcaaggccuacaccaucuucaacaagacccucauggaggccgacgcccacuacaaguccgucaagaccuggaacgaggucauccccuccaagggcugccucgaggucggcggccgcugccacccccacgucaacggcgucuucuucaacggcaucauccucggccccgacggcaacguccucauccccgagaugcaguccucccuccuccagcagcacauggagcuccucgaguccuccgucaucccccucaugcacccccucgccgaccccuccaccgucuucaaggagggcgacgaggccgaggaguucgucgagguccaccuccccgacguccacaagcaggucuccgacgucgaccucggccuccccuccuggggcaaguaccuccucaucuccgccggcgcccucgccauccucauccucgccaucguccucaucaucugcugccgccgcgucaacaagaccggcuccacccagcgcggccaccgcgaguccggcggcaagauguccgucgucccccagaacggcaagaucaucuccuccugggagcucuacaaguccgaguccgagaccggccucuga

SEQ ID NO: 127635 - RNA, 1575 nt, Artificial Sequence
  derived and/or modified CDS sequence (opt2) from glycoprotein__RABV__KJ174635.1
augaucccccaggcccuccucuucgucccccuccucauccccucccucugccucggcgaguuccccaucuacaccauccccgacaagcucggccccuggucccccaucgacauccaccaccucuccugccccaacaaccucgucgccgagaacgacggcugcaccucccucuccggcuucuccuacauggagcucaaggucggcuacaucuccgccaucaaggucaacggcuucaccugcaccggcgucgucaccgaggccgagaccuacaccaacuucgucggcuacgucaccaccaccuucaagcgcaagcacuuccgccccacccccgacgccugccgcgccgcccacgacuggaagauggccggcgacccccgcuacgaggccucccuccagaaccccuaccccgacuaccacuggcuccgcaccgucaagaccaccaaggagucccucgucaucaucucccccuccgucgccgaccucgaccccuacgacaagucccuccacucccgcgucuuccccuccggcaagugccucggcaucaccgucuccuccaccuacugcuccaccaaccacgacuacaccaucuggaugcccgucgagccccgccucggcaccuccugcgacaucuucaccaacucccgcggcaagcgcgccuccaagggcggccgcgucugcggcuucgucgacgagcgcggccucuacaagucccucaagggcgccugccgccucaagcucugcggcguccccggcauccgccuccucgacggcaccugggucuccauccagaccuccgaggacaucaaguggugcccccccgaccgccucgucaaccuccacgacuuccacuccgacgagaucgagcaccucgucgucgccgagcucaucaagcgccgcgagaacugccucgacgcccucgaguccaucaugaccaccaaguccgucuccuuccgccgccucucccaccuccgcaagcucguccccggcuucggcaaggccuacaccaucuucaacaagacccucauggaggccgacgcccacuacaaguccgucaagaccuggaacgaggucauccccuccaagggcugccucgaggucggcggccgcugccacccccacgucaacggcgucuucuucaacggcaucauccucggccccgacggcaacguccucauccccgagaugcaguccucccuccuccagcagcacauggagcuccucgaguccuccgucaucccccucaugcacccccucgccgaccccuccaccgucuucaaggagggcgacgaggccgaggacuucgucgagguccaccuccccgacguccacaagcaggucuccgacgucgaccucggccuccccuccuggggcaaguaccuccucaucuccgccggcgcccucgccauccucauccucgccgucguccucaucaucugcugccgccgcgucaacaagacccgcuccacccagcgcggccaccgcgaguccggcggcaagauguccgucgucccccagaacggcaagaucaucuccuccugggagcucuacaaguccgaguccgagaccggccucuga

SEQ ID NO: 127636 - RNA, 1575 nt, Artificial Sequence
  derived and/or modified CDS sequence (opt2) from glycoprotein__RABV__KJ174636.1
augaucccccaggcccuccucuucgucccccuccucauccccucccucugccucggcgaguuccccaucuacaccauccccgacaagcucggccccuggucccccaucgacauccaccaccucuccugccccaacaaccucgucgccgagaacgacggcugcaccucccucuccggcuucuccuacauggagcucaaggucggcuacaucuccgccaucaaggucaacggcuucaccugcaccggcgucgucaccgaggccgagaccuacaccaacuucgucggcuacgucaccaccaccuucaagcgcaagcacuuccgccccacccccgacgccugccgcgccgcccacgacuggaagauggccggcgacccccgcuacgaggccucccuccagaaccccuaccccgacuaccacuggcuccgcaccgucaagaccaucaaggagucccucgucaucaucucccccuccgucgccgaccucgaccccuacgacaagucccuccacucccgcgucuuccccuccggcaagugccucggcaucaccgucuccuccaccuacugcuccaccaaccacgacuacaccaucuggaugcccgucgagccccgccucggcaccuccugcgacaucuucaccaacucccgcggcaagcgcgccuccaagggcggccgcgucugcggcuucgucgacgagcgcggccucuacaagucccucaagggcgccugccgccucaagcucugcggcguccccggcauccgccuccucgacggcaccugggucuccauccagaccuccgaggacaucaaguggugcccccccgaccgccucgucaaccuccacgacuuccacuccgacgagaucgagcaccucgucgucgccgagcucaucaagcgccgcgagaacugccucgacgcccucgaguccaucaugaccaccaaguccgucuccuuccgccgccucucccaccuccgcaagcucguccccggcuucggcaaggccuacaccaucuucaacaagacccucauggaggccgacgcccacuacaaguccgucaagaccuggaacgaggucauccccuccaagggcugccucgaggucggcggccgcugccacccccacgucaacggcgucuucuucaacggcaucauccucggccccgacggcaacguccucauccccgagaugcaguccucccuccuccagcagcacauggagcuccucgaguccuccgucaucccccucaugcacccccucgccgaccccuccaccgucuucaaggagggcgacgaggccgaggacuucgucgagguccaccuccccgacguccacaagcaggucuccgacgucgaccucggccuccccuccuggggcaaguaccuccucaucuccgccggcgcccucaccauccucauccucgccaucguccucauccgcugcugccgccgcgucaacaagacccgcuccacccagcgcggccaccgcgaguccggcggcaagauguccgucgucccccagaacggcaagaucaucuccuccugggagcucuacaaguccgaguccgagaccggccucuga

SEQ ID NO: 127637 - RNA, 1575 nt, Artificial Sequence
  derived and/or modified CDS sequence (opt2) from glycoprotein__RABV__KJ174637.1
augaucccccaggcccuccucuucaugccccuccucauccccucccucugccucggcgaguuccccaucuacaccauccccgacaagcucggccccuggucccccaucgacauccaccaccucuccugccccaacaaccucgucgccgagaacgacggcugcaccucccucuccggcuucuccuacauggagcucaaggucggcuacaucuccgccaucaaggucaacggcuucaccugcaccggcgucgucaccgaggccgagaccuacaccaacuucgucggcuacgucaccaccaccuucaagcgcaagcacuuccgccccacccccgacgccugccgcgccgcccacgacuggaagauggccggcgacccccgcuacgaggccucccuccagaaccccuaccccgacuaccacuggcuccgcaccgucaagaccaccaaggagucccucgucaucaucucccccuccgucgccgaccucgaccccuacgacaagucccuccacucccgcgucuuccccuccggcaagugccucggcaucaccgucuccuccaccuacugcuccaccaaccacgacuacaccaucuggaugcccgucgagccccgccucggcaccuccugcgacaucuucaccaacucccgcggcaagcgcgccuccaagggcggccgcgucugcggcuucgucgacgagcgcggccucuacaagucccucaagggcgccugccgccucaagcucugcggcguccccggcauccgccuccucgacggcaccugggucuccauccagaccuccgaggacaucaaguggugcccccccgaccgccucgucaaccuccacgacuuccacuccgacgagaucgagcaccucgucgucgccgagcucaucaagcgccgcgagaacugccucgacgcccucgaguccaucaugaccaccaaguccgucuccuuccgccgccucucccaccuccgcaagcucguccccggcuucggcaaggccuacaccaucuucaacaagacccucauggaggccgacgcccacuacaaguccgucaagaccuggaacgaggucauccccuccaagggcugccucgaggucggcggccgcugccacccccacgucaacggcgucuucuucaacggcaucauccucggccccgacggcaacguccucauccccgagaugcaguccucccuccuccagcagcacauggagcuccucgaguccuccgucaucccccucaugcacccccucgccgaccccuccaccgucuucaaggagggcgacgaggccgaggacuucgucgagguccaccuccccgacguccacaagcaggucuccgacgucgaccucggccuccccuccuggggcaaguaccuccucaucuccgccggcgcccucgccauccucauccucgccaucguccucaucaucugcugccgccgcgucaacaagaccgucuccacccagcgcggccaccgcgaguccggcggcaagauguccgucgucccccagaacggcaagaucaucuccuccugggagcucuacaaguccgaguccgagaccggccucuga

SEQ ID NO: 127638 - RNA, 1575 nt, Artificial Sequence
  derived and/or modified CDS sequence (opt2) from glycoprotein__RABV__KJ174638.1
augaucccccaggcccuccucuucgucccccuccucauccccucccucugccucggcgaguuccccaucuacaccauccccgacaagcucggccccuggucccccaucgacauccaccaccucuccugccccaacaaccucgucgccgagaacgacggcugcaccucccucuccggcuucuccuacauggagcucaaggucggcuacaucuccgccaucaaggucaacggcuucaccugcaccggcgucgucaccgaggccgagaccuacaccaacuucgucggcuacgucaccaccaccuucaagcgcaagcacuuccgccccacccccgacgccugccgcgccgcccacgacuggaagauggccggcgacccccgcuacgaggccuccguccagaaccccuaccccgacuaccacuggcuccgcaccgucaagaccaccaaggagucccucgucaucaucucccccuccgucgccgaccucgaccccuacgacaagucccuccacucccgcgucuuccccuccggcaagugccucggcaucaccgucuccuccaccuacugcuccaccaaccacgacuacaccaucuggaugcccgucgagccccgccucggcaccuccugcgacaucuucaccaacucccgcggcaagcgcgccuccaagggcggccgcgucugcggcuucgucgacgagcgcggccucuacaagucccucaagggcgccugccgccucaagcucugcggcguccccggcauccgccuccucgacggcaccugggucuccauccagaccuccgaggacaucaaguggugcccccccgaccgccucgucaaccuccacgacuuccacuccgacgagaucgagcaccucgucgucgccgagcucaucaagcgccgcgagaacugccucgacgcccucgaguccaucaugaccaccaaguccgucuccuuccgccgccucucccaccuccgcaagcucguccccggcuucggcaaggccuacaccaucuucaacaagacccucauggaggccgacgcccacuacaaguccgucaagaccuggaacgaggucauccccuccaagggcugccucgaggucggcggccgcugccacccccacgucaacggcgucuucuucaacggcaucauccucggccccgacggcaacguccucauccccgagaugcaguccucccuccuccagcagcacauggagcuccucgaguccuccgucaucccccucaugcacccccucgccgaccccuccaccgucuucaaggagggcgacgaggccgaggacuucgucgagguccaccuccccgacguccacaagcaggucuccgacgucgaccucggccuccccuccuggggcaaguaccuccucaucuccgccggcgcccucgccauccucauccucgccaucguccucaucaucugcugccgccgcgucaacaagaccggcuccacccagcgcggccaccgcgaguccggcggcaagauguccgucgucccccagaacggcaagaucaucuccuccugggagcucuacaaguccgaguccgagaccggccucuga

SEQ ID NO: 127639 - RNA, 1575 nt, Artificial Sequence; identical to SEQ ID NO: 127457
  derived and/or modified CDS sequence (opt2) from glycoprotein__RABV__KJ174639.1

SEQ ID NO: 127640 - RNA, 1575 nt, Artificial Sequence
  derived and/or modified CDS sequence (opt2) from glycoprotein__RABV__KJ174640.1
augaucccccaggcccuccucuucgucccccuccucauccccucccucugccucggcgaguuccccaucuacaccauccccgacaagcucggccccuggucccccaucgacauccaccaccucuccugccccaacaaccucgucgccgagaacgacggcugcaccucccucuccggcuucuccuacauggagcucaaggucggcuacaucuccgccaucaaggucaacggcuucaccugcaccggcgucgucaccgaggccgagaccuacaccaacuucgucggcuacgucaccaccaccuucaagcgcaagcacuuccgccccacccccgacgccugccgcgccgcccacgacuggaagauggccggcgacccccgcuacgaggccucccuccagaaccccuaccccgacuaccacuggcuccgcaccgucaagaccaccaaggagucccucgucaucaucucccccuccgucgccgaccucgaccccuacgacaagucccuccacucccgcgucuuccccuccggcaagugccucggcaucaccgucuccuccaccuacugccccaccaaccacgacuacaccaucuggaugcccgucgagccccgccucggcaccuccugcgacaucuucaccaacucccgcggcaagcgcgccuccaagggcggccgcgucugcggcuucgucgacgagcgcggccucuacaagucccucaagggcgccugccgccucaagcucugcggcguccccggcauccgccuccucgacggcaccugggucuccauccagaccuccgaggacaucaaguggugcccccccgaccgccucgucaaccuccacgacuuccacuccgacgagaucgagcaccucgucgucgccgagcucaucaagcgccgcgagaacugccucgacgcccucgaguccaucaugaccaccaaguccgucuccuuccgccgccucucccaccuccgcaagcucguccccggcuucggcaaggccuacaccaucuucaacaagacccucauggaggccgacgcccacuacaaguccgucaagaccuggaacgaggucauccccuccaagggcugccucgaggucggcggccgcugccacccccacgucaacggcgucuucuucaacggcaucauccucggccccgacggcaacguccucauccccgagaugcaguccucccuccuccagcagcacauggagcuccucgaguccuccgucaucccccucaugcacccccucgccgaccccuccaccgucuucaaggagggcgacgaggccgaggacuucgucgagguccaccuccccgacguccacaagcaggucuucggcgucgaccucggccuccccuccuggggcaaguaccuccucaucuccgccggcgcccucgccauccucauccucgccaucguccucaucaucugcugccgccgcgucaacaagaccgaguccaccccccgcggccaccgcgaguccggcggcaagauguccgucgucccccagaacggcaagaucaucuccuccugggagcucuacaaguccgaguccgagaccggccucuga

SEQ ID NO: 127641 - RNA, 1575 nt, Artificial Sequence; identical to SEQ ID NO: 127284
  derived and/or modified CDS sequence (opt2) from glycoprotein__RABV__KJ174641.1

SEQ ID NO: 127642 - RNA, 1575 nt, Artificial Sequence
  derived and/or modified CDS sequence (opt2) from glycoprotein__RABV__KJ174642.1
auggucccccaggcccuccucuucgucccccuccucauccccucccucugccucggcgaguuccccaucuacaccauccccgacaagcucggccccuggacccccaucgacauccaccaccucuccugccccaacaaccucgucgccgagaacgacggcugcaccucccucuccggcuucuccuacauggagcucaaggucggcuacaucuccgccaucaaggucaacggcuucaccugcaccggcgucgucaccgaggccgagaccuacaccaacuucgucggcuacgucaccaccaccuucaagcgcaagcacuuccgccccaugcccgacgccugccgcgccgcccacgacuggaagauggccggcgacccccgcuacgaggacucccuccagaaccccuaccccgacuaccacuggcuccgcaccgucaagaccaccaaggagucccucgucaucaucucccccuccgucgccgaccucgaccccuacgacaagucccuccacucccgcgucuuccccuccggcaagugccucggcaucaccgucuccuccaccuacugcuccaccaaccacgacuacaccaucuggaugcccgucgagccccgccucggcaccuccugcgacaucuucaccaacucccgcggcaagcgcgccuccaagggcggccgcgucugcggcuucgucgacgagcgcggccucuacaagucccucaagggcgccugcaagcucaagcucugcggcguccccggcauccgccuccucgacggcaccugggucuccauccagaccuccgaggacaucaaguggugcccccccgaccgccucgucaaccuccacgacuuccacuccgacgagcucgagcaccucgucgucgaggagcucaucaagcgccgcgagaacugccucgacgcccucgaguccaucaugaccaccaaguccgucuccuuccgccgccucucccaccuccgcaagcucguccccggcuucggcaaggccuacaccaucuucaacaagacccucauggaggccgacgcccacuacaaguccgucaagaccuggaacgaggucauccccuccaagggcugccucgaggucggcggcaagugccacccccccgucaacggcgucuucuucaacggcaucauccucggccccgacggcaacguccucauccccgagaugcaguccucccuccuccagcagcacauggagcuccucgaguccuccgucaucccccucaugcacccccucgccgaccccuccaccgucuucaaggagggcgacgaggccgaggacuucgucgagguccaccuccccgacguccacaagcaggucuccgacgucgaccucggccuccccuccuggggcaaguaccuccucauguccgccggcgcccucgccauccucauccucgccaucguccucaucaucugcugccgccgcgucaacaagaccggcuccacccagcgcggccaccgcgagucccgcggcaagauguccgucuccccccagaacggcaagaucaucuccuccugggagcucuacaagcgcgaguccgagaccggccucuga

SEQ ID NO: 127643 - RNA, 1575 nt, Artificial Sequence
  derived and/or modified CDS sequence (opt2) from glycoprotein__RABV__KJ174643.1
augaucccccaggcccuccucuucgucccccuccucauccccucccucugccucggcgaguuccccaucuacaccauccccgacaagcucggccccuggacccccaucgacauccaccaccucuccugccccaacaaccucgucgccgagaacgacggcugcaccucccucuccggcuucuccuacauggagcucaaggucggcuacaucuccgccaucaaggucaacggcuucaccugcaccggcgucgucaccgaggccgagaccuacaccaacuucgucggcuacgucaccaccaccuucaagcgcaagcacuuccgccccaugcccgacgccugccgcgccgcccacgacuggaagauggccggcgacccccgcuacgaggacucccuccagaaccccuaccccgacuaccacuggcuccgcaccgucaagaccaccaaggagucccucgucaucaucucccccuccgucgccgaccucgaccccuacgacaagucccuccacucccgcgucuuccccuccggcaagugccucggcaucaccgucuccuccaccuacugcuccaccaaccacgacuacaccaucuggaugcccgucgagccccgccucggcaccuccugcgacaucuucaccaacucccgcggcaagcgcgccuccaagggcggccgcgucugcggcuucgucgacgagcgcggccucuacaagucccucaagggcgccugcaagcucaagcucugcggcguccccggcauccgccuccucgacggcaccugggucuccauccagaccuccgaggacaucaaguggugcccccccgaccgccucgucaaccuccacgacuuccacuccgacgagcucgagcaccucgucgucgaggagcucaucaagcgccgcgagaacugccucgacgcccucgaguccaucaugaccaccaaguccgucuccuuccgccgccucucccaccuccgcaagcucguccccggcuucggcaaggccuacaccaucuucaacaagacccucauggaggccgacgcccacuacaaguccgucaagaccuggaacgaggucauccccuccaagggcugccucgaggucggcggcaagugccacccccccgucaacggcgucuucuucaacggcaucauccucggccccgacggcaacguccucauccccgagaugcaguccucccuccuccagcagcacauggagcuccucgaguccuccgucaucccccucaugcacccccucgccgaccccuccaccgucuucaaggagggcgacgaggccgaggacuucgucgagguccaccuccccgacguccacaagcaggucuccgacgucgaccucggccuccccuccuggggcaaguaccuccucauguccgccggcgcccucgccauccucauccucgccaucguccucaucaucugcugccgccgcgucaacaagaccggcuccacccagcgcggccaccgcgagucccgcggcaagauguccgucgccccccagaacggcaagaucaucuccuccugggagcucuacaagcgcgaguccgagaccggccucuga

SEQ ID NO: 127644 - RNA, 1575 nt, Artificial Sequence; identical to SEQ ID NO: 127643
  derived and/or modified CDS sequence (opt2) from glycoprotein__RABV__KJ174644.1

SEQ ID NO: 127645 - RNA, 1575 nt, Artificial Sequence
  derived and/or modified CDS sequence (opt2) from glycoprotein__RABV__KJ174645.1
augaucccccaggcccuccucucccuccuccuccucaucuccucccucugccucggcaaguuccccaucuacaccauccccgacaagcucggccccuggucccccaucgacauccaccaccucuccugccccaacaaccucgucgucgaggacgagggcugcaccucccucuccggcuucuccuacauggagcucaaggucggcuacaucuccgccaucaaggucaacggcuucaccugcaccggcgucgucaccgaggccgagaccuacaccaacuucgucggcuacgucaccaccaccuucaagcgcaagcacuuccgccccaugcccgacgccugccgcgccgcccacgaguggaagauggccggcgacccccgcuacgaggacucccuccagaaccccuaccccgacuaccacuggcuccgcaccgucaagaccaccaaggagucccucaucaucaucucccccuccgucgccgaccucgaccccuacgacaagucccuccacucccgcgucuuccccggcggcaacugccucggcaucaccaucuccuccaccuacugcuccaccaaccacgacuacaccaucuggaugcccgaggaggcccgccucggcaccuccugcgacaucuucaccuccucccgcggcaagcgcgccuccaagggcggcaagaucugcggcuucgucgacgagcgcggccucuacaagucccucaagggcgccugcaagcucaagcucugcggcguccccggccuccgccucauggacggcaccugggucuccauccagaccuccgacgagaccaaguggugcccccccgaccagcucgucaacguccacgacuuccacuccgacgagaucgagcaccucaucgucgaggagcucgucaagaagcgcgaggagugccucgacgcccucgaguccaucaugaccaccaaguccgucuccuuccgccgccucucccaccuccgcaagcucguccccggcuucggcaaggccuacaccaucuucaacaagacccucauggaggccgacgcccacuacaaguccguccgcaccuggaacgagaucauccccuccaagggcugccucaaggucggcggcaugugccacccccacgucggcggcgucuucuucaacggcaucauccucggccccgacggcaccguccucauccccgagaugcaguccucccuccuccagcagcacauggagcuccucgaguccuccgucaucccccucaugcacccccucgccgaccccuccaccgucuucaaggagggcgacgaggccgaggacuucgucgagauccaccuccccgacguccacaagcagaucuccggcgucgaccucggccuccccuccuggggcaaguaccuccucaucuccgccggcgcccucgccacccucauccucaccaucuuccucaucaccugcugccgcaaggucaaccgcaccgaguccauccagcgcggccacggcgaguccgagcgcaaggucuccgucuccccccagaacggccgcgucaucuccuccugggagcucuacaaguccggcggcgagaccaaccucuga

SEQ ID NO: 127646 - RNA, 1575 nt, Artificial Sequence
  derived and/or modified CDS sequence (opt2) from glycoprotein__RABV__KJ174646.1
augaucccccaggcccuccucuucgucccccuccucauccccucccucugccucggcaaguuccccaucuacaccauccccgacaagcucggccccuggucccccaucgacauccaccaccucuccugccccaacaaccucgucgccgaggacgagggcugcaccucccucuccggcuucuccuacauggagcucaaggucggcuacaucuccgccaucaaggucaacggcuucaccugcaccggcgucgucaccgaggccgagaccuacaccaacuucgucggcuacgucaccaccaccuucaagcgcaagcacuuccgccccaugcccgacgccugccgcgccgcccacgacuggaagauggccggcgacccccgcuacgaggacucccuccagaaccccuaccccgacuaccacuggcuccgcaccgucaagaccaccaaggagucccucgucaucaucucccccuccgucgccgaccucgaccccuacgacaagucccuccacucccgcgucuuccccuccggcaagugccucggcaucaccgucuccuccaccuacugcuccaccaaccacgacuacaccaucuggaugcccgucgaggcccgccucggcaccuccugcgacaucuucaccaacuccaagggcaagaaggccuccaagggcggccgcaccugcggcuucgucgacgagcgcggccucuacaagucccucaagggcgccugcaagcucaagcucugcggcguccccggccuccgccucauggacggcaccugggucuccauccagaccuccgacgacaucaaguggugcccccccgaccagcucgucaaccuccacgacuuccacuccgacgagaucgagcaccucgucgucgaggagcucaucaagaagcgcgagggcugccucgacgcccucgaguccaucaugaccaccaaguccgucuccuuccgccgccucucccaccuccgcaagcucguccccggcuucggcaaggccuacaccaucuucaacaacacccucauggaggccgacgcccacuacaaguccguccgcaccuggaacgaggucauccccuccaagggcugccucaaggucggcggccgcugccacccccccgucaacggcgucuucuucaacggcaucauccucggccccgacggcaacguccucauccccgagaugcaguccucccuccuccagcagcacauggagcuccucgaguccuccgucaucccccucaugcacccccucgccgaccccuccaccgucuucaaggacggcgacgaggccgaggacuucgucgagguccaccuccccgacguccacaagcaggucuccgagaucgaccucggccuccccuccuggggcaaguaccuccucauguccgccggcguccucgccacccucauccucgccaucuuccucaucaccugcugccgccgcgccaaccgcaccgaguccacccagcgcggccgccgcgaguccggcggcaaggucuccgucgccccccagaacggcaaggucaucuccuccugggagcucuacaaguccgaguccgagaccggccucuga

SEQ ID NO: 127647 - RNA, 1575 nt, Artificial Sequence
  derived and/or modified CDS sequence (opt2) from glycoprotein__RABV__KJ174647.1
augaucccccaggcccuccucuucgucccccuccucauccccucccucugccucggcaaguuccccaucuacaccauccccgacaagcucggccccuggucccccaucgacauccaccaccucuccugccccaacaaccucgucgccgaggacgagggcugcaccucccucuccggcuucuccuacauggagcucaaggucggcuacaucuccgccaucaaggucaacggcuucaccugcaccggcgucgucaccgaggccgagaccuacaccaacuucgucggcuacgucaccaccaccuucaagcgcaagcacuuccgccccaugcccgacgccugccgcgccgcccacgacuggaagauggccggcgacccccgcuacgaggacucccuccagaaccccuaccccgacuaccacuggcuccgcaccgucaagaccaccaaggagucccucgucaucaucucccccuccgucgccgaccucgaccccuacgacaagucccuccacucccgcgucuuccccuccggcaagugccucggcaucaccgucuccuccaccuacugcuccaccaaccacgacuacaccaucuggaugcccgucgaggcccgccucggcaccuccugcgacaucuucaccaacuccaagggcaagaaggccuccaagggcggccgcaccugcggcuucgucgacgagcgcggccucuacaagucccucaagggcgccugcaagcucaagcucugcggcguccccggccuccgccucauggacggcaccugggucuccauccagaccuccgacgacaucaaguggugcccccccgaccagcucgucaaccuccacgacuuccacuccgacgagaucgagcaccucgucgucgaggagcucaucaagaagcgcgagggcugccucgacgcccucgaguccaucaugaccaccaaguccgucuccuuccgccgccucucccaccuccgcaagcucguccccggcuucggcaaggccuacaccaucuucaacaacacccucauggaggccgacgcccacuacaaguccguccgcaccuggaacgaggucauccccuccaagggcugccucaaggucggcggccgcugccacccccccgucaacggcgucuucuucaacggcaucauccucggccccgacggcaacguccucauccccgagaugcaguccucccuccuccagcagcacauggagcuccucgaguccuccgucaucccccucaugcacccccucgccgaccccuccaccgucuucaaggacggcgacgaggccgaggacuucgucgagguccaccuccccgacguccacaagcaggucuccgagaucgaccucggccuccccuccuggggcaaguaccuccucauguccgccggcguccucgccacccucauccucgccaucuuccucaucaccugcugccgccgcaccaaccgcaccgaguccacccagcgcggccgccgcgaguccggcggcaaggucuccgucgccccccagaacggcaagaucaucuccuccugggagcucuacaaguccgaguccgagaccggccucuga

SEQ ID NO: 127648 - RNA, 1575 nt, Artificial Sequence; identical to SEQ ID NO: 127319
  derived and/or modified CDS sequence (opt2) from glycoprotein__RABV__KJ174648.1

SEQ ID NO: 127649 - RNA, 1575 nt, Artificial Sequence; identical to SEQ ID NO: 127319
  derived and/or modified CDS sequence (opt2) from glycoprotein__RABV__KJ174649.1

SEQ ID NO: 127650 - RNA, 1575 nt, Artificial Sequence
  derived and/or modified CDS sequence (opt2) from glycoprotein__RABV__KJ174650.1
augauccuccaggcccuccucuucgucccccuccucaucuccccccucugccucggcaaguuccccaucuacaccauccccgacaagaucggccccuggucccccaucgacauccaccaccucuccugccccaacaaccucgucgucgaggacgagggcugcaccacccucuccggcuucuccuacauggagcucaaggucggcuacaucuccgccaucaaggucaacggcuucaccugcaccggcgucgucaccgaggccgagaccuacaccaacuucgucggcuacgucaccaccaccuucaagcgcaagcacuuccgccccacccccgacgccugccgcgccgccuacaacuggaagaucgccggcgacccccgcuacgaggacucccuccagaaccccuaccccgacuaccacuggcuccgcaccgucaagaccaccaaggagucccucaucaucaucucccccuccgucgccgaccucgaccccuacgacaagucccuccacucccgcgucuuccccuccggcaagugccucggcaucaccaucuccuccaccuacugcuccaccaaccacgacuacaccaucuggaugcccgaggaggcccgccucggcaccuccugcgacaucuucgccaacuccaagggcaagcgcgccuccaagggcggcaagaccugcggcuucgucgacgagcgcggccucuacaagucccuccgcggcgccugcaagcucaagcucugcggcguccccggccuccgccucauggacggcaccugggucuccauccagaccaccgacgagaccaaguggugcccccccgaccagcucgucaaccuccacgacuuccacuccgacgagaucgagcaccucgucgucgaggagcucgucaagaagcgcgaggagugccucgacgcccucgaguccaucaugaccaccaaguccgucuccuuccgccgccucucccaccuccgcaagcucguccccggcuucggcaaggccuacaccaucuucaacaagacccucauggaggccgacgcccacuacaaguccguccagaccuggaacgagaucauccccuccaagggcugccucaaggucggcggccgcugccacccccacgucgacggcgucuucuucaacggcaucauccucggccccgacggcaacguccucauccccgagaugcaguccucccuccuccagcagcacauggagcuccucgaguccuccgucaucccccucaugcacccccucgccgaccccuccaccgucuucaaggacggcgacgaggccgaggacuucgucgagguccaccuccccgacguccacaagcaggucuccggcgucgaccucggccuccccgacuggggcaaguaccuccucauguccgccggcgcccucgccacccuccuccucaccaucuuccucaugaccugcugccgcaaggucaacaagaccgaguccacccaccgcgaccccggcgaguccggccgcaaggucuccgucgccccccgcaacggcaaggucaucuccuccugggagcucuacaaguccggcggcgagacccgccucuga

SEQ ID NO: 127651 - RNA, 1575 nt, Artificial Sequence
  derived and/or modified CDS sequence (opt2) from glycoprotein__RABV__KJ174651.1
augauccuccaggcccuccucuucgucccccuccucaucuccccccucugccucggcaaguuccccaucuacaccauccccgacaagaucggccccuggucccccaucgacauccaccaccucuccugccccaacaaccucgucgucgaggacgagggcugcaccacccucuccggcuucuccuacauggagcucaaggucggcuacaucuccgccaucaaggucaacggcuucaccugcaccggcgucgucaccgaggccgagaccuacaccaacuucgucggcuacgucaccaccaccuucaagcgcaagcacuuccgccccacccccgacgccugccgcgccgccuacaacuggaagaucgccggcgacccccgcuacgaggacucccuccagaaccccuaccccgacuaccacuggcuccgcaccgucaagaccaccaaggagucccucaucaucaucucccccuccgucgccgaccucgaccccuacgacaagucccuccacucccgcgucuuccccuccggcaagugccucggcaucaccaucuccuccaccuacugcuccaccaaccacgacuacaccaucuggaugcccgaggaggcccgccucggcaccuccugcgacaucuucaccaacuccaagggcaagcgcgccuccaagggcggcaagaccugcggcuucgucgacgagcgcggccucuacaagucccuccgcggcgccugcaagcucaagcucugcggcguccccggccuccgccucauggacggcaccugggucuccauccagaccaccgacgacaccaaguggugcccccccgaccagcucgucaaccuccacgacuuccacuccgacgagaucgagcaccucgucgucgaggagcucgucaagaagcgcgaggagugccucgacgcccucgaguccaucaugaccaccaaguccgucuccuuccgccgccucucccaccuccgcaagcucguccccggcuucggcaaggccuacaccaucuucaacaagacccucauggaggccgacgcccacuacaaguccguccagaccuggaacgagaucauccccuccaagggcugccucaaggucggcggccgcugccacccccacgucgacggcgucuucuucaacggcaucauccucggccccgacggcaacguccucauccccgagaugcaguccucccuccuccagcagcacauggagcuccucgaguccuccgucaucccccucaugcacccccucgccgaccccuccaccgucuucaaggacggcgacgaggccgaggacuucgucgagauccaccuccccgacguccacaagcaggucuccggcgucgaccucggccuccccgacuggggcaaguaccuccucauguccgccggcgcccucgccacccuccuccucaccaucuuccucaugaccugcugccgcaaggucaacaagaccgaguccacccaccgcgaccccggcgaguccggccgcaaggucuccgucgccccccgcaacggcaaggucaucuccuccugggagcucuacaaguccggcggcgagacccgccucuga

SEQ ID NO: 127652 - RNA, 1575 nt, Artificial Sequence
  derived and/or modified CDS sequence (opt2) from glycoprotein__RABV__KJ174653.1
augaucccccaggcccuccucuucgucccccuccucaucuccucccucugcuucggcgaguuccccaucuacaccauccccgagaagcucggccccuggucccccaucgacauccaccaccucuccugccccaacaaccucgucgucgaggacgagggcugcaacucccucuccggcuucuccuacauggagcucaaggucggcuacaucuccuccaucaaggucaacggcuucaccugcaccggcgucgucaccgaggccgagaccuacaccaacuucgucggcuacgucaccaccaccuucaagcgcaagcacuuccgccccaugcccgacgccugccgcgccgccuacuccuggaagaucgccggcgacccccgcuacgaggagucccuccacaaccccuaccccgacuaccacuggcuccgcaccgucaagaccaccaaggagucccucgucaucaucucccccuccgucgccgaccucgaccccuacgacaagucccuccacucccgcgucuucuccggcggcaagugccucggcaucaccaucuccuccaccuacugcuccaccaaccacgacuacaccaucuggaugcccgaggaggcccgccucggcaccuccugcgacaucuucaccaacuccaagggcaagcgcgccuccaagggcggcaagaccugcggcuucgucgacgagcgcggccucuacaagucccucaagggcgccugcaagcucaagcucugcggcguccccggccuccgccucauggacggcaccugggucuccauccagaccuccgacgagaccaaguggugcccccccgaccagcucgucaacauccacgacuuccgcuccgacgagaucgagcaccucgucgucgaggagcucgucaagaagcgcgaggagugccucgacgcccucgaguccaucaugaccaccaaguccgucuccuuccgccgccucucccaccuccgcaagcucguccccggcuucggcaaggccuacaccaucuucaacaagacccucauggaggccgacgcccacuacaaguccguccgcaccuggaacgagaucauccccuccaagggcugccucuccgucggcggccgcugccacccccacgucaacggcgucuucuucaacggcaucaucaugggccccgacggcuccguccucauccccgagaugcaguccucccuccuccagcagcacauggagcuccucgaguccuccgucaucccccucaugcacccccucgccaaccccuccaccgucuucaaggacggcgacgaggccgaggacuucaucgagguccaccuccccgacguccaggagcaggucuccggcgucgaccucggccuccccaacuggggcaaguacguccucauguccgccggcgcccucgccauccucaugcucaccaucuuccucaugaccuucugccgccgcaccaaccgcaccaaguccauccagcagggccccggcgaguccggccgcaaggucuccguccccccccagaacggcaaggucaucuccuccugggaguccuucaaguccggcggcgagaccggccucuga

SEQ ID NO: 127653 - RNA, 1575 nt, Artificial Sequence; identical to SEQ ID NO: 127327
  derived and/or modified CDS sequence (opt2) from glycoprotein__RABV__KJ174654.1

SEQ ID NO: 127654 - RNA, 1575 nt, Artificial Sequence; identical to SEQ ID NO: 127370
  derived and/or modified CDS sequence (opt2) from glycoprotein__RABV__KJ174655.1

SEQ ID NO: 127655 - RNA, 1575 nt, Artificial Sequence
  derived and/or modified CDS sequence (opt2) from glycoprotein__RABV__KJ174656.1
augaucccccagacccuccucuucgucccccuccucauccuccccuccugccucggcaaguuccccaucuacaccauccccgacaagaucggccccuggucccccaucgacauccaccaccucuccugccccaacaaccucgucgucgaggacgagggcugcaccucccucuccggcuucuccuacauggagcucaaggucggcuacaucuccgccaucaaggucaacggcuucaccugcaccggcgucgucaccgaggccgagaccuacaccaacuucgucggcuacgucaccaccaccuucaagcgcaagcacuuccgccccacccccgacgccugccgcgccgccuacaacuggaagauggccggcgacccccgcuacgaggacucccuccagaaccccuaccccgacuaccacuggcuccgcaccgucaagaccaccaaggagucccucaucaucaucucccccuccgucgccgaccucgaccccuacgacaagucccuccacucccgcgucuuccccuccggcaagugccucggcaucaccgucuccuccaccuacugcuccaccaaccacgacuacaccaucuggaugcccgaggaggcccgccucggcaccuccugcgacaucuucaccaacuccaagggcaagcgcgccuccaagggcggcaagaccugcggcuucgucgacgagcgcggccucuacaagucccuccgcggcgccugcaagcucaagcucugcggcguccccggccuccgccucauggacggcaccugggucuccauccagaccaccgacgagaccaaguggugccccuccgaccagcucgucaaccuccacgacuuccacuccgacgagaucgagcaccucgucgucgaggagcucgucaagaagcgcgaggagugccucgacgcccucgaguccaucaugaccaccaaguccgucuccuuccgccgccucucccaccuccgcaagcucguccccggcuucggcaaggccuacaccaucuucaacaagacccucauggaggccgacgcccacuacaaguccguccagaccuggaacgagaucauccccuccaagggcugccucaaggucggcggccgcugccacccccacgucgacggcgucuucuucaacggcaucauccucggccccgacggcaacguccucauccccgagaugcaguccucccuccuccagcagcacauggagcuccucgaguccuccgucaucccccucaugcacccccucgccgaccccuccaccgucuucaaggacggcgacgaggccgaggacuucgucgagguccaccuccccgacguccacaagcaggucuccggcgucgaccucggccuccccgacuggggcaaguaccuccucauguccgccggcgcccucgccacccuccuccucaccaucuuccucaugaccugcugccgcaaggucaacaagaccgaguccacccagcgcgacuccggcgaguccggccgcaaggucuccaucgccccccgcaacggcaaggucaucuccuccugggagcucuacaaguccggcggcgacacccgccucuga

SEQ ID NO: 127656 - RNA, 1575 nt, Artificial Sequence; identical to SEQ ID NO: 127655
  derived and/or modified CDS sequence (opt2) from glycoprotein__RABV__KJ174657.1

SEQ ID NO: 127657 - RNA, 1575 nt, Artificial Sequence
  derived and/or modified CDS sequence (opt2) from glycoprotein__RABV__KJ174658.1
augaucucccagacccuccucuucgucacccuccucaucuccucccucugcuucggcgaguuccccaucuacaccauccccgagaagcucggccccuggucccccaucgacauccaccaccucuccugccccaacaaccucgucgucgaggacgagggcugcaacucccucuccggcuucuccuacauggagcucaaggucggcuacaucuccuccaucaaggucaacggcuucaccugcaccggcgucgucaccgaggccgagaccuacaccaacuucgucggcuacgucaccaccaccuucaagcgcaagcacuuccgccccaugcccgacgccugccgcgccgccuacaacuggaagauguccggcgacccccgcuacgaggagucccuccacaaccccuaccccgacuaccacuggcuccgcaccgucaagaccaccaaggagucccucgucaucaucucccccuccgucgccgaccucgaccccuacgacaagucccuccacucccgcgucuucuccggcggcaagugccucggcaucaccaucuccuccaccuacugcuccaccaaccacgacuacacccucuggaugcccgaggaggcccgccucggcaccuccugcgacaucuucaccaacuccaagggcaagcgcgccuccaagggcggccgcaccugcggcuucgucgacgagcgcggccucuacaagucccucaagggcgccugcaagcucaagcucugcggcguccccggccuccgccucauggacggcaccugggucuccauccagaccuccgacgagaccaaguggugcccccccgaccagcucgucaacauccacgacuuccgcuccgacgagaucgagcaccucgucgucgaggagcucgucaagaagcgcgaggagugccucgacgcccucgaguccaucaugaccaccaaguccgucuccuuccgccgccucucccaccuccgcaagcucguccccggcuucggcaaggccuacaccaucuucaacaagacccucauggaggccgacgcccacuacaaguccguccgcaccuggaacgaggucauccccuccaagggcugccucuccgucggcggccgcugccacccccacgucgacggcgucuucuucaacggcaucauccucggccccgacggcuccguccucauccccgagaugcaguccucccuccuccagcagcacauggagcuccucgaguccuccgucaucccccucaugcacccccucgccaaccccuccaccgucuucaaggacggcgacgaggccgaggacuucgucgagguccaccuccccgacguccaggagcaggucuccggcgucgaccucggccuccccaacuggggcaaguacguccucauguccgccggcgcccucgccauccuccuccucaccaucuuccucaugaccugcugccgccgcgccaaccgcaccaaguccauccgccagggccccgaggaguccggccgccgcgucuccguccccccccagaacggcaaggucaucuccuccugggaguccuucaaguccggcggcgagaccggccucuga

SEQ ID NO: 127658 - RNA, 1575 nt, Artificial Sequence
  derived and/or modified CDS sequence (opt2) from glycoprotein__RABV__KJ174659.1
augaucucccagacccuccucuucgucccccuccucaucuccucccucugccucggcgaguuccccaucuacaccauccccgagaagcucggccccuggucccccaucgacauccaccaccucuccugccccaacaaccucgucgucgaggacgagggcugcaacucccucuccggcuucuccuacauggagcucaaggucggcuacaucuccuccaucaaggucaacggcuucaccugcaccggcgucgucaccgaggccgagaccuacaccaacuucgucggcuacgucaccaccaccuucaagcgcaagcacuuccgccccaugcccgacgccugccgcgccgccuacaacuggaagauguccggcgacccccgcuacgaggagucccuccacaaccccuaccccgacuaccacuggcuccgcaccgucaagaccaccaaggagucccucgucaucaucucccccuccgucgccgaccucgaccccuacgacaagucccuccacucccgcgucuucuccggcggcaagugccucggcaucaccaucuccuccaccuacugcuccaccaaccacgacuacacccucuggaugcccgaggaggcccgccucggcaccuccugcgacaucuucaccaacuccaagggcaagcgcgccuccaagggcggcaagaccugcggcuucgucgacgagcgcggccucuacaagucccucaagggcgccugcaagcucaagcucugcggcguccccggccuccgccucauggacggcaccugggucuccauccagaccuccgacgagaccaaguggugcccccccgaccagcucgucaacauccacgacuuccacuccgacgagaucgagcaccucgucgucgaggagcucgucaagaagcgcgaggagugccucgacgcccucgaguccaucaugaccaccaaguccgucuccuuccgccgccucucccaccuccgcaagcucguccccggcuucggcaaggccuacaccaucuucaacaagacccucauggaggccgacgcccacuacaaguccguccgcaccuggaacgaggucauccccuccaagggcugccucuccgucggcggccgcugccacccccacgucgacggcgucuucuucaacggcaucauccucggccccgacggcuccguccucauccccgagaugcaguccucccuccuccagcagcacauggagcuccucgaguccuccgucaucccccucaugcacccccucgccaaccccuccaccgucuucaaggacggcgacgaggccgaggacuucgucgagguccaccuccccgacguccaggagcaggucuccggcgucgaccucggccuccccaacuggggcaaguacguccucauguccgccggcgcccucgccauccuccuccucaccaucuuccucaugaccugcugccgccgcgccaaccgcaccaaguccauccgccgcggccccgaggaguccggccgcaaggucuccguccccccccagaacggcaaggucaucuccuccugggaguccuucaaguccggcggcgagacccgccucuga

SEQ ID NO: 127659 - RNA, 1575 nt, Artificial Sequence
  derived and/or modified CDS sequence (opt2) from glycoprotein__RABV__KJ174660.1
augaucccccaggcccuccucuucgucccccuccucaucuccucccucugccucggcaaguuccccaucuacaccauccccgagaagcucggccccuggucccccaucgacauccaccaccucggcugccccaacaaccucgucgucgaggacgagggcugcgacucccucuccggcuucuccuacauggagcucaaggucggcuacaucuccgccaucaaggucaacggcuucaccugcaccggcgucgucaccgaggccgagaccuacaccaacuucgucggcuacgucaccaccaccuucaagcgcaagcacuuccgccccaugcccgacgccugccgcgccgccuacaacuggaagaccgccggcgacccccgcuacgaggagucccuccacaaccccuaccccgacuaccacuggcuccgcaccgucaagaccaccaaggagucccucaucaucaucucccccuccgucgccgaccucgaccccuacgacaagucccuccacucccgcgucuuccccggcggcaagugccucggcaucaccgucuccuccaccuacugcuccaccaaccacgacuacaccaucuggaugcccgaggagacccgccucggcaccuccugcgacaucuucaccaacucccgcggcaagcgcgccuccaagggcggcaagaccugcggcuucgucgacgagcgcggccucuacaagucccucaagggcgccugcaagcucaagcucugcggcguccccggccuccgccucauggacggcaccugggucuccauccagacccccgacgagaccaaguggugcucccccgaccagcucgucaaccuccacgacuuccacuccgacgagaucgagcaccucgucgucgaggagcucgucaagaagcgcgaggagugccucgacgcccucgaguccaucaugaccaccaaguccgucuccuuccgccgccucucccaccuccgcaagcucguccccggcuucggcaaggccuacaccaucuucaacaagacccucauggaggccgacgcccacuacaaguccguccgcaccugggacgagaucauccccuccaagggcugccuccgcgucggcggccgcugccacccccacgucaacggcgucuucuucaacggcaucauccucggccccgacggccacguccucauccccgagaugcaguccucccuccuccagcagcacauggagcuccucgaguccuccgucaucccccucaugcaccccgucgccaaccccuccaccgucuucaaggacggcgacgaggccgaggacuucgucgagguccaccuccccgacguccacgagcaggucuccggcgucgaccucggccuccccaacuggggcaaguacaugcucauguccgccggcgcccucgccaccaucauccucaccaucuuccucaucgccugcugccgccgcgucaaccgcaaggagucccgccagcagggccucggcgaguccggccgcaaggucuccgucaccccccagaacggcaagguccucuccuccugggagugguacaaguccggcggcgagacccgccucuga

SEQ ID NO: 127660 - RNA, 1575 nt, Artificial Sequence
  derived and/or modified CDS sequence (opt2) from glycoprotein__RABV__KJ174661.1
augaucccccaggcccuccuccuccucccccucaugaucuccucccucugccucggcaaguuccccaucuacaccauccccgacaagcucggccccuggucccccaucgacauccaccaccucuccugccccaacaaccucgucgucgaggacgagggcugcaccucccucuccggcuucuccuacauggagcucaaggucggcuacaucuccgccaucaaggucaacggcuucaccugcaccggcgucgucaccgaggccgagaccuacaccaacuucgucggcuacgucaccaccaccuucaagcgcaagcacuuccgccccaugcccgacgccugccgcgccgccuacaacuggaaggucgccggcgacccccgcuacgaggagucccuccagaaccccuaccccgacuaccacuggcuccgcaccgucaagaccaccaaggagucccucaucaucaucucccccuccgucgccgaccucgaccccuacgacaagucccuccgcucccgcaucuuccccggcggcaagugccucggcaucaccgucuccuccaccuacugcuccaccaaccacgacuacaccaucuggaugcccgaggaggcccgccucggcaccuccugcgacaucuucaccaacuccaagggcaagcgcgccuccaagggcggcaagaucugcggcuucgucgacgagcgcggccucuacaagucccucaagggcgccugcaagcucaagcucugcggcgucuccggccuccgccucauggacggcaccugggucgccauccagaccuccgaggagaccaaguggugccccuccgaccagcucgucaaccuccacgacuuccacuccgacgagaucgagcaccucgucgucgaggagcucgucaagaagcgcgaggagugccucgacgcccucgaguccaucaugaccaccaaguccgucuccuuccgccgccucucccaccuccgcaagcucguccccggcuucggcaaggccuacaccaucuucaacaagacccucauggaggccgacgcccacuacaacuccguccgcaccuggaacgagaucauccccuccaagggcugccucaaggucggcggccgcugccacccccacgucgacggcgucuucuucaacggcaucauccucggccccgacggcaacguccucauccccgagaugcaguccucccuccuccagcagcacauggagcuccucgaguccuccgucaucccccucaugcacccccucgccgaccccuccaccgucuucaaggagggcgacgaggccgagaacuucgucgagguccaccuccccgacauccacaagcaggucuccggcaucgaccucggccuccccaacuggggcaaguaccuccucauguccgccggcgcccucgccgcccucauccucaccaucuuccucaucaccugcugccgccgcgucaacaccaccaaguccaucaagcagggccccgaggagucccgccgcaaggucuccgucaccccccaguccggccgcgucgucuccuccugggagcucuacaagaagggcggcgagaccaagcucuga

SEQ ID NO: 127661 - RNA, 1575 nt, Artificial Sequence
  derived and/or modified CDS sequence (opt2) from glycoprotein__RABV__KJ174662.1
augaucccccaggcccuccuccuccucccccucaugaucuccucccucugccucggcaaguuccccaucuacaccauccccgacaagcucggccccuggucccccaucgacauccaccaccucuccugccccaacaaccucgucgucgaggacgagggcugcaccucccucuccggcuucuccuacauggagcucaaggucggcuacaucuccgccaucaaggucaacggcuucaccugcaccggcgucgucaccgaggccgagaccuacaccaacuucgucggcuacgucaccaccaccuucaagcgcaagcacuuccgccccaugcccgacgccugccgcgccgccuacaacuggaaggucgccggcgacccccgcuacgaggagucccuccagaaccccuaccccgacuaccacuggcuccgcaccgucaagaccaccaaggagucccucaucaucaucucccccuccgucgccgaccucgaccccuacgacaagucccuccgcucccgcaucuuccccggcggcaagugccucggcaucaccgucuccuccaccuacugcuccaccaaccacgacuacaccaucuggaugcccgaggaggcccgccucggcaccuccugcgacaucuucaccaacuccaagggcaagcgcgccuccaagggcggcaagaucugcggcuucgucgacgagcgcggccucuacaagucccucaagggcgccugcaagcucaagcucugcggcgucuccggccuccgccucauggacggcaccugggucgccauccagaccuccgaggagaccaaguggugccccuccgaccagcucgucaaccuccacgacuuccacuccgacgagaucgagcaccucgucgucgaggagcucgucaagaagcgcgaggagugccucgacgcccucgaguccaucaugaccaccaaguccgucuccuuccgccgccucucccaccuccgcaagcucguccccggcuucggcaaggccuacaccaucuucaacaagacccucauggaggccgacgcccacuacaacuccguccgcaccuggaacgagaucauccccuccaagggcugccucaaggucggcggccgcugccacccccacgucgacggcgucuucuucaacggcaucauccucggccccgacggcaacguccucauccccgagaugcaguccucccuccuccagcagcacauggagcuccucgaguccuccgucaucccccucaugcacccccucgccgaccccuccaccgucuucaaggagggcgacgaggccgagaacuucgucgagguccaccuccccgacauccacaagcaggucuccggcaucgaccucggccuccccaacuggggcaaguaccuccucauguccgccggcgcccucgccgcccucaugcucaccaucuuccucaucaccugcugccgccgcgucaacaccaccaaguccaucaagcagggccccgaggagucccgccgcaaggucuccgucaccccccaguccggccgcgucgucuccuccugggagcucuacaagaagggcggcgagacccgccucuga

SEQ ID NO: 127662 - RNA, 1575 nt, Artificial Sequence
  derived and/or modified CDS sequence (opt2) from glycoprotein__RABV__KJ174663.1
augaucccccaggccauccucuccgucccccuccucaucuccucccucugcuucggcaaguuccccaucuacaccauccccgagaagcucggccccuggucccccaucgacauccaccaccucuccugccccaacaaccucgucgucgaggacgagggcugcaccacccucuccggcuucuccuacaucgagcucaaggucggcuacaucuccgccaucaaggucaacggcuucaccugcaccggcgucgucaccgaggccgagaccuacaccaacuucgucggcuacgucaccaccaccuucaagcgcaagcacuuccgccccaugcccgacgccugccgcgccgccuacaacuggaagaucgccggcgacccccgcuacgaggagucccuccacaaccccuaccccgacuaccacuggcuccgcaccgucaagaccaccaaggagucccucgucaucaucucccccuccgucgccgaccucgaccccuacgacaagucccuccacucccgcgucuuccccggcggcaagugccucggcaucaccaucuccuccaccuacugcuccaccaaccacgacuacaccaucuggaugcccgaggaggcccgccucggcaccuccugcgacaucuucaccaacucccgcggcaagcgcgccuccaagggcggccgcaccugcggcuucgucgacgagcgcggccucuacaagucccucaagggcgccugcaagcucaagcucugcggcguccccggccuccgccucauggacggcaccugggucuccauccaggccuccgacgagaccaaguggugcucccccgaccagcucgucaacguccacgacuuccacuccgacgagaucgagcaccucgucgucgaggagcucgucaagcgccgcgaggagugccucgacgcccucgaguccaucgucaccaccaaguccaucuccuuccgccgccucucccaccuccgcaagcucguccccggcuucggcaaggccuacaccaucuucaacaagacccucauggaggccgacgcccacuacaaguccguccgcaccuggaacgagaucauccccuccaagggcugccucuccgucggcggccgcugccacccccacgucaacggcgucuucuucaacggcaucauccucggccccgacggcaacguccucauccccgagaugcaguccucccuccuccagcagcacauggagcuccucgaguccuccgucaucccccucaugcacccccucgccgaccccuccaccgucuucaaggacggcgacgaggccgaggacuucgucgagguccaccuccccgacguccaggagcaggucuccggcgucgaccucggccuccccaacuggggcaaguacguccucauguccgccggcgcccucgccauccucauccucaccaucuuccucaucaccugcugccgccgcgccaacaagaccaaguccacccagcagggccucggcggcuccggccgcaaggucuccgucuccccccagaacggcaaggucaucuccuccugggaguccuacaagaacggcggcgagacccgccucuga

SEQ ID NO: 127663 - RNA, 1575 nt, Artificial Sequence
  derived and/or modified CDS sequence (opt2) from glycoprotein__RABV__KJ174664.1
augaucccccaggccauccucuccgucccccuccucaucuccucccucugcuucggcaaguuccccaucuacaccauccccgagaagcucggccccuggucccccaucgacauccaccaccucuccugccccaacaaccucgucgucgaggacgagggcugcaccacccucuccggcuucuccuacaucgagcucaaggucggcuacaucuccgccaucaaggucaacggcuucaccugcaccggcgucgucaccgaggccgagaccuacaccaacuucgucggcuacgucaccaccaccuucaagcgcaagcacuuccgccccaugcccgacgccugccgcgccgccuacaacuggaagaucgccggcgacccccgcuacgaggagucccuccacaaccccuaccccgacuaccacuggcuccgcaccgucaagaccaccaaggagucccucgucaucaucucccccuccgucgccgaccucgaccccuacgacaagucccuccacucccgcgucuuccccggcggcaagugccucggcaucaccaucuccuccaccuacugcuccaccaaccacgacuacaccaucuggaugcccgaggaggcccgccucggcaccuccugcgacaucuucaccaacucccgcggcaagcgcgccuccaagggcggccgcaccugcggcuucgucgacgagcgcggccucuacaagucccucaagggcgccugcaagcucaagcucugcggcguccccggccuccgccucauggacggcaccugggucuccauccaggccuccgacgagaccaaguggugcucccccgaccagcucgucaacguccacgacuuccacuccgacgagaucgagcaccucgucgucgaggagcucgucaagcgccgcgaggagugccucgacgcccucgaguccaucgucaccaccaaguccgucuccuuccgccgccucucccaccuccgcaagcucguccccggcuucggcaaggccuacaccaucuucaacaagacccucauggaggccgacgcccacuacaaguccguccgcaccuggaacgagaucauccccuccaagggcugccucuccgucggcggccgcugccacccccacgucaacggcgucuucuucaacggcaucauccucggccccgacggcaacguccucauccccgagaugcaguccucccuccuccagcagcacauggagcuccucgaguccuccgucaucccccucaugcacccccucgccgaccccuccaccgucuucaaggacggcgacgaggccgaggacuucgucgagguccaccuccccgacguccaggagcaggucuccggcgucgaccucggccuccccaacuggggcaaguacaugcucauguccgccggcgcccucgccauccucauccucaccaucuuccucaucaccugcugccgccgcgccaacaagaccaaguccacccagcagggccucggcggcuccggccgcaaggucuccgucuccccccagaacggcaaggucaucuccuccugggaguccuacaagaacggcggcgagacccgccucuga

SEQ ID NO: 127664 - RNA, 1575 nt, Artificial Sequence
  derived and/or modified CDS sequence (opt2) from glycoprotein__RABV__KJ174665.1
augaucccccaggccauccucuccgucccccuccucaucuccucccucugcuucggcaaguuccccaucuacaccauccccgagaagcucggccccuggucccccaucgacauccaccaccucuccugccccaacaaccucgucgucgaggacgagggcugcaccacccucuccggcuucuccuacaucgagcucaaggucggcuacaucuccgccaucaaggucaacggcuucaccugcaccggcgucgucaccgaggccgagaccuacaccaacuucgucggcuacgucaccaccaccuucaagcgcaagcacuuccgccccaugcccgacgccugccgcgccgccuacaacuggaagaucgccggcgacccccgcuacgaggagucccuccacaaccccuaccccgacuaccacuggcuccgcaccgucaagaccaccaaggagucccucgucaucaucucccccuccgucgccgaccucgaccccuacgacaagucccuccacucccgcgucuuccccggcggcaagugccucggcaucaccaucuccuccaccuacugcuccaccaaccacgacuacaccaucuggaugcccgaggaggcccgccucggcaccuccugcgacaucuucaccaacucccgcggcaagcgcgccuccaagggcggccgcaccugcggcuucgucgacgagcgcggccucuacaagucccucaagggcgccugcaagcucaagcucugcggcguccccggccuccgccucauggacggcaccugggucuccauccaggccuccgacgagaccaaguggugcucccccgaccagcucgucaacguccacgacuuccacuccgacgagaucgagcaccucgucgucgaggagcucgucaagcgccgcgaggagugccucgacgcccucgaguccaucgucaccaccaaguccaucuccuuccgccgccucucccaccuccgcaagcucguccccggcuucggcaaggccuacaccaucuucaacaagacccucauggaggccgacgcccacuacaaguccguccgcaccuggaacgagaucauccccuccaagggcugccucuccgucggcggccgcugccacccccacgucaacggcgucuucuucaacggcaucauccucggccccgacggcaacguccucauccccgagaugcaguccucccuccuccagcagcacauggagcuccucgaguccuccgucaucccccucaugcacccccucgccgaccccuccaccgucuucaaggacggcgacgaggccgaggacuucgucgagguccaccuccccgacguccaggagcaggucuccggcgucgaccucggccuccccaacuggggcaaguacguccucauguccgccggcgcccucgccauccucauccucaccaucuuccucaucaccugcugccgccgcgccaacaagaucaaguccacccgccagggccucggcggcuccggccgcaaggucuccgucuccccccagaacggcaaggucaucuccuccugggaguccuacaagaacggcggcgagacccgccucuga

SEQ ID NO: 127665 - RNA, 1575 nt, Artificial Sequence
  derived and/or modified CDS sequence (opt2) from glycoprotein__RABV__KJ174666.1
augaucccccaggcccuccucuucgucccccuccucauccccucccucugccucggcaaguuccccaucuacaccauccccgacaagcucggccccuggucccccaucgacauccaccaccucuccugccccaacaaccucgucgucgaggacgagggcugcaccucccucuccggcuucuccuacauggagcucaaggucggcuacaucuccgccaucaaggucaacggcuucaccugcaccggcgucgucaccgaggccgagaccuacaccaacuucgucggcuacgucaccaccaccuucaagcgcaagcacuuccgccccaugcccgacgccugccgcgccgcccacgacuggaagaucgccggcgacccccgcuacgaggacucccuccagaaccccuaccccgacuaccacuggcuccgcaccgucaagaccaccaaggagucccucgucaucaucucccccuccgucgccgagcucgaccccuacgacaagucccuccacucccgcgucuuccccuccggcaagugccucggcaucaccgucuccuccaccuacugcuccaccaaccacgacuacaccaucuggaugcccgucgaggcccgccucggcaccuccugcgacaucuucaccaacucccgcggcaagaaggccuccaagggcggccgcaccugcggcuucgucgacgagcgcggccucuacaagucccucaagggcgccugcaagcucaagcucugcggcguccccggccuccgccucauggacggcaccugggucuccauccagaccuccgacgacaucaaguggugcccccccgaccagcucgucaaccuccacgacuuccacuccgacgagaucgagcaccucgucgucgaggagcucaucaagaagcgcgagggcugccucgacgcccucgaguccaucaugaccaccaaguccgucuccuuccgccgccucucccaccuccgcaagcucguccccggcuucggcaaggccuacaccaucuucaacaacacccucauggaggccgacgcccacuacaaguccguccgcaccuggaacgaggucauccccuccaagggcugccucaaggucggcggccgcugccacccccccgucaacggcgucuucuucaacggcaucauccucggccccgacggcaagguccucauccccgagaugcaguccucccuccuccagcagcacauggagcuccucgaguccuccgucaucccccucaugcacccccucgccgaccccuccaccgucuucaaggacggcgacgaggccgaggacuucgucgagguccaccuccccgacguccacaagcaggucuccgacgucgaccucggccuccccuccuggggcaaguaccuccucauguccgccggcgcccucgccacccucauccucgccaucuuccucaucaccugcugccgccgcgccaaccgcaccgaguccacccagcgcggccaccgcgaguccggcggcaagauguccgucgccccccagaacggcaagaucaucuccuccugggagcucuacaaguccgaguccgagaccggcauguga

SEQ ID NO: 127666 - RNA, 1575 nt, Artificial Sequence
  derived and/or modified CDS sequence (opt2) from glycoprotein__RABV__KJ174667.1
augaucuuccaggcccuccucuucgucccccuccucaucuccucccucugccucggcaaguuccccaucuacaccauccccgacaagcucggccccuggucccccaucgacauccaccaccucuccugccccaacaaccucgucgucgaggacgagggcugcaccucccucuccggcuucuccuacauggagcucaaggucggcuacaucuccgccaucaaggucaacggcuucaccugcaccggcgucgucaccgaggccgagaccuacaccaacuucgucggcuacgucaccaccaccuucaagcgcaagcacuuccgccccauccccgacgccugccgcgccgccuacaacuggaagaucgccggcgacccccgcuacgaggagucccuccagaaccccuaccccgacuaccacuggcuccgcaccgucaagaccaccaaggagucccucaucaucaucucccccuccgucgccgaccucgaccccuacgacaagucccuccacucccgccucuuccccggcggcaagugccucggcaucaccaucuccuccaccuacugcuccaccaaccacgacuacaccaucuggaugcccgaggagccccgccucggcaccuccugcgacaucuucaccaacuccaagggcaagaaggccuccaagggcggcaaggucugcggcuucgucgacgagcgcggccucuacaagucccucaagggcgccugcaagcucaagcucugcggcgucuccggccuccgccucauggacggcaccugggucaccauccagaccuccgacgagaccaaguggugcccccccgaccagcucgucaaccuccacgacuuccacuccgacgagaucgagcaccucgucgucgaggagcucgucaagaagcgcgaggagugccucgacgcccucgaguccaucaugaccaccaaguccgucuccuuccgccgccucuccuaccuccgcaagcucguccccggcuucggcaaggccuacaccaucuucaacaagacccucauggaggccgacgcccacuacaaguccguccgcaccuggaacgagaucauccccuccaagggcugccucaaggucuccgaccgcugccacccccacgucgacggcgucuucuucaacggcaucauccucggccccgacggcaacguccucauccccgagaugcaguccucccuccuccagcagcacauggagcuccucgaguccuccgucaucccccucaugcacccccucgccgaccccuccaccgucuucaaggacggcgacgaggccgaggacuucgucgagguccaccuccccgacguccacaagcagaucuccggcgucgaccucggccuccccuccuggggcaaguaccuccucaugaucgccggcggccucgccacccucguccucaucaucuuccucauggccugcugccgccgcaccaagcgcaccgagccccgccgccgcggcuccggcgaguccggcgagaagguccucgccaccccccagcccaagaaggucgucuccuccugggagcucuacaagcgcgagggcgacgcccgccucuga

SEQ ID NO: 127667 - RNA, 1575 nt, Artificial Sequence
  derived and/or modified CDS sequence (opt2) from glycoprotein__RABV__KJ174668.1
augaucuuccaggcccuccucuucgucccccuccucaucuccucccucugccucggcaaguuccccaucuacaccauccccgacaagaucggccccuggucccccaucgacauccaccaccucuccugccccaacaaccucgucgucgaggacgagggcugcaccucccucuccggcuucuccuacauggagcucaaggucggcuacaucuccgccaucaaggucaacggcuucaccugcaccggcgucgucaccgaggccgagaccuacaccaacuucgucggcuacgucaccaccaccuucaagcgcaagcacuuccgccccauccccgacgccugccgcgccgccuacaacuggaagaucgccggcgacccccgcuacgaggagucccuccagaaccccuaccccgacuaccacuggcuccgcaccgucaagaccaccaaggagucccucaucaucaucucccccuccgucgccgaccucgaccccuacgacaagucccuccacucccgccucuuccccggcggcaagugccucggcaucaccaucuccuccaccuacugcuccaccaaccacgacuacaccaucuggaugcccgaggagccccgccucggcaccuccugcgacaucuucaccaacuccaagggcaagaaggccuccaagggcggcaaggucugcggcuucgucgacgagcgcggccucuacaagucccucaagggcgccugcaagcucaagcucugcggcgucuccggccuccgccucauggacggcaccugggucaccauccagaccuccgacgagaccaaguggugcccccccgaccagcucgucaaccuccacgacuuccacuccgacgagaucgagcaccucgucgucgaggagcucgucaagaagcgcgaggagugccucgacgcccucgaguccaucaugaccaccaaguccgucuccuuccgccgccucuccuaccuccgcaagcucguccccggcuucggcaaggccuacaccaucuucaacaagacccucauggaggccgacgcccacuacaaguccguccgcaccuggaacgagaucauccccuccaagggcugccucaaggucuccgaccgcugccacccccacgucgacggcgucuucuucaacggcaucauccucggccccgacggcaacguccucauccccgagaugcaguccucccuccuccagcagcacauggagcuccucgaguccuccgucaucccccucaugcacccccucgccgaccccuccaccgucuucaaggacggcgacgaggccgaggacuucgucgagguccaccuccccgacguccacaagcagaucuccggcgucgaccucggccuccccuccuggggcaaguaccuccucaugaucgccggcggccucgccacccucguccucaucaucuuccucauggccugcugccgccgcaccaagcgcaccgagucccgccgccgcggcuccggcgaguccggcgagaagguccucgccaccccccagcccaagaaggucgucuccuccugggagcucuacaagcgcgagggcgacgcccgccucuga

SEQ ID NO: 127668 - RNA, 1575 nt, Artificial Sequence
  derived and/or modified CDS sequence (opt2) from glycoprotein__RABV__KJ174669.1
augaucuuccaggcccuccucuucgucccccuccucaucuccucccucugccucggcaaguuccccaucuacaccauccccgacaagaucggccccuggucccccaucgacauccaccaccucuccugccccaacaaccucgucgucgaggacgagggcugcaccucccucuccggcuucuccuacauggagcucaaggucggcuacaucuccgccaucaaggucaacggcuucaccugcaccggcgucgucaccgaggccgagaccuacaccaacuucgucggcuacgucaccaccaccuucaagcgcaagcacuuccgccccauccccgacgccugccgcgccgccuacaacuggaagaucgccggcgacccccgcuacgaggagucccuccagaaccccuaccccgacuaccacuggcuccgcaccgucaagaccaccaaggagucccucaucaucaucucccccuccgucgccgaccucgaccccuacgacaagucccuccacucccgccucuuccccggcggcaagugccucggcaucaccaucuccuccaccuacugcuccaccaaccacgacuacaccaucuggaugcccgaggagccccgccucggcaccuccugcgacaucuucaccaacuccaagggcaagaaggccuccaagggcggcaaggucugcggcuucgucgacgagcgcggccucuacaagucccucaagggcgccugcaagcucaagcucugcggcgucuccggccuccgccucauggacggcaccugggucaccauccagaccuccgacgagaccaaguggugcccccccgaccagcucgucaaccuccacgacuuccacuccgacgagaucgagcaccucgucgucgaggagcucgucaagaagcgcgaggagugccucgacgcccucgaguccaucaugaccaccaaguccgucuccuuccgccgccucuccuaccuccgcaagcucguccccggcuucggcaaggccuacaccaucuucaacaagacccucauggaggccgacgcccacuacaaguccguccgcaccuggaacgagaucauccccuccaagggcugccucaaggucuccgaccgcugccacccccacgucgacggcgucuucuucaacggcaucauccucggccccgacggcaacguccucauccccgagaugcaguccucccuccuccagcagcacauggagcuccucgaguccuccgucaucccccucaugcacccccucgccgaccccuccaccgucuucaaggacggcgacgaggccgaggacuucgucgagguccaccuccccgacguccacaagcagaucuccggcgucgaccucggccuccccuccuggggcaaguaccuccucaugaucgccggcggccucgccacccucguccucaucaucuuccucauggccugcugccgccgcaccaagcgcgccgagucccgccgccgcggcuccggcgaguccggcgagaagguccucgccaccccccagcccaagaaggucgucuccuccugggagcucuacaagcgcgagggcgacgcccgccucuga

SEQ ID NO: 127669 - RNA, 1575 nt, Artificial Sequence; identical to SEQ ID NO: 127667
  derived and/or modified CDS sequence (opt2) from glycoprotein__RABV__KJ174670.1

SEQ ID NO: 127670 - RNA, 1575 nt, Artificial Sequence; identical to SEQ ID NO: 127456
  derived and/or modified CDS sequence (opt2) from glycoprotein__RABV__KJ174671.1

SEQ ID NO: 127671 - RNA, 1575 nt, Artificial Sequence
  derived and/or modified CDS sequence (opt2) from glycoprotein__RABV__KJ174672.1
augaucuuccaggcccuccucuucgucccccuccucaucuccucccucugccucggcaaguuccccaucuacaccauccccgacaagcucggccccuggucccccaucgacauccaccaccucuccugccccaacaaccucgucgucgaggacgagggcugcaccucccucuccggcuucuccuacauggagcucaaggucggcuacaucuccgccaucaaggucaacggcuucaccugcaccggcgucgucaccgaggccgagaccuacaccaacuucgucggcuacgucaccaccaccuucaagcgcaagcacuuccgccccauccccgacgccugccgcgccgccuacaacuggaagaccgccggcgacccccgcuacgaggagucccuccagaaccccuaccccgacuaccacuggcuccgcaccgucaagaccaccaaggagucccucaucaucaucucccccuccgucgccgaccucgaccccuacgacaagucccuccacucccgccucuuccccggcggcaagugccucggcaucaccaucuccuccaccuacugcuccaccaaccacgacuacaccaucuggaugcccgaggagccccgccucggcaccuccugcgacaucuucaccaacuccaagggcaagaaggccuccaagggcggcaaggucugcggcuucgucgacgagcgcggccucuacaagucccucaagggcgccugcaagcucaagcucugcggcgucuccggccuccgccucauggacggcaccugggucaccauccagaccuccgacgagaccaaguggugcccccccgaccagcucgucaaccuccacgacuuccacuccgacgagaucgagcaccucgucgucgaggagcucgucaagaagcgcgaggagugccucgacgcccucgaguccaucaugaccaccaaguccgucuccuuccgccgccucuccuaccuccgcaagcucguccccggcuucggcaaggccuacaccaucuucaacaagacccucauggaggccgacgcccacuacaaguccguccgcaccuggaacgagaucauccccuccaagggcugccucaaggucuccgaccgcugccacccccacgucgacggcgucuucuucaacggcaucauccucggccccgacggcaacguccucauccccgagaugcaguccucccuccuccagcagcacauggagcuccucgaguccuccgucaucccccucaugcacccccucgccgaccccuccaccgucuucaaggacggcgacgaggccgaggacuucgucgagguccaccuccccgacguccacaagcagaucuccggcgucgaccucggccuccccuccuggggcaaguaccuccucaugaucgccggcggccucgccacccucguccucaucaucuuccucauggccugcugccgccgcaccaagcgcaccgagucccgccgccgcggcuccggcgaguccggcgagaagguccucgccaccccccagcccaagaaggucgucuccuccugggagcucuacaagcgcgagggcgacgcccgccucuga

SEQ ID NO: 127672 - RNA, 1575 nt, Artificial Sequence; identical to SEQ ID NO: 127666
  derived and/or modified CDS sequence (opt2) from glycoprotein__RABV__KJ174673.1

SEQ ID NO: 127673 - RNA, 1575 nt, Artificial Sequence
  derived and/or modified CDS sequence (opt2) from glycoprotein__RABV__KJ174674.1
augaucuuccaggcccuccucuucgucccccuccucaucuccucccucugccucggcaaguuccccaucuaccccauccccgacaagcucggccccuggucccccaucgacauccaccaccucuccugccccaacaaccucgucggcgaggacgagggcugcaucucccucuccggcuucuccuacauggagcucaaggucggcuacaucuccgccaucaaggucaacggcuucaccugcaccggcgucgucaccgaggccgagaccuacaccaacuucgucggcuacgucaccaccaccuucaagcgcaagcacuuccgccccauccccgacgccugccgcgccgccuacaacuggaagaucgccggcgacccccgcuacgaggagucccuccagaaccccuaccccgacuaccacuggcuccgcaccgucaagaccaccaaggagucccucaucaucaucucccccuccgucgccgaccucgaccccuacgacaagucccuccacucccgccucuuccccggcggcaagugccucggcaucaccaucuccuccaccuacugcuccaccaaccacgacuacaccaucuggaugcccgaggagccccgccucggcaccuccugcgacaucuucaccaacuccaagggcaagaaggccuccaagggcggcaaggucugcggcuucgucgacgagcgcggccucuacaagucccucaagggcgccugcaagcucaagcucugcggcgucuccggccuccgccucauggacggcaccugggucaccauccagaccuccgacgagaccaaguggugcccccccgaccagcucgucaaccuccacgacuuccacuccgacgagaucgagcaccucgucgucgaggagcucgucaagaagcgcgaggagugccucgacgcccucgaguccaucaugaccaccaaguccgucuccuuccgccgccucuccuaccuccgcaagcucguccccggcuucggcaaggccuacaccaucuucaacaagacccucauggaggccgacgcccacuacaaguccguccgcaccuggaacgagaucauccccuccaagggcugccucaaggucuccgaccgcugccacccccacgucgacggcgucuucuucaacggcaucauccucggccccgacggcaacguccucauccccgagaugcaguccucccuccuccagcagcacauggagcuccucgaguccuccgucaucccccucaugcacccccucgccgaccccuccaccgucuucaaggacggcgacgaggccgaggacuucgucgagguccaccuccccgacguccacaagcagaucuccggcgucgaccucggccuccccuccuggggcaaguaccuccucaugaucgccggcggccucgccacccucguccucaucaucuuccucauggccugcugccgccgcaccaagcgcaccgagucccgccgccgcggcuccggcgaguccggcgagaagguccucgccaccccccagcccaagaaggucgucuccuccugggagcucuacaagcgcgagggcgacgcccgccucuga

SEQ ID NO: 127674 - RNA, 1575 nt, Artificial Sequence; identical to SEQ ID NO: 127348
  derived and/or modified CDS sequence (opt2) from glycoprotein__RABV__KJ174675.1

SEQ ID NO: 127675 - RNA, 1575 nt, Artificial Sequence
  derived and/or modified CDS sequence (opt2) from glycoprotein__RABV__KJ174676.1
augaucccccaggcccuccucuucgucccccuccucaucuccucccucugcuucggccgcuuccccaucuacaccauccccgacaagcucggccccuggucccccaucgacauccaccaccucuccugccccaacaaccucgucgucgaggacgagggcugcaccucccucuccggcuucuccuacauggagcucaaggucggcuacaucuccgccaucaaggucaacggcuucaccugcaccggcgucgucaccgaggccgagaccuacaccaacuucgucggcuacgucaccaccaccuucaagcgcaagcacuuccgccccaugcccgacgccugccgcaccgccuacaacuggaagaucgccggcgacccccgcuacgaggagucccuccagaaccccuaccccgacuacaacuggcuccgcaccgucaagaccaccaaggagucccucaucgucaucucccccuccgucgccgaccucgaccccuacgacaagucccuccacucccgcgucuuccccggcggcaagugccucggcaucaccaucuccuccaccuacugcuccaccaaccacgacuacaccaucuggaugcccgaggaggcccgccucggcaccuccugcgacaucuucaccaacucccgcggcaagcgcgccuccaagggcggcaagaccugcggcuucgucgacgagcgcggccucuacaagucccucaagggcgccugcaagcucaagcucugcggcguccccggccuccgccucauggacggcaccugggucaccauccagaccuccgacgagaccaaguggugccccuccgaccagcucgucaaccuccacgacuuccacuccgacgagaucgagcaccucgucgucgaggagcucgucaagaagcgcgaggagugccucgacgcccucgaguccaucaugaccaccaaguccgucuccuuccgccgccucucccaccuccgcaagcucguccccggcuucggcaaggccuacaccaucuucaacaagacccucauggaggccgacgcccacuacaaguccauccgcaccuggaacgaggucauccccuccaagggcugccucaaggucggcggccgcugccacccccacgucgacggcgucuucuucaacggcaucauccucggccccgacggcaacguccucauccccgagaugcaguccucccuccuccagcagcacgucgagcuccucgaguccuccgucaucccccucaugcacccccucgccgaccccuccaccgucuucaaggacggcgacgaggccgaggacuucgucgagguccacuuccccgacauccacaagcaggucuccggcgucgaccucggccuccccaacuggggcaaguaccuccucauguccgccggcgcccucgccgcccucaugcucgccaucuuccucaugaccugcugccgccgcgucaaccgcaccgaguccauccagcgcggccccggcgaguccggccgcaaggucuccaucaccucccagaacggcaaggucaucuccuccugggagcucuacaaguccggcggcgagaccggccucuga

SEQ ID NO: 127676 - RNA, 1575 nt, Artificial Sequence
  derived and/or modified CDS sequence (opt2) from glycoprotein__RABV__KJ174677.1
augaucccccaggcccuccucuucgucccccuccucaucuccucccucugcuucggcggcuuccccaucuacaccauccccgacaagcucggccccuggucccccaucgacauccaccaccucuccugccccaacaaccucgucgucgaggacgagggcugcaccucccucuccggcuucuccuacauggagcucaaggucggcuacaucuccgccaucaaggucaacggcuucaccugcaccggcgucgucaccgaggccgagaccuacaccaacuucgucggcuacgucaccaccaccuucaagcgcaagcacuuccgccccaugcccgacuccugccgcgccgccuacaacuggaagaccgccggcgacccccgcuacgaggagucccuccagaaccccuaccccgacuaccacuggcuccgcaccgucaagaccaccaaggagucccucaucaucaucucccccuccgucgccgaccucgaccccuacgacaagucccuccacucccgcgucuuccccggcggcaagugccucggcaucaccgucuccuccaccuacugcuccaccaaccacgacuacaccaucuggaugcccgaggaggcccgccucggcaccuccugcgacaucuucaccaacucccgcggcaagcgcgccuccaagggcggccgcaccugcggcuucgucgacgagcgcggccucuacaagucccucaagggcgccugcaagcucaagcucugcggcguccucggccuccgccucauggacggcaccugggucaccauccacaccuccaacgagaccaaguggugccccuccgaccagcucgucaaccuccacgacuuccacuccgacgagaucgagcaccucgucgucgaggagcucgucaagaagcgcgaggagugccucgacgcccucgaguccaucaugaccaccaaguccgucuccuuccgccgccucucccaccuccgcaagcucguccccggcuucggcaaggccuacaccaucuucaacaagacccucauggaggccgacgcccacuacaaguccauccgcaccuggaacgagaucauccccuccaagggcugccucaaggucggcggccgcugccacccccacgucgacggcgucuucuucaacggcaucauccucggccccgacggcaacguccucauccccgagaugcaguccucccuccuccagcagcacgucgagcuccucgaguccuccgucaucccccucaugcacccccucgccgaccccuccaccgucuucaaggacggcgacgaggccgaggacuucgucgagguccaccuccccgacguccacaagcaggucuccggcgucgaccucggccuccccaacuggggcaaguaccuccucauguccgccggcguccucgccacccucaugcucaccaucuuccucaucaccugcugccgccgcgucgaccgcaccgaguccauccagcgcggccccggcgagcucggccgcgaggucuccgucaccucccagaacggcaaggucgucuccuccugggagcucuacaaguccggcggcgagacccgccucuga

SEQ ID NO: 127677 - RNA, 1575 nt, Artificial Sequence
  derived and/or modified CDS sequence (opt2) from glycoprotein__RABV__KJ174678.1
augaucccccaggcccuccucuucgucccccuccucaucuccucccucugcuucggcggcuuccccaucuacaccauccccgacaagcucggccccuggucccccaucgacauccaccaccucuccugccccaacaaccucgucgucgaggacgagggcugcaccucccucuccggcuucuccuacauggagcucaaggucggcuacaucuccgccaucaaggucaacggcuucaccugcaccggcgucgucaccgaggccgagaccuacaccaacuucgucggcuacgucaccaccaccuucaagcgcaagcacuuccgccccaugcccgacgccugccgcgccgccuacaacuggaagaccgccggcgacccccgcuacgaggagucccuccagaaccccuaccccgacuaccacuggcuccgcaccgucaagaccaccaaggagucccucaucaucaucucccccuccgucgccgaccucgaccccuacgacaagucccuccacucccgcgucuuccccggcggcaagugccucggcaucaccgucuccuccaccuacugcuccaccaaccacgacuacaccaucuggaugcccgacgaggcccgccucggcaccuccugcgacaucuucaccaacucccgcggcaagcgcgccuccaagggcggccgcaccugcggcuucgucgacgagcgcggccucuacaagucccucaagggcgccugcaagcucaagcucugcggcguccucggccuccgccucauggacggcaccugggucaccauccagaccuccaacgagaccaaguggugccccuccgaccagcucgucaaccuccacgacuuccacuccgacgagaucgagcaccucgucgucgaggagcucgucaagaagcgcgaggagugccucgacgcccucgaguccaucaugaccaccaaguccgucuccuuccgccgccucucccaccuccgcaagcucguccccggcuucggcaaggccuacaccaucuucaacaagacccucauggaggccgacgcccacuacaaguccauccgcaccuggaacgagaucauccccuccaagggcugccucaaggucggcggccgcugccacccccacauggacggcgucuucuucaacggcaucauccucggccccgacggcaacguccucauccccgagaugcaguccucccuccuccagcagcacgucgagcuccucgaguccuccgucaucccccucaugcacccccucgccgaccccuccaccgucuucaaggacggcgacgaggccgaggacuucgucgagguccaccuccccgacguccacaagcaggucuccggcgucgaccucggccuccccaacuggggcaaguaccuccucauguccgccggcgcccucgccacccucaugcucaugaucuuccucaucaccugcugccgccgcgucgaccgcaccgaguccauccagcgcggccccggcgagcucggccgcgaggucuccgucaccucccagaacggcaaggucaucuccuccugggagcucuacaaguccggcggcgagacccgccucuga

SEQ ID NO: 127678 - RNA, 1575 nt, Artificial Sequence
  derived and/or modified CDS sequence (opt2) from glycoprotein__RABV__KJ174679.1
augaucccccaggcccucuucuucgucccccuccucaucuccucccucugcgucggcggcuuccccaucuacaccauccccgacaagcucggccccuggucccccaucgacauccaccaccucuccugccccaacaaccucgucgucgaggacgagggcugcaccucccucuccggcuucuccuacauggagcucaaggucggcuacaucuccgccaucaaggucaacggcuucaccugcaccggcgucgucaccgaggccgagaccuacaccaacuucgucggcuacgucaccaccaccuucaagcgcaagcacuuccgccccaugcccgacuccugccgcgccgccuacaacuggaagaccgccggcgacccccgcuacgaggagucccuccagaaccccuaccccgacuaccacuggcuccgcaccgucaagaccaccaaggagucccucaucaucaucucccccuccgucgccgaccucgaccccuacgacaagucccuccacucccgcgucuuccccggcggcaagugccucggcaucaccgucuccuccaccuacugcuccaccaaccacgacuacaccaucuggaugcccgaggaggcccgccucggcaccuccugcgacaucuucaccaacucccgcggcaagcgcgccuccaagggcggccgcaccugcggcuucgucgacgagcgcggccucuacaagucccucaagggcgccugcaagcucaagcucugcggcguccucggccuccgccucauggacggcaccugggucaccauccacaccuccaacgagaccaaguggugccccuccgaccagcucgucaaccuccacgacuuccacuccgacgagaucgagcaccucgucgucgaggagcucgucaagaagcgcgaggagugccucgacgcccucgaguccaucaugaccaccaaguccgucuccuuccgccgccucucccaccuccgcaagcucguccccggcuucggcaaggccuacaccaucuucaacaagacccucauggaggccgacgcccacuacaaguccauccgcaccuggaacgagaucauccccuccaagggcugccucaaggucggcggccgcugccacccccacgucgacggcgucuucuucaacggcaucauccucggccccgacggcaacguccucauccccgagaugcaguccucccuccuccagcagcacgucgagcuccucgaguccuccgucaucccccucaugcacccccucgccgaccccuccaccgucuucaaggacggcgacgaggccgaggacuucgucgagguccaccuccccgacguccacaagcaggucuccggcgucgaccucggccuccccaacuggggcaaguaccuccucauguccgccggcguccucgccacccucaugcucaccaucuuccucaucaccugcugccgccgcgucgaccgcaccgaguccauccagcgcggccccggcgagcucggccgcgaggucuccgucaccucccagaacggcaaggucaucuccuccugggagcucuacaaguccggcggcgagacccgccucuga

SEQ ID NO: 127679 - RNA, 1575 nt, Artificial Sequence
  derived and/or modified CDS sequence (opt2) from glycoprotein__RABV__KJ174680.1
augaucccccaggcccuccucuucgucccccuccucaucuccucccucugcuucggcggcuuccccaucuacaccauccccgacaagcucggccccuggucccccaucgacauccaccaccucuccugccccaacaaccucgucgucgaggacgagggcugcaccucccucuccggcuucuccuacauggagcucaaggucggcuacaucuccgccaucaaggucaacggcuucaccugcaccggcgucgucaccgaggccgagaccuacaccaacuucgucggcuacgucaccaccaccuucaagcgcaagcacuuccgccccaugcccgacgccugccgcgccgccuacaacuggaagaccgccggcgacccccgcuacgaggagucccuccagaaccccuaccccgacuaccacuggcuccgcaccgucaagaccaccaaggagucccucaucaucaucucccccuccgucgccgaccucgaccccuacgacaagucccuccacucccgcgucuuccccggcggcaagugccucggcaucaccgucuccuccaccuacugcuccaccaaccacgacuacaccaucuggaugcccgaggaggcccgccucggcaccuccugcgacaucuucaccaacucccgcggcaagcgcgccuccaagggcggccgcaccugcggcuucgucgacgagcgcggccucuacaagucccucaagggcgccugcaagcucaagcucugcggcguccucggccuccgccucauggacggcaccugggucaccauccagaccuccaacgagaccaaguggugccccuccgaccagcucgucaaccuccacgacuuccacuccgacgagaucgagcaccucgucgucgaggagcucgucaagaagcgcgaggagugccucgacgcccucgaguccaucaugaccaccaaguccgucuccuuccgccgccucucccaccuccgcaagcucguccccggcuucggcaaggccuacaccaucuucaacaagacccucauggaggccgacgcccacuacaaguccauccgcaccuggaacgagaucauccccuccaagggcugccucaaggucggcggccgcugccacccccacgucgacggcgucuucuucaacggcaucauccucggccccgacggcaacguccucauccccgagaugcaguccucccuccuccagcagcacgucgagcuccucgaguccuccgucaucccccucaugcacccccucgccgaccccuccaccgucuucaaggacggcgacgaggccgaggacuucgucgagguccaccuccccgacguccacaagcaggucuccggcgucgaccucggccuccccaacuggggcaaguaccuccucauguccgccggcgcccucgccacccucaugcucaugaucuuccucaucaccugcugccgccgcgucgaccgcaccgaguccauccagcgcggccccggcgagcucggccgcgaggucuccgucaccucccagaacggcaaggucaucuccuccugggagcucuacaaguccggcggcgagacccgccucuga

SEQ ID NO: 127680 - RNA, 1575 nt, Artificial Sequence
  derived and/or modified CDS sequence (opt2) from glycoprotein__RABV__KJ174681.1
augaucccccaggcccuccucuucgucccccuccucaucuccucccucugcuucggcggcuuccccaucuacaccauccccgacaagcucggccccuggucccccaucgacauccaccaccucuccugccccaacaaccucgucgucgaggacgagggcugcaccucccucuccggcuucuccuacauggagcucaaggucggcuacaucuccgccaucaaggucaacggcuucaccugcaccggcgucgucaccgaggccgagaccuacaccaacuucgucggcuacgucaccaccaccuucaagcgcaagcacuuccgccccaugcccgacuccugccgcgccgccuacaacuggaagaccgccggcgacccccgcuacgaggagucccuccagaaccccuaccccgacuaccacuggcuccgcaccgucaagaccaccaaggagucccucaucaucaucucccccuccgucgccgaccucgaccccuacgacaagucccuccacucccgcgucuuccccggcggcaagugccucggcaucaccgucuccuccaccuacugcuccaccaaccacgacuacaccaucuggaugcccgaggaggcccgccucggcaccuccugcgacaucuucaccaacucccgcggcaagcgcgccuccaagggcggccgcaccugcggcuucgucgacgagcgcggccucuacaagucccucaagggcgccugcaagcucaagcucugcggcguccucggccuccgccucauggacggcaccugggucaccauccacaccuccaacgagaccaaguggugccccuccgaccagcucgucaaccuccacgacuuccacuccgacgagaucgagcaccucgucgucgaggagcucgucaagaagcgcgaggagugccucgacgcccucgaguccaucaugaccaccaaguccgucuccuuccgccgccucucccaccuccgcaagcucguccccggcuucggcaaggccuacaccaucuucaacaagacccucauggaggccgacgcccacuacaaguccauccgcaccuggaacgagaucauccccuccaagggcugccucaaggucggcggccgcugccacccccacgucgacggcgucuucuucaacggcaucauccucggccccgacggcaacguccucauccccgagaugcaguccucccuccuccagcagcacgucgagcuccucgaguccuccgucaucccccucaugcacccccucgccgaccccuccaccgucuucaaggacggcgacgaggccgaggacuucgucgagguccaccuccccgacguccacaagcaggucuccggcgucgaccucggccuccccaacuggggcaaguaccuccucgucuccgccggcguccucgccacccucaugcucaccaucuuccucaucaccugcugccgccgcgucgaccgcaccgaguccauccagcgcggccccggcgagcucggccgcaaggucuccgucaccucccagaacggcaaggucaucuccuccugggagcucuacaaguccggcggcgagacccgccucuga

SEQ ID NO: 127681 - RNA, 1575 nt, Artificial Sequence
  derived and/or modified CDS sequence (opt2) from glycoprotein__RABV__KJ174682.1
augaucgcccaggcccuccucuucgucccccuccucaucuccccccucugcuucggcaaguuccccaucuacaccauccccgacaagcucggccccuggucccccaucgacauccaccaccucuccugccccaacaaccucgucgucgaggacgaggagugcaccucccucuccggcuucuccuacauggagcucaaggucggcuacaucuccgccaucaaggucaacggcuucaccugcaccggcgucgucaccgaggccgagaccuacaccaacuucgucggcuacgucaccaccaccuucaagcgcaagcacuuccgccccacccccgacgccugccgcgccgccuacaacuggaagauggccggcgacccccgcuacgaggagucccuccacaaccccuaccccgacuaccacuggcuccgcaccgucaagaccaccaaggagucccucaucaucaucucccccuccgucgccgaccucgaccccuacgacaagucccuccacucccgcgucuuccccggcggcaagugccucggcaucaccaucuccuccaccuacugcuccaccaaccacgacuacaccaucuggaugcccgaggaggcccgccucggcaccuccugcgacaucuucgccaacucccgcggcaagcgcgccuccaagggcggccgcaccugcggcuucgucgacgagcgcggccucuacaagucccucaagggcgccugcaagcucaagcucugcggcguccccggccuccgccucauggacggcaccugggucaccauccagaccuccaacgagaccaaguggugcccccccgaccgccucgucaaccuccacgacuuccacuccgacgagaucgagcaccucgucgucgaggagcucgucaagaagcgcgaggagugccucgacgcccucgaguccaucaugaccaccaaguccgucuccuuccgccgccucuccuaccuccgcaagcucguccccggcuucggcaaggccuacaccaucuucaacaagacccucauggaggccgacgcccacuacaaguccguccgcaccuggaacgagaucauccccuccaagggcugccucaaggucggcggccgcugccacccccacgucgacggcgucuucuucaacggcaucauccucggccccgacggcaacguccucauccccgagaugcaguccucccuccuccagcagcacauggagcuccucgaguccuccgucaucccccucaugcacccccucgccgaccccuccaccgucuucaaggacggcgacgaggccgaggacuucgucgagguccaccuccccgacauccacaagcaggucuccggcgucgaccucggccuccccgacuggggcaaguaccuccucauguccgccggcgcccucgccacccucaugcucaccaucuuccucaugaccugcugccgccgcgccaaccgcaccgaguccauccagcgcggccccggcgaguccggccgcaaggucuccgucaccccccagaacggcaaggucaucuccuccugggagcucuacaaguccggcggcgagaccaagcucuga

SEQ ID NO: 127682 - RNA, 1575 nt, Artificial Sequence
  derived and/or modified CDS sequence (opt2) from glycoprotein__RABV__KJ174683.1
augaucgcccaggcccuccucuucgucccccuccucaucuccccccucugccucggcaaguuccccaucuacaccauccccgacaagcucggccccuggucccccaucgacauccaccaccucuccugccccaacaaccucgucgucgaggacgaggagugcaccucccucuccggcuucuccuacauggagcucaaggucggcuacaucuccgccaucaaggucaacggcuucaccugcaccggcgucgucaccgaggccgagaccuacaccaacuucgucggcuacgucaccaccaccuucaagcgcaagcacuuccgccccacccccgacgccugccgcgccgccuacaacuggaagauggccggcgacccccgcuacgaggagucccuccacaaccccuaccccgacuaccacuggcuccgcaccgucaagaccaccaaggagucccucaucaucaucucccccuccgucgccgaccucgaccccuacgacaagucccuccacucccgcgucuuccccggcggcaagugccucggcaucaccaucuccuccaccuacugcuccaccaaccacgacuacaccaucuggaugcccgaggaggcccgccucggcaccuccugcgacaucuucgccaacucccgcggcaagcgcgccuccaagggcggccgcaccugcggcuucgucgacgagcgcggccucuacaagucccucaagggcgccugcaagcucaagcucugcggcguccccggccuccgccucauggacggcaccugggucaccauccagaccuccaacgagaccaaguggugcccccccgaccgccucgucaaccuccacgacuuccacuccgacgagaucgagcaccucgucgucgaggagcucgucaagaagcgcgaggagugccucgacgcccucgaguccaucaugaccaccaaguccgucuccuuccgccgccucuccuaccuccgcaagcucguccccggcuucggcaaggccuacaccaucuucaacaagacccucauggaggccgacgcccacuacaaguccguccgcaccuggaacgagaucauccccuccaagggcugccucaaggucggcggccgcugccacccccacgucgacggcgucuucuucaacggcaucauccucggccccgacggcaacguccucauccccgagaugcaguccucccuccuccagcagcacauggagcuccucgaguccuccgucaucccccucaugcacccccucgccgaccccuccaccgucuucaaggacggcgacgaggccgaggacuucgucgagguccaccuccccgacauccacaagcaggucuccggcgucgaccucggccuccccgacuggggcaaguaccuccucauguccgccggcgcccucgccacccucaugcucaccaucuuccucaugaccugcugccgccgcgccaaccgcaccgaguccauccagcgcggccccggcgaguccggccgcaaggucuccgucaccccccagaacggcaaggucaucuccuccugggagcucuacaaguccggcggcgagaccaagcucuga

SEQ ID NO: 127683 - RNA, 1575 nt, Artificial Sequence
  derived and/or modified CDS sequence (opt2) from glycoprotein__RABV__KJ466147.1
augaucccccaggcccuccucuucgucccccuccucgucuucccccucugcuucggcaaguuccccaucuacaccauccccgacaagcucggccccuggucccccaucgacauccaccaccucuccugccccaacaaccucgucgucgaggacgagggcugcaccaaccucuccggcuucuccuacauggagcucaaggucggcuacaucuccgccaucaaggucaacggcuucaccugcaccggcgucgucaccgaggccgagaccuacaccaacuucgucggcuacgucaccaccaccuucaagcgcaagcacuuccgccccacccccgacgccugccgcuccgccuacaacuggaagauggccggcgacccccgcuacgaggagucccuccacaaccccuaccccgacuaccacuggcuccgcaccgucaagaccaccaaggaguccgucgucaucaucucccccuccgucgccgaccucgaccccuacgacgagucccuccacucccgcgucuucccccgcggcaagugcuccggcaucaccgucuccuccgccuacugcuccaccaaccacgacuacaccaucuggaugcccgagaacccccgccucggcaccuccugcgacaucuucaccaacucccgcggcaagcgcgccuccaagggcuccaagaccugcggcuucgucgacgagcgcggccucuacaagucccucaagggcgccugcaagcucaagcucugcggcguccucggccuccgccucauggacggcaccugggucgccauccagaccuccaacgagaccaaguggugcccccccgaccagcucgucaaccuccacgacuuccacuccgacgagaucgagcaccucgucgucgaggagcucgucaagaagcgcgaggagugccucgacgcccucgaguccaucaugaccaccaaguccgucuccuuccgccgccucucccaccuccgcaagcucguccccggcuucggcaaggccuacaccaucuucaacaagacccucauggaggccgacgcccacuacaaguccguccagaccuggaacgagaucauccccuccaagggcugccuccgcgucggcggccgcugccacccccacgucaacggcgucuucuucaacggcaucauccucggccccgacggccacguccucauccccgagaugcaguccucccuccuccagcagcacauggagcuccucaaguccuccgucaucccccucaugcacccccucgccgaccccuccaccgucuucaaggacggcgacgaggucgaggacuucgucgagguccaccuccaggacguccacaagcaggucuccggcgucgaccucggccuccccaacuggggcaaggacguccucaugggcgccggcguccucaccgcccucaugcucaugaucuuccucaugaccugcugccgccgcaccaaccgcgccgaguccauccagcacucccucggcgagaccggccgcaaggucuccgucaccccccaguccggccgcgucaucuccuccugggaguccuacaaguccggcggcgagaccaagcucuga

SEQ ID NO: 127684 - RNA, 1575 nt, Artificial Sequence
  derived and/or modified CDS sequence (opt2) from glycoprotein__RABV__KJ476819.1
auggucccccaggcccuccuccucgucccccuccucgucuucuccaugugcuucggcaaguuccccaucuacaccauccccgacaagcucggccccuggucccccaucgacauccaccaccucuccugccccaacaaccucgucgucgaggacgagggcugcaccaaccucuccggcuucuccuacauggagcucaaggucggccacaucuccgccaucaaggucaacggcuucaccugcaccggcgucgucaccgaggccgagaccuacaccaacuucgucggcuacgucaccaccaccuucaagcgcaagcacuuccgccccacccccgacgccugccgcgccgccuacaacuggaagauggccggcgacccccgcuacgaggagucccuccacaaccccuaccccgacuaccacuggcuccgcaccgucaagaccaccaaggagucccucgucaucaucucccccuccgucgccgaccucgaccccuacgacaagucccuccacucccgcgucuuccccaacggcaagugcuccggcaucaccaucuccuccaccuacugccccaccaaccacgacuacaccaucuggcuccccgagaacccccgccucggcaccuccugcgacaucuucaccaacucccgcggcaagcgcgccuccaagggcuccaagaccugcggcuucgucgacgagcgcggccucuacaagucccucaagggcgccugcaagcucaagcucugcggcguccucggccuccgccucauggacggcaccugggucgccaugcaggccuccgacgagaccaaguggugcccccccgaccagcucgucaaccuccacgacuuccgcuccgacgagaucgagcaccucgucgucgaggagcucgucaagaagcgcgaggagugccucgacgcccucgaguccaucaugaccaccaaguccgucuccuuccgccgccucucccaccuccgcaagcucguccccggcuucggcaaggccuacaccaucuucaacaagacccucauggaggccgacgcccacuacaaguccguccgcaccuggaacgagaucauccccuccaagggcugccuccgcgucggcggccgcugccacccccacgucaacggcgucuucuucaacggcaucauccucggccccgacggccacguccucauccccgagaugcaguccucccuccuccagcagcacauggagcuccucgaguccuccgucaucccccucaugcacccccucgccgaccccuccaccgucuucaaggacggcgacgaggccgagaacuucgucgagguccaccuccccgacguccacaagcagaucuccggcgucgaccucggccuccccaacuggggcaaguacguccucgucuccgccggcguccucaucgcccucaugcucaucaucuuccucaugaccugcugcggccgcgucaaccgccccaaguccacccagcacaaccucggcggcaccggccgcgaggucuccgucaccccccaguccggcaaggucaucuccuccugggaguccuacaaguccggcggcgagacccgccucuga

SEQ ID NO: 127685 - RNA, 1575 nt, Artificial Sequence
  derived and/or modified CDS sequence (opt2) from glycoprotein__RABV__KJ476820.1
auggucccccaggcccuccucuucgucccccuccucgucuucuccaugugcuucggcaaguuccccaucuacaccauccccgacaagcucggccccuggucccccaucgacauccaccaccucuccugccccaacaaccucgucgucgaggacgagggcugcaccaaccucuccggcuucuccuacauggagcucaaggucggcuacaucuccgccaucaaggucaacggcuucaccugcaccggcgucgucaccgaggccgagaccuacaccaacuucgucggcuacgucaccaccaccuucaagcgcaagcacuuccgccccacccccgacgccugccgcaccgccuacaacuggaagauggccggcgacccccgcuacgaggagucccuccacaaccccuaccccgacuaccacuggcuccgcaccgucaagaccaccaaggagucccucgucaucaucucccccuccgucgccgaccucgaccccuacgacaagucccuccacucccgcgucuuccccaacggcaagugcuccggcaucaccaucuccuccaccuacugccccaccaaccacgacuacaccaucuggcuccccgagaacccccgccucggcaccuccugcgacaucuucaccaacucccgcggcaagcgcgccuccaagggcuccaagaccugcggcuucgucgacgagcgcggccucuacaagucccucaagggcgccugcaagcucaagcucugcggcguccucggccuccgccucauggacggcaccugggucgccaugcaggccuccgacgagaccaaguggugcccccccgaccagcucgucaaccuccacgacuuccgcuccgacgagaucgagcaccucgucgucgaggagcucgucaagaagcgcgaggagugccucgacgcccucgaguccaucaugaccaccaaguccgucuccuuccgccgccucucccaccuccgcaagcucguccccggcuucggcaaggccuacaccaucuucaacaagacccucauggaggccgacgcccacuacaaguccguccgcaccuggaacgagaucauccccuccaagggcugccuccgcgucggcggccgcugccacccccacgucaacggcgucuucuucaacggcaucauccucggccccgacggccacguccucauccccgagaugcaguccucccuccuccagcagcacauggagcuccucgaguccuccgucaucccccucaugcacccccucgccgaccccuccaccgucuucaaggacggcgacgaggccgagaacuucgucgagguccaccuccccgacguccacaagcagaucuccggcgucgaccucggccuccccaacuggggcaaguacguccucgucuccgccggcguccucaucgcccucaugcucaucaucuuccucaugaccugcugcggccgcgucaaccgccccaaguccacccagcacaaccucggcggcaccggccgcgaggucuccgucaccccccaguccggcaaggucaucuccuccugggaguccuacaaguccggcggcgagacccgccucuga

SEQ ID NO: 127686 - RNA, 1575 nt, Artificial Sequence
  derived and/or modified CDS sequence (opt2) from glycoprotein__RABV__KJ564280.1
auggucccccaggcccuccucuucgucccccuccucgucuucuccuccugcuucggcaaguuccccaucuacaccauccccgacaagcucggccccuggucccccaucgacauccaccaccucuccugccccaacaaccucgucgucgaggacgagggcugcaccaaccucuccggcuucuccuacauggagcucaaggucggcuacaucuccgccaucaaggucaacggcuucaccugcaccggcgucgucaccgaggccgagaccuacaccaacuucgucggcuacgucaccaccaccuucaagcgcaagcacuuccgccccaugcccgacgccugccgcgccgccuacaacuggaagauggccggcgacccccgcuacgaggagucccuccacaaccccuaccccgacuaccacuggcuccgcaccgucaagaccaccaaggagucccucgucaucaucucccccuccgucgccgaccucgaccccuacgacaagucccuccacucccgcgucuuccccggcggcaagugcuccggcaucaccgucuccuccaccugcugcuccaccaaccacgacuacaccaucuggaugcccgagaacccccgccucggcaccuccugcgacaucuucaccaacucccgcggcaagcgcgccuccaagggcggcaagaccugcggcuucgucgacgagcgcggccucuacaagucccucaagggcgccugcaagcucaagcucugcggcguccucggccuccgccucauggacggcaccugggucgccauccagaccuccgacgagaucaaguggugcucccccgaccagcucgucaaccuccacgacuuccacuccgacgagaucgagcaccucgucgucgaggagcucgucaagaagcgcgaggagugccucgacgcccucgagaccaucaugaccaccaaguccgucuccuuccgccgccucucccaccuccgcaagcucguccccggcuucggcaaggccuacaccaucuucaacaagacccucauggaggccgacgcccacuacaaguccauccgcaccuggaacgagaccauccccuccaagggcugccuccgcgucggcggccgcugccacccccacgucaacggcgucuucuucaacggcaucauccucggccccgacggccacguccucauccccgagaugcaguccucccuccuccaccagcacauggagcuccucgaguccuccgucaucccccucaugcacccccucgccgaccccuccaccgucuucaaggacggcgacgaggccgaggacuucgucgagguccaccuccccgacguccacaagcagaucuccggcgucgaccucggccuccccaacuggggcaaguacguccucaucuccgccggcgcccucaccgcccucaugcucaccaucuuccucaugaccugcugccgcaagaccaaccgcgccggcuccauccagcacucccccggcgagaccggccgcaaggucuccgucaccucccacaacggccgcgucaucuccuccugggaguccuacaaguccggcggcgagaccggccucuga

SEQ ID NO: 127687 - RNA, 1575 nt, Artificial Sequence
  derived and/or modified CDS sequence (opt2) from glycoprotein__RABV__KM016899.1
auggucccccucgucccccucuucgucccccuccucgucuucccccucugcuccggcaaguuccccaucuacaccauccccgacaagcucggccccuggucccccaucgacauccaccaccucuccugccccaacaaccucgucgucgaggacgagggcugcgccaaccucuccggcuucuccuacauggagcucaaggucggcuacaucuccgccaucaaggucaacggcuucaccugcaccggcgucgucaccgaggccgagaccuacaccaacuucgucggcuacgucaccaccaccuuccgccgcaagcacuuccgccccacccccgacgccugccgcgccgccuacaacuggaagauggccggcgacccccgcuacgaggagucccuccacaaccccuaccccgacuaccacuggcuccgcaccgucaagaccaccaaggagucccucgucaucaucucccccuccgucgccgaccucgaccccuacgacaagucccuccacucccgcgucuuccccuccggcaagugcuccggcaucaccgucuccuccaccuacugcuccaccaaccacgacuacaccaucuggaugcccgagaaccuccgccucggcaccuccugcgacaucuucaccaacucccgcggcaagcgcgccuccaagggcuccaagaccugcggcuucgucgacgagcgcggccucuacaagucccucaagggcgccugcaagcucaagcucugcggcguccucggccuccgccucauggacggcaccugggucgccaugcagaccuccggcgagaccaaguggugcccccccgaccagcucgucaaccuccacgacuuccgcuccgacgagaucgagcaccucgucgucgaggagcucgucaagaagcgcgaggagugccucgacgcccucgaguccaucaugaccaccaaguccgucuccuuccgccgccucucccaccuccgcaagcucguccccggcuucggcaaggccuacaccaucuucaacaagacccucauggaggccgacgcccacuacaaguccguccgcaccuggaacgagaucauccccuccaagggcugccuccgcgucggcggccgcugccacccccacgucaacggcgucuucuucaacggcaucauccucggccccgacggccacguccucauccccgagaugcaguccucccuccuccagcagcacauggagcuccucgaguccuccgucaucccccucaugcacccccucgccgaccccuccaccgucuucaaggacggcgacgaggccgaggacuucgucgagguccaccuccccgacguccacaagcaggucuccggcgucgaccucggccuccccaacuggggcaaguacauccuccucuccgccggcgcccucaucgcccucaugcucaugaucuuccucaugaccugcugccgcaaguucaaccgccccgaguccacccagcgcucccucggcggcaccggccgcaaggucuccaucaccucccagggcggcaaggucaucuccuccugggaguccuacaaguccggcggcgagacccgccucuga

SEQ ID NO: 127688 - RNA, 1575 nt, Artificial Sequence; identical to SEQ ID NO: 126992
  derived and/or modified CDS sequence (opt2) from glycoprotein__RABV__KM093868.1

SEQ ID NO: 127689 - RNA, 1575 nt, Artificial Sequence
  derived and/or modified CDS sequence (opt2) from glycoprotein__RABV__KM278992.1
auggucccccagguccuccucuucgucccccuccucgucuucuccaugugcuucggcaaguuccccaucuacaccauccccgacaagcucggccccuggucccccaucgacauccaccaccucuccugccccaacaaccucgucgucgaggacgagggcugcaccaaccucuccggcuucuccuacauggagcucaaggucggcuacaucuccgccaucaaggucaacggcuucaccugcaccggcgucgucaccgaggccgagaccuacaccaacuucgucggcuacgucaccaccaccuucaagcgcaagcacuuccgccccacccccgacgccugccgcgccgccuacaacuggaagauggccggcgacccccgcuacgaggagucccuccacaaccccuaccccgacuaccacuggcuccgcaccgucaagaccaccaaggagucccucgucaucaucucccccuccgucaccgaccucgaccccuacgacaagucccuccacucccgcgucuuccccuccggcaagugccucggcaucaccaucuccuccaccuacugcuccaccaaccacgacuacaccaucuggaugcccgagaacccccgccucggcaccuccugcgacaucuucaccaacucccgcggcaagcgcgccuccaagggcggcaagaccugcggcuucgucgacgagcgcggccucuacaagucccucaagggcgccugcaagcucaagcucugcggcguccucggccuccgccucauggacggcaccugggucgccaugcaggccuccgacgagaccaaguggugcccccccgaccagcucgucaaccuccacgacuuccgcuccgacgagaucgagcaccucgucgucgaggagcucgucaagaagcgcgaggagugccucgacgcccucgaguccaucaugaccaccaaguccgucuccuuccgccgccucucccaccuccgcaagcucguccccggcuucggcaaggccuacaccaucuucaacaagacccucauggaggccgacgcccacuacaaguccguccgcaccuggaacgagaucauccccuccaagggcugccuccgcgucggcggccgcugccacccccacgucaagggcgucuucuucaacggcaucauccucggccccgacggccacguccucauccccgagaugcaguccucccuccuccagcagcacauggagcuccucgaguccuccgucaucccccucaugcacccccucgccgaccccuccaccgucuucaaggacggcgacgaggccgaggacuucgucgagguccaccuccccgacguccacaagcaggucuccggcgucgaccucggccuccccuccuggggcaaguacguccucgucuccgccggcguccucgucguccucaugcucaccaucuucaucaucaccugcugcggccgcguccaccgccccaaguccacccagcacucccucggcggcaccggccgcaaggucuccgucaccucccaguccggcaaggucaucuccuccugggaguccuacaaguccggcggcgagacccgccucuga

SEQ ID NO: 127690 - RNA, 1575 nt, Artificial Sequence; identical to SEQ ID NO: 127689
  derived and/or modified CDS sequence (opt2) from glycoprotein__RABV__KM278993.1

SEQ ID NO: 127691 - RNA, 1575 nt, Artificial Sequence
  derived and/or modified CDS sequence (opt2) from glycoprotein__RABV__KM408747.1
auggucccccagguccuccucuucgucccccuccucgucuucuccaugugcuucggcaaguuccccaucuacaccauccccgacaagcucggccccuggucccccaucgacauccaccaccucuccugccccaacaaccucgucgucgaggacgagggcugcaccaaccucuccggcuucuccuacauggagcucaaggucggcuacaucuccgccaucaaggucaacggcuucaccugcaccggcgucgucaccgaggccgagaccuacaccaacuucgucggcuacgucaccaccaccuucaagcgcaagcacuuccgccccacccccgacgccugccgcgccgccuacaacuggaagauggccggcgacccccgcuacgaggagucccuccacaaccccuaccccgacuaccacuggcuccgcaccgucaagaccaccaaggagucccucgucaucaucucccccuccgucgccgaccucgaccccuacgacaagucccuccacucccgcgucuuccccuccggcaagugcuccggcaucaccaucuccuccaccuacugcuccaccaaccacgacuacaccaucuggaugcccgagaacccccgccucggcaccuccugcgacaucuucaccaacucccgcggcaagcgcgccuccaagggcggcaagaccugcggcuucgucgacgagcgcggccucuacaagucccucaagggcgccugcaagcucaagcucugcggcguccucggccuccgccucauggacggcaccugggucgccaugcagaccuccgacgagaccaaguggugcccccccgaccagcucgucaaccuccacgacuuccgcuccgacgagaucgagcaccucgucgucgaggagcucgucaagaagcgcgaggagugccucgacgcccucgaguccaucaugaccaccaaguccgucuccuuccgccgccucucccaccuccgcaagcucguccccggcuucggcaaggccuacaccaucuucaacaagacccucauggaggccgacgcccacuacaaguccguccgcaccuggaacgagaucauccccuccaagggcugccuccgcgucggcggccgcugccacccccacgucaagggcgucuucuucaacggcaucauccucggccccgacggccacguccucauccccgagaugcaguccucccuccuccagcagcacauggagcuccucgaguccuccgucaucccccucaugcacccccucgccgaccccuccaccgucuucaaggagggcgacgaggccgaggacuucgucgagguccaccuccccgacguccacaagcagaucuccggcgucgaccucggccuccccuccuggggcaaguacguccucgucuccgccggcguccucgucguccucaugcucaccaucuucaucaucaccugcugcggccgcauccaccgccccaaguucacccagcacggccucggcggcaccggccgcaaggucuccgucaccucccaguccggcaaggucaucuccuccugggaguccuacaaguccggcggcgagacccgccucuga

SEQ ID NO: 127692 - RNA, 1575 nt, Artificial Sequence
  derived and/or modified CDS sequence (opt2) from glycoprotein__RABV__KM492745.1
auggucccccagguccuccucuucgucccccuccucgucuucuccaugugcuucggcaaguuccccaucuacaccauccccgacaagcucggccccuggucccccaucgacauccaccaccucuccugccccaacaaccucgucgucgaggacgagggcugcaccaaccucuccggcuucuccuacauggagcucaaggucggcuacaucuccgccaucaaggucaacggcuucaccugcaccggcgucgucaccgaggccgagaccuacaccaacuucgucggcuacgucaccaccaccuucaagcgcaagcacuuccgccccacccccgacgccugccgcgccgccuacaacuggaagauggccggcgacccccgcuacgaggagucccuccacaaccccuaccccgacuaccacuggcuccgcaccgucaagaccaccaaggagucccucgucaucaucucccccuccgucgccgaccucgaccccuacgacaagucccuccacucccgcgucuuccccuccggcaagugcuccggcaucaccaucuccuccaccuacugcuccaccaaccacgacuacaccaucuggaugcccgagaacccccgccucggcaccuccugcgacaucuucaccaacucccgcggcaagcgcgccuccaagggcggcaagaccugcggcuucgucgacgagcgcggccucuacaagucccucaagggcgccugcaagcucaagcucugcggcguccucggccuccgccucauggacggcaccugggucgccaugcagaccuccgacgagaccaaguggugcccccccgaccagcucgucaaccuccacgacuuccgcuccgacgagaucgagcaccucgucgucgaggagcucgucaagaagcgcgaggagugccucgacgcccucgaguccaucaugaccaccaaguccgucuccuuccgccgccucucccaccuccgcaagcucguccccggcuucggcaaggccuacaccaucuucaacaagacccucauggaggccgacgcccacuacaaguccguccgcaccuggaacgagaucauccccuccaagggcugccuccgcgucggcggccgcugccacccccacgucaagggcgucuucuucaacggcaucauccucggccccgacggccacguccucauccccgagaugcaguccucccuccuccagcagcacauggagcuccucgaguccuccgucaucccccucaugcacccccucgccgaccccuccaccgucuucaaggacggcgacgaggccgaggacuucgucgagguccaccuccccgacguccacaagcagaucuccggcgucgaccucggccuccccuccuggggcaaguacguccucgucuccgccggcguccucgucguccucaugcucaccaccuucaucaucaccugcugcggccgcauccgccgccccaaguccacccagcacggccucggcggcaccggccgcaaggucuccgucaccucccaguccggcaaggucaucuccuccugggaguccuacaaguccggcggcgagacccgccucuga

SEQ ID NO: 127693 - RNA, 1575 nt, Artificial Sequence; identical to SEQ ID NO: 127166
  derived and/or modified CDS sequence (opt2) from glycoprotein__RABV__KM492746.1

SEQ ID NO: 127694 - RNA, 1575 nt, Artificial Sequence
  derived and/or modified CDS sequence (opt2) from glycoprotein__RABV__KM492747.1
auggucccccagguccuccucuucgucccccuccucgucuucuccaugugcuucggcaaguuccccaucuacaccauccccgacaagcucggccccuggucccccaucgacauccaccaccucuccugccccaacaaccucgucgucgaggacgagggcugcaccaaccucuccggcuucuccuacauggagcucaaggucggcuacaucuccgccaucaaggucaacggcuucaccugcaccggcgucgucaccgaggccgagaccuacaccaacuucgucggcuacgucaccaccaccuucaagcgcaagcacuuccgccccacccccgacgccugccgcgccgccuacaacuggaagauggccggcgacccccgcuacgaggagucccuccacaaccccuaccccgacuaccacuggcuccgcaccgucaagaccaccaaggagucccucgucaucaucucccccuccgucgccgaccucgaccccuacgacaagucccuccacucccgcgucuuccccuccggcaagugcuccggcaucaccaucuccuccaccuacugcuccaccaaccacgacuacaccaucuggaugcccgagaacccccgccucggcaccuccugcgacaucuucaccaacucccgcggcaagcgcgccuccaagggcggcaagaccugcggcuucgucgacgagcgcggccucuacaagucccucaagggcgccugcaagcucaagcucugcggcguccucggccuccgccucauggacggcaccugggucgccaugcagaccuccgacgagaccaaguggugcccccccgaccagcucgucaaccuccacgacuuccgcuccgacgagaucgagcaccucgucgucgaggagcucgucaagaagcgcgaggagugccucgacgcccucgaguccaucaugaccaccaaguccgucuccuuccgccgccucucccaccuccgcaagcucguccccggcuucggcaaggccuacaccaucuucaacaagacccucauggaggccgacgcccacuacaaguccguccgcaccuggaacgagaucauccccuccaagggcugccuccgcgucggcggccgcugccacccccacgucaacggcgucuucuucaacggcaucauccucggccccgacggccacguccucauccccgagaugcaguccucccuccuccagcagcacauggagcuccucgaguccuccgucaucccccucaugcacccccucgccgaccccuccaccgucuucaaggacggcgacgaggccgaggacuucgucgagguccaccuccccgacguccacaagcagaucuccggcgucgaccucggccuccccuccuggggcaaguacguccucgucuccgccggcguccucgucguccucaugcucaccaucuucaucaugaccugcugcggccgcguccgccgccccaaguccacccagcacggcuucggcggcaccggccgcaaggucuccgucaccucccaguccggcaaggucaucuccuccugggaguccuacaaguccggcggcgagacccgccucuga

SEQ ID NO: 127695 - RNA, 1575 nt, Artificial Sequence
  derived and/or modified CDS sequence (opt2) from glycoprotein__RABV__KM492748.1
auggucccccagguccuccuccucgucccccuccucgucuucuccaugugcuucggcaaguuccccaucuacaccauccccgacaagcucggccccuggucccccaucgacauccaccaccucuccugccccaacaaccucgucgucgaggacgagggcugcaccaaccucuccggcuucuccuacauggagcucaaggucggcuacaucuccgccaucaaggucaacggcuucaccugcaccggcgucgucaccgaggccgagaccuacaccaacuucgucggcuacgucaccaccaccuucaagcgcaagcacuuccgccccacccccgacgccugccgcgccgccuacaacuggaagauggccggcgacccccgcuacgaggagucccuccacaaccccuaccccgacuaccacuggcuccgcaccgucaagaccaccaaggagucccucgucaucaucucccccuccgucgccgaccucgaccccuacgacaagucccuccacucccgcgucuuccccuccggcaagugcuccggcaucaccaucuccuccaccuacugcuccaccaaccacgacuacaccaucuggaugcccgagaacccccgccucggcaccuccugcgacaucuucaccaacucccgcggcaagcgcgccuccaagggcggcaagaccugcggcuucgucgacgagcgcggccucuacaagucccucaagggcgccugcaagcucaagcucugcggcguccucggccuccgccucauggacggcaccugggucgccaugcagaccuccgacgagaccaaguggugcccccccgaccagcucgucaaccuccacgacuuccgcuccgacgagaucgagcaccucgucgucgaggagcucgucaagaagcgcgaggagugccucgacgcccucgaguccaucaugaccaccaaguccgucuccuuccgccgccucucccaccuccgcaagcucguccccggcuucggcaaggccuacaccaucuucaacaagacccucauggaggccgacgcccacuacaaguccguccgcaccuggaacgagaucauccccuccaagggcugccuccgcgucggcggccgcugccacccccacgucaacggcgucuucuucaacggcaucauccucggccccgacggccacguccucauccccgagaugcaguccucccuccuccagcagcacauggagcuccucgaguccuccgucaucccccucaugcacccccucgccgaccccuccaccgucuucaaggacggcgacgaggccgaggacuucgucgagguccaccuccccgacguccacaagcagaucuccggcgucgaccucggccuccccuccuggggcaaguacguccucgucuccgccggcguccucgucguccucaugcucaccaucuucaugaucaccugcugcggccgcauccaccgccccaaguccacccagcacggccucggcggcaccggccgcaaggucuccgucaccucccaguccggcaaggucaucuccuccugggaguccuacaaguccggcggcgagacccgccucuga

SEQ ID NO: 127696 - RNA, 1575 nt, Artificial Sequence
  derived and/or modified CDS sequence (opt2) from glycoprotein__RABV__KM492750.1
auggucccccagguccuccucuucgucccccuccucgucuucuccgucugcuucggcaaguuccccaucuacaccauccccgacaagcucggccccuggucccccaucgacauccaccaccucaucugccccaacaaccucgucgucgaggacgagggcugcaccaaccucaccggcuucuccuacauggagcucaaggucggcuacaucuccgccaucaaggucaacggcuucuccugcaccggcgucgucaccgaggccuacaccuaccccaacuucgucggcuacgucaccuccaccuucaagcgcaagcacuuccgccccacccccgacgccugccgcgccgccuacaacuggaagauggccggcgacccccgcuucgaggagucccuccacuaccccuaccccgacuaccacuggcuccgcaccgucaagaccaccaaggagucccucgucaucaucucccccuccgucgccgaccucgaccccuacgacaagucccuccacucccgcgucuuccccuccggcaagugcuccggcaucaccaucuccuccaccuacugcuccaccaaccacgacuacaccaucuggaugcccgagaacccccgccucggcaccuccugcgacaucuucaccaacucccgcggcaagcgcgccuccaagggcggcaagaccugcggcuucgucgacgagcgcggccucuacaagucccucaagggcgccugcaagcucaagcucugcggcguccucggccuccgccucauggacggcaccugggucgccaugcagaccuccgacgagaccaaguggugcccccccgaccagcucgucaaccuccacgacuuccgcuccgacgagaucgagcaccucgucgucgaggagcucgucaagaagcgcgaggagugccucgacgcccucgaguccaucaugaccaccaaguccgucuccuuccgccgccucucccaccuccgcaagcucguccccggcuucggcaaggccuacaccaucuucaacaagacccucauggaggccgacgcccacuacaaguccguccgcaccuggaacgagaucauccccuccaagggcugccuccgcgucggcggccgcugccacccccacgucaagggcgucuucuucaacggcaucauccucggccccgacggccacguccucauccccgagaugcaguccucccuccuccagcagcacauggagcuccucgaguccuccgucaucccccucaugcacccccucgccgaccccuccaccgucuucaaggacggcgacgaggccgaggacuucgucgagguccaccuccccgacguccacaagcagaucuccggcgucgaccucggccuccccuccuggggcaaguacguccucgucuccgccggcguccucgucguccucaugcucaccaucuucaucaucaccugcugcggccgcauccaccgccccaaguccacccagcacggccucggcggcaccggccgcaaggucuccgucaccucccaguccggcaaggucaucuccuccugggaguccuacaaguccggcggcgagacccgccucuga

SEQ ID NO: 127697 - RNA, 1575 nt, Artificial Sequence
  derived and/or modified CDS sequence (opt2) from glycoprotein__RABV__KM492751.1
auggucccccagguccuccucuucgucccccuccucgucuucuccaugugcuucggcaaguuccccaucuacaccauccccgacaagcucggccccuggucccccaucgacauccaccaccucuccugccccaacaaccucgucgucgaggacgagggcugcaccaaccucuccggcuucuccuacauggagcucaaggucggcuacaucuccgccaucaaggucaacggcuucaccugcaccggcgucgucaccgaggccgagaccuacaccaacuucgucggcuacgucaccaccaccuucaagcgcaagcacuuccgccccacccccgacgccugccgcgccgccuacaacuggaagauggccggcgacccccgcuacgaggagucccuccacaaccccuaccccgacuaccacuggcuccgcaccgucaagaccaccaaggagucccucgucaucaucucccccuccgucgccgaccucgaccccuacgacaagucccuccacucccgcgucuuccccuccggcaagugcuccggcaucaccaucuccuccaccuacugcuccaccaaccacgacuacaccaucuggaugcccgagaacccccgccucggcaccuccugcgacaucuucaccaacucccgcggcaagcgcgccuccaagggcggcaagaccugcggcuucgucgacgagcgcggccucuacaagucccucaagggcgccugcaagcucaagcucugcggcguccucggccuccgccucauggacggcaccugggucgccaugcagaccuccgacgagaccaaguggugcccccccgaccagcucgucaaccuccacgacuuccgcuccgacgagaucgagcaccucgucgucgaggagcucgucaagaagcgcgaggagugccucgacgcccucgaguccaucaugaccaccaaguccgucuccuuccgccgccucucccaccuccgcaagcucguccccggcuucggcaaggccuacaccaucuucaacaagacccucauggaggccgacgcccacuacaaguccguccgcaccuggaacgagaucauccccuccaagggcugccuccgcgucggcggccgcugccacccccacgucaagggcgucuucuucaacggcaucauccucggccccgacggccacguccucauccccgagaugcaguccucccuccuccagcagcacauggagcuccucgaguccuccgucaucccccucaugcacccccucgccgaccccuccaccgucuucaaggacggcgacgaggccgaggacuucgucgagguccaccuccccgacguccacaagcagaucuccggcgucgaccucggccuccccuccuggggcaaguacguccucgucuccgccggcguccucgucguccucaugcucaccaucuucaucaucaccugcugccgccgcauccgccgcccccgcuccacccagcacggccucggcggcaccggccgcaaggucuccgucaccucccaguccggcaaggucaucuccuccugggaguccuacaaguccggcggcgagacccgccucuga

SEQ ID NO: 127698 - RNA, 1575 nt, Artificial Sequence
  derived and/or modified CDS sequence (opt2) from glycoprotein__RABV__KM492752.1
auggucccccagguccuccucuucgucccccuccucgucuucuccaugugcuucggcaaguuccccaucuacaccauccccgacaagcucggccccuggucccccaucgacauccaccaccucuccugccccaacaaccucgucgucgaggacgagggcugcaccaaccucuccggcuucuccuacauggagcucaaggucggcuacaucuccgccaucaaggucaacggcuucaccugcaccggcgucgucaccgaggccgagaccuacaccaacuucgucggcuacgucaccaccaccuucaagcgcaagcacuuccgccccacccccgacgccugccgcgccgccuacaacuggaagauggccggcgacccccgcuacgaggagucccuccacaaccccuaccccgacuaccacuggcuccgcaccgucaagaccaccaaggagucccucgucaucaucucccccuccgucgccgaccucgaccccuacgacaagucccuccacucccgcgucuuccccuccggcaagugcuccggcaucaccaucuccuccaccuacugcuccaccaaccacgacuacaccaucuggaugcccgagaacccccgccucggcaccuccugcgacaucuucaccaacucccgcggcaagcgcgccucccgcggcggcaagaccugcggcuucgucgacgagcgcggccucuacaagucccucaagggcgccugcaagcucaagcucugcggcguccucggccuccgccucauggacggcaccugggucgccaugcagaccuccgacgagaccaaguggugcccccccgaccagcucgucaaccuccacgacuuccgcuccgacgagaucgagcaccucgucgucgaggagcucgucaagaagcgcgaggagugccucgacgcccucgaguccaucaugaccaccaaguccgucuccuuccgccgccucucccaccuccgcaagcucguccccggcuucggcaaggccuacaccaucuucaacaagacccucauggaggccgacgcccacuacaaguccguccgcaccuggaacgagaucauccccuccaagggcugccuccgcgucggcggccgcugccacccccacgucaagggcgucuucuucaacggcaucauccucggccccgacggccacguccucauccccgagaugcaguccucccuccuccagcagcacauggagcuccucgaguccuccgucaucccccucaugcacccccucgccgaccccuccaccgucuucaaggacggcgacgaggccgaggacuucgucgagguccaccuccccgacguccacaagcagaucuccggcgucgaccucggccuccccaacuggggcaaguacguccucgucuccgccggcguccucgucguccucaugcucaccaucuucaucaucaccugcugcggccgcauccgccgcccccgcuccacccagcacggccucggcggcaccggccgcaaggucuccgucaccucccaguccggcaaggucaucuccuccugggaguccuacaaguccggcggcgagacccgccucuga

SEQ ID NO: 127699 - RNA, 1575 nt, Artificial Sequence
  derived and/or modified CDS sequence (opt2) from glycoprotein__RABV__KM492753.1
auggucccccagguccuccucuucgucccccuccucgucuucuccaugugcuucggcaaguuccccaucuacaccauccccgacaagcucggccccuggucccccaucgacauccaccaccucuccugccccaacaaccucgucgucgaggacgagggcugcaccaaccucuccggcuucuccuacauggagcucaaggucggcuacaucuccgccaucaaggucaacggcuucaccugcaccggcgucgucaccgaggccgagaccuacaccaacuucgucggcuacgucaccaccaccuucaagcgcaagcacuuccgccccacccccgacgccugccgcgccgccuacaacuggaagauggccggcgacccccgcuacgaggagucccuccacaaccccuaccccgacuaccacuggcuccgcaccgucaagaccaccaaggagucccucgucaucaucucccccuccgucgccgaccucgaccccuacgacaagucccuccacucccgcgucuuccccuccggcaagugcuccggcaucaccaucuccuccaccuacugcuccaccaaccacgacuacaccaucuggaugcccgagaacccccgccucggcaccuccugcgacaucuucaccaacucccgcggcaagcgcgccuccaagggcggcaagaccugcggcuucgucgacgagcgcggccucuacaagucccucaagggcgccugcaagcucaagcucugcggcguccucggccuccgccucauggacggcaccugggucgccaugcagaccuccgacgagaccaaguggugcccccccgaccagcucgucaaccuccacgacuuccgcuccgacgagaucgagcaccucgucgucgaggagcucgucaagaagcgcgaggagugccucgacgcccucgaguccaucaugaccaccaaguccgucuccuuccgccgccucucccaccuccgcaagcucguccccggcuucggcaaggccuacaccaucuucaacaagacccucauggaggccgacgcccacuacaaguccguccgcaccuggaacgagaucauccccuccaagggcugccuccgcgucggcggccgcugccacccccacgucaacggcgucuucuucaacggcaucauccucggccccgacggccacguccucauccccgagaugcaguccucccuccuccagcagcacauggagcuccucgaguccuccgucaucccccucaugcacccccucgccgaccccuccaccgucuucaaggacggcgacgaggccgaggacuucgucgagguccaccuccccgacguccacaagcagaucuccggcgucgaccucggccuccccuccuggggcaaguacguccucgucuccgccggcguccucgucguccucaugcucaccaucuucaucaugaccugcugcggccgcguccaccgccccaaguccacccagcacggccucggcggcaccggccgcaaggucuccgucaccucccaguccggcaaggucaucuccuccugggaguccuacaaguccggcggcgagacccgccucuga

SEQ ID NO: 127700 - RNA, 1575 nt, Artificial Sequence
  derived and/or modified CDS sequence (opt2) from glycoprotein__RABV__KM492754.1
auggucccccagguccuccucuucgucccccuccucgucuucuccaugugcuucggcaaguuccccaucuacaccauccccgacaagcucggccccuggucccccaucgacauccaccaccucuccugccccaacaaccucgucgucgaggacgagggcugcaccaaccucuccggcuucuccuacauggagcucaaggucggcuacaucuccgccaucaaggucaacggcuucaccugcaccggcgucgucaccgaggccgagaccuacaccaacuucgucggcuacgucaccaccaccuucaagcgcaagcacuuccgccccacccccgacgccugccgcgccgccuacaacuggaagauggccggcgacccccgcuacgaggagucccuccacaaccccuaccccgacuaccacuggcuccgcaccgucaagaccaccaaggagucccucgucaucaucucccccuccgucgccgaccucgaccccuacgacaagucccuccacucccgcgucuuccccuccggcaagugcuccggcaucaccaucuccuccaccuacugcuccaccaaccacgacuacaccaucuggaugcccgagaacccccgccucggcaccuccugcgacaucuucaccaacucccgcggcaagcgcgccuccaagggcggcaagaccugcggcuucgucgacgagcgcggccucuacaagucccucaagggcgccugcaagcucaagcucugcggcguccucggccuccgccucauggacggcaccugggucgccaugcagaccuccgacgagaccaaguggugcccccccgaccagcucgucaaccuccacgacuuccgcuccgacgagaucgagcaccucgucgucgaggagcucgucaagaagcgcgaggagugccucgacgcccucgaguccaucaugaccaccaaguccgucuccuuccgccgccucucccaccuccgcaagcucguccccggcuucggcaaggccuacaccaucuucaacaagacccucauggaggccgacgcccacuacaaguccguccgcaccuggaacgagaucauccccuccaagggcugccuccgcgucggcggccgcugccacccccacgucaacggcgucuucuucaacggcaucauccucggccccgacggccacguccucauccccgagaugcaguccucccuccuccagcagcacauggagcuccucgaguccuccgucaucccccucaugcacccccucgccgaccccuccaccgucuucaaggacggcgacgaggccgaggacuucgucgagguccaccuccccgacguccacaagcagaucuccggcgucgaccucggccuccccuccuggggcaaguacguccucgucuccgccggcguccucgucguccucaugcucaccaucuucaucaugaccugcugcggccgcguccaccgcuccaaguccacccagcacggccucggcggcaccggccgcaaggucuccgucaccucccaguccggcaaggucaucuccuccugggaguccuacaaguccggcggcgagacccgccucuga

SEQ ID NO: 127701 - RNA, 1575 nt, Artificial Sequence
  derived and/or modified CDS sequence (opt2) from glycoprotein__RABV__KM492755.1
auggucccccagguccuccucuucgucccccuccucgucuucuccaugugcuucggcaaguuccccaucuacaccauccccgacaagcucggccccuggucccccaucgacauccaccaccucuccugccccaacaaccucgucgucgaggacgagggcugcaccaaccucuccggcuucuccuacauggagcucaaggucggcuacaucuccgccaucaaggucaacggcuucaccugcaccggcgucgucaccgaggccgagaccuacaccaacuucgucggcuacgucaccaccaccuucaagcgcaagcacuuccgccccacccccgacgccugccgcgccgccuacaacuggaagauggccggcgacccccgcuacgaggagucccuccacaaccccuaccccgacuaccacuggcuccgcaccgucaagaccaccaaggagucccucgucaucaucucccccuccgucgccgaccucgaccccuacgacaagucccuccacucccgcgucuuccccuccggcaagugcuccggcaucaccaucuccuccaccuacugcuccaccaaccacgacuacaccaucuggaugcccgagaacccccgccucggcaccuccugcgacaucuucaccaacucccgcggcaagcgcgccuccaagggcggcaagaccugcggcuucgucgacgagcgcggccucuacaagucccucaagggcgccugcaagcucaagcucugcggcguccucggccuccgccucauggacggcaccugggucgccaugcagaccuccgacgagaccaaguggugcccccccgaccagcucgucaaccuccacgacuuccgcuccgacgagaucgagcaccucgucgucgaggagcucgucaagaagcgcgaggagugccucgacgcccucgaguccaucaugaccaccaaguccgucuccuuccgccgccucucccaccuccgcaagcucguccccggcuucggcaaggccuacaccaucuucaacaagacccucauggaggccgacgcccacuacaaguccguccgcaccuggaacgagaucauccccuccaagggcugccuccgcgucggcggccgcugccacccccacgucaacggcgucuucuucaacggcaucauccucggccccgacggccacguccucauccccgagaugcaguccucccuccuccagcagcacauggagcuccucgaguccuccgucaucccccucaugcacccccucgccgaccccuccaccgucuucaaggacggcgacgaggccgaggacuucgucgagguccaccuccccgacguccacaagcagaucuccggcgucgaccucggccuccccuccuggggcaaguacguccucgucuccgccggcguccucgucguccucaugcucaccaucuucaucaugaccugcugcggccgcguccaccgccccaaguccacccagcacggccucggcggcaccgagcgcaaggucuccgucaccucccaguccggcaaggucaucuccuccugggaguccuacaaguccggcggcgagacccgccucuga

SEQ ID NO: 127702 - RNA, 1575 nt, Artificial Sequence; identical to SEQ ID NO: 127701
  derived and/or modified CDS sequence (opt2) from glycoprotein__RABV__KM492758.1

SEQ ID NO: 127703 - RNA, 1575 nt, Artificial Sequence
  derived and/or modified CDS sequence (opt2) from glycoprotein__RABV__KM492759.1
auggucccccagguccuccucuucgucccccuccucgucuucuccaugugcuucggcaaguuccccaucuacaccauccccgacaagcucggccccuggucccccaucgacauccaccaccucuccugccccaacaaccucgucgucgaggacgagggcugcaccaaccucuccggcuucuccuacauggagcucaaggucggcuacaucuccgccaucaaggucaacggcuucaccugcaccggcgucgucaccgaggccgagaccuacaccaacuucgucggcuacgucaccaccaccuucaagcgcaagcacuuccgccccacccccgacgccugccgcgccgccuacaacuggaagauggccggcgacccccgcuacgaggagucccuccacaaccccuaccccgacuaccacuggcuccgcaccgucaagaccaccaaggagucccucgucaucaucucccccuccgucgccgaccucgaccccuacgacaagucccuccacucccgcgucuuccccuccggcaagugcuccggcaucaccaucuccuccaccuacugcuccaccaaccacgacuacaccaucuggaugcccgagaacccccgccucggcaccuccugcgacaucuucaccaacucccgcggcaagcgcgccuccaagggcggcaagaccugcggcuucgucgacgagcgcggccucuacaagucccucaagggcgccugcaagcucaagcucugcggcguccucggccuccgccucauggacggcaccugggucgccaugcagaccuccgacgagaccaaguggugcccccccgaccagcucgucaaccuccacgacuuccgcuccgacgagaucgagcaccucgucgucgaggagcucgucaagaagcgcgaggagugccucgacgcccucgaguccaucaugaccaccaaguccgucuccuuccgccgccucucccaccuccgcaagcucguccccggcuucggcaaggccuacaccaucuucaacaagacccucauggaggccgacgcccacuacaaguccguccgcaccuggaacgagaucauccccuccaagggcugccuccgcgucggcggccgcugccacccccacgucaacggcgucuucuucaacggcaucauccucggccccgacggccacauccucauccccgagaugcaguccucccuccuccagcagcacauggagcuccucgaguccuccgucaucccccucaugcacccccucgccgaccccuccaccgucuucaaggacggcgacgaggccgaggacuucgucgagguccaccuccccgacguccacaagcagaucuccggcgucgaccucggccuccccuccuggggcaaguacguccucgucuccgccggcguccucgucguccucaugcucaccaucuucaucaugaccugcugcggccgcguccaccgccccaaguccacccagcacggccucggcggcaccgagcgcaaggucuccgucaccucccaguccggcaaggucaucuccuccugggaguccuacaaguccggcggcgagacccgccucuga

SEQ ID NO: 127704 - RNA, 1575 nt, Artificial Sequence
  derived and/or modified CDS sequence (opt2) from glycoprotein__RABV__KM492760.1
auggucccccagguccuccucuucgucccccuccucgucuucuccaugugcuucggcaaguuccccaucuacaccauccccgacaagcucggccccuggucccccaucgacauccaccaccucuccugccccaacaaccucgucgucgaggacgagggcugcaccaaccucuccggcuucuccuacauggagcucaaggucggcuacaucuccgccaucaaggucaacggcuucaccugcaccggcgucgucaccgaggccgagaccuacaccaacuucgucggcuacgucaccaccaccuucaagcgcaagcacuuccgccccacccccgacgccugccgcgccgccuacaacuggaagauggccggcgacccccgcuacgaggagucccuccacaaccccuaccccgacuaccacuggcuccgcaccgucaagaccaccaaggagucccucgucaucaucucccccuccgucgccgaccucgaccccuacgacaagucccuccacucccgcgucuuccccuccggcaagugcuccggcaucaccaucuccuccaccuacugcuccaccaaccacgacuacaccaucuggaugcccgagaacccccgccucggcaccuccugcgacaucuucaccaacucccgcggcaagcgcgccuccaagggcggcaagaccugcggcuucgucgacgagcgcggccucuacaagucccucaagggcgccugcaagcucaagcucugcggcguccucggccuccgccucauggacggcaccugggucgccaugcagaccuccgacgagaccaaguggugcccccccgaccagcucgucaaccuccacgacuuccgcuccgacgagaucgagcaccucgucgucgaggagcucgucaagaagcgcgaggagugccucgacgcccucgaguccaucaugaccaccaaguccgucuccuuccgccgccucucccaccuccgcaagcucguccccggcuucggcaaggccuacaccaucuucaacaagacccucauggaggccgacgcccacuacaaguccguccgcaccuggaacgagaucauccccuccaagggcugccuccgcgucggcggccgcugccacccccacgucaacggcgucuucuucaacggcaucauccucggccccgacggccacguccucauccccgagaugcaguccucccuccuccagcagcacauggagcuccucgaguccuccgucaucccccucaugcacccccucgccgaccccuccaccgucuucaaggacggcgacgaggccgaggacuucgucgagguccaccuccccgacguccacaagcagaucuccggcgucgaccucggccuccccuccuggggcaaguacguccucgucuccgccggcguccucgucguccucaugcucaccaucuucaucaugaccugcugcggccgcguccaccgccccaaguccacccagcacucccucggcggcaccgagcgcaaggucuccgucaccucccaguccggcaaggucaucuccuccugggaguccuacaaguccggcggcgagacccgccucuga

SEQ ID NO: 127705 - RNA, 1575 nt, Artificial Sequence
  derived and/or modified CDS sequence (opt2) from glycoprotein__RABV__KM492761.1
auggucccccagguccuccucuucgucccccuccucgucuucuccaugugcuucggcaaguuccccaucuacaccauccccgacaagcucggccccuggucccccaucgacauccaccaccucuccugccccaacaaccucgucgucgaggacgagggcugcaccaaccucuccggcuucuccuacauggagcucaaggucggcuacaucuccgccaucaaggucaacggcuucaccugcaccggcgucgucaccgaggccgagaccuacaccaacuucgucggcuacgucaccaccaccuucaagcgcaagcacuuccgccccacccccgacgccugccgcgccgccuacaacuggaagauggccggcgacccccgcuacgaggagucccuccacaaccccuaccccgacuaccacuggcuccgcaccgucaagaccaccaaggagucccucgucaucaucucccucuccgucgccgaccucgaccccuacgacaagucccuccacucccgcgucuuccccuccggcaagugcuccggcaucaccaucuccuccaccuacugcuccaccaaccacgacuacaccaucuggaugcccgagaacccccgccucggcaccuccugcgacaucuucaccaacucccgcggcaagcgcgccuccaagggcggcaagaccugcggcuucgucgacgagcgcggccucuacaagucccucaagggcgccugcaagcucaagcucugcggcguccucggccuccgccucauggacggcaccugggucgccaugcagaccuccgacgagaccaaguggugcccccccgaccagcucgucaaccuccacgacuuccgcuccgacgagaucgagcaccucgucgucgaggagcucgucaagaagcgcgaggagugccucgacgcccucgaguccaucaugaccaccaaguccgucuccuuccgccgccucucccaccuccgcaagcucguccccggcuucggcaaggccuacaccaucuucaacaagacccucauggaggccgacgcccacuacaaguccguccgcaccuggaacgagaucauccccuccaagggcugccuccgcgucggcggccgcugccacccccacgucaacggcgucuucuucaacggcaucauccucggccccgacggccacguccucauccccgagaugcaguccucccuccuccagcagcacauggagcuccucgaguccuccgucaucccccucaugcacccccucgccgaccccuccaccgucuucaaggacggcgacgaggccgaggacuucgucgagguccaccuccccgacguccacaagcagaucuccggcgucgaccucggccuccccuccuggggcaaguacguccucgucuccgccggcguccucgucguccucaugcucaccaucuucaucaugaccugcugcggccgcguccaccgccccaaguccacccagcacggccucggcggcaccggccgcaaggucuccgucaccucccaguccggcaaggucaucuccuccugggaguccuacaaguccggcggcgagacccgccucuga

SEQ ID NO: 127706 - RNA, 1575 nt, Artificial Sequence
  derived and/or modified CDS sequence (opt2) from glycoprotein__RABV__KM492762.1
auggucccccagguccuccucuucgucccccuccucgucuucuccaugugcuucggcaaguuccccaucuacaccauccccgacaagcucggccccuggucccucaucgacauccaccaccucuccugccccaacaaccucgucgucgaggacgagggcugcaccaaccucuccggcuucuccuacauggagcucaaggucggcuacaucuccgccaucaaggucaacggcuucaccugcaccggcgucgucaccgaggccgagaccuacaccaacuucgucggcuacgucaccaccaccuucaagcgcaagcacuuccgccccacccccgacgccugccgcgccgccuacaacuggaagauggccggcgacccccgcuacgaggagucccuccacaaccccuaccccgacuaccacuggcuccgcaccgucaagaccaccaaggagucccucgucaucaucucccccuccgucgccgaccucgaccccuacgacaagucccuccacucccgcgucuuccccuccggcaagugcuccggcaucaccaucuccuccaccuacugcuccaccaaccacgacuacaccaucuggaugcccgagaacccccgccucggcaccuccugcgacaucuucaccaacucccgcggcaagcgcgccuccaagggcggcaagaccugcggcuucgucgacgagcgcggccucuacaagucccucaagggcgccugcaagcucaagcucugcggcguccucggccuccgccucauggacggcaccugggucgccaugcagaccuccgacgagaccaaguggugcccccccgaccagcucgucaaccuccacgacuuccgcuccgacgagaucgagcaccucgucgucgaggagcucgucaagaagcgcgaggagugccucgacgcccucgaguccaucaugaccaccaaguccgucuccuuccgccgccucucccaccuccgcaagcucguccccggcuucggcaaggccuacaccaucuucaacaagacccucauggaggccgacgcccacuacaaguccguccgcaccuggaacgagaucauccccuccaagggcugccuccgcgucggcggccgcugccacccccacgucaacggcgucuucuucaacggcaucauccucggccccgacggccacguccucauccccgagaugcaguccucccuccuccagcagcacauggagcuccucgaguccuccgucaucccccucaugcacccccucgccgaccccuccaccgucuucaaggacggcgacgaggccgaggacuucgucgagguccaccuccccgacguccacaagcagaucuccggcgucgaccucggccuccccuccuggggcaaguacguccucgucuccgccggcguccucgucguccucaugcucaccaucuucaucaugaccugcugcggccgcguccaccgccccaaguccacccagcacggccucggcggcaccgagcgcaaggucuccgucaccucccaguccggcaaggucaucuccuccugggaguccuacaaguccggcggcgagacccgccucuga

SEQ ID NO: 127707 - RNA, 1575 nt, Artificial Sequence; identical to SEQ ID NO: 127699
  derived and/or modified CDS sequence (opt2) from glycoprotein__RABV__KM492763.1

SEQ ID NO: 127708 - RNA, 1575 nt, Artificial Sequence; identical to SEQ ID NO: 127701
  derived and/or modified CDS sequence (opt2) from glycoprotein__RABV__KM492764.1

SEQ ID NO: 127709 - RNA, 1575 nt, Artificial Sequence
  derived and/or modified CDS sequence (opt2) from glycoprotein__RABV__KM492765.1
auggucccccagguccuccucuucgucccccuccucgucuucuccaugugcuucggcaaguuccccaucuacaccauccccgacaaggucggccccggcucccccaucgacauccaccaccucuccugccccaacaaccucgucaucgaggacgagggcugcaccaaccucuccggcuucuccuacauggagcucaaggucggcuacaucuccgccaucaaggucuccggcuucaccugcaccggcgucgagaccgaggccgagaccuacaccaacuucgucggcuacgucaccaccaccuucaagcgcaagcacuuccgccccacccccaacgccugccgcgccgccuacaaccgcaagauggccggcgacccccgcuacgaggagucccuccacaaccgcugccccgaguaccacuggcuccgcaccgucaagaccaccaaggagucccucgucaucaucucccccuccgucgccgaccucgaccccuacgacaagucccuccacucccgcgucuuccccuccggcaagugcuccggcaucaccaucuccuccaccuacugcuccaccaaccacgacuacaccaucuggaugcccgagaacccccgccucggcaccuccugcgacaucuucaccaacucccgcggcaagcgcgccuccaagggcggcaagaccugcggcuucgucgacgagcgcggccucuacaagucccucaagggcgccugcaagcucaagcucugcggcguccucggccuccgccucauggacggcaccugggucgccaugcagaccuccgacgagaccaaguggugcccccccgaccagcucgucaaccuccacgacuuccgcuccgacgagaucgagcaccucgucgucgaggagcucgucaagaagcgcgaggagugccucgacgcccucgaguccaucaugaccaccaaguccgucuccuuccgccgccucucccaccuccgcaagcucguccccggcuucggcaaggccuacaccaucuucaacaagacccucauggaggccgacgcccacuacaaguccguccgcaccuggaacgagaucauccccuccaagggcugccuccgcgucggcggccgcugccacccccacgucaacggcgucuucuucaacggcaucauccucggccccgacggccacguccucauccccgagaugcaguccucccuccuccagcagcacauggagcuccucgaguccuccgucaucccccucaugcacccccucgccgaccccuccaccgucuucaaggacggcgacgaggccgaggacuucgucgagguccaccuccccgacguccacaagcagaucuccggcgucgaccucggccuccccuccuggggcaaguacguccucgucuccgccggcguccucgucguccucaugcucaccaucuucaucaugaccugcugcggccgcguccaccgccccaaguccacccagcacggccucggcggcaccgagcgcaaggucuccgucaccucccaguccggcaaggucaucuccuccugggaguccuacaaguccggcggcgagacccgccucuga

SEQ ID NO: 127710 - RNA, 1575 nt, Artificial Sequence
  derived and/or modified CDS sequence (opt2) from glycoprotein__RABV__KM594023.1
augaucccccagaacccccuccucggccuccuccucgucuccucccucugcuucggcaaguuccccaucuacaccauccccgacaagcucggccccuggucccccaucgacauccaccaccucuccugccccaacaaccucgucgucgaggacgagggcugcaccucccucuccggcuucuccuacauggagcucaaggucggcuacaucuccgccaucaaggucaacggcuucaccugcaccggcgucgucaccgaggccgagaccuacaccaacuucgucggcuacgucaccaccaccuucaagcgccgccacuuccgccccaugcccgacgccugccgcgccgcccacaacuggaagaucgccggcgacccccgcuacgaggacucccuccagaaccccuaccccgacuaccacuggcuccgcaccgucaagaccaccaaggagucccucaucaucaucucccccuccgucgccgaccucgaccccuacgacaagucccuccacucccgcgucuuccccggcggcaagugccucggcgucaccaucuccuccaccuacugcuccaccaaccacgacuacaccaucuggaugcccgaggaggccggccucggcaccuccugcgacaucuucaccaacucccgcggcaagcgcgccuccaagggcggcaagaccugcggcuucgucgacgagcgcggccucuacaagucccucaagggcuccugcaagcucaagcucugcggcguccccggccuccgccucauggacggcaccugggucuccauccagacccccgacgagaccaaguggugcccccccgaccaggucgucaaccuccacgacuuccacuccgacgagaucgagcaccucgucgucgaggagcucaucaagaagcgcgaggagugccucgacgcccucgaguccaucaugaccaccaaguccgucuccuuccgccgccucucccaccuccgcaagcucguccccggcuucggcaaggccuacaccaucuacaacaagacccucauggaggccgacgcccacuacaaguccguccgcaccuggaacgagaucauccccuccaagggcugccuccgcgucggcggccgcugccaccccgacgucgacggcgucuucuucaacggcaucauccucggccccgacggcaacguccucauccccgagaugcaguccucccuccuccagcagcacauggagcuccucgaguccuccgucaucccccucaugcacccccucgccgaccccuccaccaucuucaaggacuccgacgaggccgaggacuucgucgagguccaccuccccgacguccacaagaagaucuccggcgucgaccucggccuccccuccuggggcaaguaccuccucauguccgccggcgcccucgccgcccucaugcucaccacccuccucaucaccugcugccgcaaggucaaccgcgccgagcccaagcagcagggcccccgcgaguccggccgcaccaucuccgucaccccccagaacggccgcgucaucuccuccugggagcucuacaaguccggcuccgagaccggccucuga

SEQ ID NO: 127711 - RNA, 1575 nt, Artificial Sequence
  derived and/or modified CDS sequence (opt2) from glycoprotein__RABV__KM594024.1
augaucccccgcaacccccuccucggccuccuccucgucuccucccucugcuucggcaaguuccccaucuacaccauccccgacaagcucggccccuggucccccaucgacauccaccaccucuccugccccaacaaccucgucgucgaggacgagggcugcaccucccucuccggcuucuccuacauggagcucaaggucggcuacaucuccgccaucaaggucaacggcuucaccugcaccggcgucgucaccgaggccgagaccuacaccaacuucgucggcuacgucaccaccaccuucaagcgccgccacuuccgccccaugcccgacgccugccgcgccgcccacaacuggaagaucgccggcgacccccgcuacgaggacucccuccagaaccccuaccccgacuaccacuggcuccgcaccgucaagaccaccaaggagucccucaucaucaucucccccuccgucgccgaccucgaccccuacgacaagucccuccacucccgcgucuuccccggcggcaagugccucggcgucaccaucuccuccaccuacugcuccaccaaccacgacuacaccaucuggaugcccgaggaggccggccucggcaccuccugcgacaucuucaccaacucccgcggcaagcgcgccuccaagggcggcaagaccugcggcuucgucgacgagcgcggccucuacaagucccucaagggcuccugcaagcucaagcucugcggcguccccggccuccgccucaucgacggcaccugggucuccauccagacccccgacgagaccaaguggugcccccccgaccaggucgucaaccuccacgacuuccacuccgacgagaucgagcaccucgucgucgaggagcucaucaagaagcgcgaggagugccucgacgcccucgaguccaucaugaccaccaaguccgucuccuuccgccgccucucccaccuccgcaagcucguccccggcuucggcaaggccuacaccauccacaacaagacccucauggaggccgacgcccacuacaaguccguccgcaccuggaacgagaucauccccuccaagggcugccuccgcgucggcggccgcugccaccccaacgucgacggcgucuucuucaacggcaucauccucggccccgacggcaacguccucauccccgagaugcaguccucccuccuccagcagcacauggagcuccucgaguccuccgucaucccccucaugcacccccucgccgaccccuccaccaucuucaaggacuccgacgaggccgaggacuucgucgacguccaccuccccgacguccacaagaagaucuccggcgucgaccucggccuccccuccuggggcaaguaccuccucauguccgccggcgcccucgccgcccucaugcucaccacccuccucaucaccugcugccgcaaggucaaccgcgccgagcccaagcagcagggcccccgcgaguccggccgcaccaucuccgucaccccccagaacggccgcgucaucuccuccugggagcucuacaaguccggcuccgagaccggccucuga

SEQ ID NO: 127712 - RNA, 1575 nt, Artificial Sequence
  derived and/or modified CDS sequence (opt2) from glycoprotein__RABV__KM594025.1
augaucccccucgaccuccuccucggccuccuccucgccuccucccucugcuucggcaaguuccccaucuacaccauccccgacaagcucggccccuggucccccaucgacauccaccaccucuccugccccaacaaccucgucgucgaggacgagggcugcaccucccucuccggcuucuccuacauggagcucaaggucggcuacaucuccgccaucaaggucaacggcuucaccugcaccggcgucgucaccgaggccgagaccuacaccaacuucgucggcuacgucaccaccaccuucaagcgcaagcacuuccgccccaugcccgacgccugccgcgccgcccacgaguggaagaccgccggcgacccccgcuacgaggacucccuccagaaccccuaccccgacuaccacuggcuccgcaccgucaagaccaccaaggagucccucgucaucaucucccccuccgucgccgaccucgaccccuacgacaagucccuccacucccgcgucuuccccggcggcaagugccucggcgucaccaucuccuccaccuacugcuccaccaaccacgacuacaccaucuggaugcccgaggaggccggccucggcaccuccugcgacaucuucaccaacucccgcggcaagcgcgccuccaagggcggccgcaucugcggcuucgucgacgagcgcggccucuacaagucccucaagggcgccugcaagcucaagcucugcggcguccccggccuccgccucauggacggcaccugggucuccauccaggcccccgacgagaccaaguggugcccccccgaccaggucgucaaccuccacgacuuccacuccgacgagaucgagcaccucgucgucgaggagcucaucaagaagcgcgaggagugccucgacgcccucgaguccaucaugaccaccaaguccgucuccuuccgccgccucucccaccuccgcaagcucguccccggcuucggcaaggccuacaccaucuucaacaagacccucauggaggccgacgcccacuacaaguccguccgcaccuggaacgaggucguccccuccaagggcugccucaaggucggcggccgcugccacuccgacgucgacggcgucuucuucaacggcaucauccucggccccgacggcaacguccucauccccgagaugcaguccucccuccuccagcagcacauggagcuccucgaguccuccgucaucccccucaugcacccccucgccgaccccuccaccaucuucaaggacuccgacgaggccgaggacuucgucgacguccaccuccccgacguccacaagcaggucuccggcgucgaccucggccuccccuccuggggcaaguaccuccucauguccgccggcgcccucgccacccucauguccgccaucuuccucgucaccugcugcaagaaggucaagcgcgccgagcccgcccaccacggccccaaggaguccggccgcaagaucuccgucaccccccagaacggcaaggucaucuccuccugggaggucuacaaguccggcaacgagcccggccucuga

SEQ ID NO: 127713 - RNA, 1575 nt, Artificial Sequence
  derived and/or modified CDS sequence (opt2) from glycoprotein__RABV__KM594026.1
augaucccccaggcccuccucuucgucccccuccucaucuccuccuccugcuucggcaaguuccccgucuacaccauccccgagaagcucggccccuggucccccaucgacauccaccaccucuccugccccaacaaccucgccgucgaggacgagggcugcaacucccucuccggcuucuccuacauggagcucaaggucggcuacaucuccgccaucaaggucaacggcuucaccugcaccggcgucgucaccgaggccgagaccuacaccaacuucgucggcuacgucaccaccaccuucaagcgcaagcacuuccgccccaugcccgacgccugccgcgccgccuacaacuggaagauggccggcgacccccgcuacgaggagucccuccacaaccccuaccccgacuaccacuggcuccgcaccgucaccaccaccaaggagucccucaucaucaucucccccuccgucgccaaccucgaccccuacgacaagucccuccacucccgcgucuuccccggcggcaagugcaugggcaucaccgucuccuccaccuucugcuccaccaaccacgacuacaccaucuggaugcccgagaacgcccgccucggcaccuccugcgacaucuucaccaccuccaagggcaagaaggccuccaagggcggcaagaucugcggcuucgucgacgagcgcggccucuacaagucccucaagggcgccugcaagcucaagcucugcggcgucuccggccuccgccuccucgacggcaccugggucaccauccagaccuccgacgagaucaaguggugcccccccgacaagcucgucaaccuccacgacuuccacuccgacgagaucgagcaccucgucgucgaggagcucguccgcaagcgcgaggagugccucgacacccucgaguccaucaugaccaccaaguccgucuccuuccgccgccucucccaccuccgcaagcucguccccggcuucggcaaggccuacaccaucuucaacaagacccucauggaggccgacgcccacuacaaguccgucaacaccuggaacgagaucauccccuccaagggcugccucaccgucggcggccgcugccacccccacgucaacggcgucuucuucaacggcaucauccucggccccgacggccacguccucauccccgagaugcaguccucccuccuccagcagcacauggagcuccucgaguccuccgucaucccccucaugcacccccucgccgaccccuccaccgucuucaaggacggcgacgaggccgaggacuucgucgagguccaccuccccgacguccacaagcaggucuccggcaucgaccucggccuccccaacuggggcaaguacguccucaucuccgccggcuuccucgucacccuccuccucaucaucuucuucaugaucugcugccgccgcgccaaccgccgcgucuccacccagcagucccucggcgaguccggcaagaaggucuucgucaucccccagaacggcaaggucaucuccuccugggaguccuacaagaacggcaccgagacccgccucuga

SEQ ID NO: 127714 - RNA, 1575 nt, Artificial Sequence
  derived and/or modified CDS sequence (opt2) from glycoprotein__RABV__KM594027.1
augaucccccaggcccuccucuucgucccccuccucaucuccuccuccugcuucggcaaguuccccgucuacaccauccccgagaagcucggccccuggucccccaucgacauccaccaccucuccugccccaacaaccucgccgucgaggacgagggcugcaacucccucuccggcuucuccuacauggagcucaaggucggcuacaucuccgccaucaaggucaacggcuucaccugcaccggcgucgucaccgaggccgagaccuacaccaacuucgucggcuacgucaccaccaccuucaagcgcaagcacuuccgccccaugcccgacgccugccgcgccgccuacaacuggaagauggccggcgacccccgcuacgaggagucccuccacaaccccuaccccgacuaccacuggcuccgcaccgucaccaccaccaaggagucccucaucaucaucucccccuccgucgccaaccucgaccccuacgacaagucccuccacucccgcgucuuccccggcggcaagugcaugggcaucaccgucuccuccaccuucugcuccaccaaccacgacuacaccaucuggaugcccgagaacgcccgccucggcaccuccugcgacaucuucaccaccuccaagggcaagaaggccuccaagggcggcaagaucugcggcuucgucgacgagcgcggccucuacaagucccucaagggcgccugcaagcucaagcucugcggcgucuccggccuccgccuccucgacggcaccugggucaccauccagaccuccgacgagaucaaguggugcccccccgacaagcucgucaaccuccacgacuuccacuccgacgagaucgagcaccucgucgucgaggagcucguccgcaagcgcgaggagugccucgacacccucgaguccaucaugaccaccaaguccgucuccuuccgccgccucucccaccuccgcaagcucguccccggcuucggcaaggccuacaccaucuucaacaagacccucauggaggccgacgcccacuacaaguccgucaacaccuggaacgagaucauccccuccaagggcugccucaccgucggcggccgcugccacccccacgucaacggcgucuucuucaacggcaucauccucggccccgacggccacguccucauccccgagaugcaguccucccuccuccagcagcacauggagcuccucgaguccuccgucaucccccucaugcacccccucgccgaccccuccaccgucuucaaggacggcgacgaggccgaggacuucgucgagguccaccuccccgacguccacaagcaggucuccggcaucgaccucggccuccccaacuggggcaaguacguccucaucuccgccggcuuccucgucacccuccuccucaucaucuuccucaugaucugcugccgccgcgccaaccgccgcgucuccacccagcagucccucggcgaguccggcaagaaggucuucgucaucccccagaacggcaaggucaucuccuccugggaguccuacaagaacggcgccgagacccgccucuga

SEQ ID NO: 127715 - RNA, 1575 nt, Artificial Sequence
  derived and/or modified CDS sequence (opt2) from glycoprotein__RABV__KM594028.1
augaucccccaggcccuccucuucgucccccuccucaucuccuccuccugcuucggcaaguuccccgucuacaccauccccgagaagcucggccccuggucccccaucgacauccaccaccucuccugccccaacaaccucgccgucgaggacgagggcugcaacucccucuccggcuucuccuacauggagcucaaggucggcuacaucuccgccaucaaggucaacggcuucaccugcaccggcgucgucaccgaggccgagaccuacaccaacuucgucggcuacgucaccaccaccuucaagcgcaagcacuuccgccccaugcccgacgccugccgcgccgccuacaacuggaagauggccggcgacccccgcuacgaggagucccuccacaaccccuaccccgacuaccacuggcuccgcaccgucaccaccaccaaggagucccucaucaucaucucccccuccgucgccaaccucgaccccuacgacaagucccuccacucccgcgucuuccccggcggcaagugcaugggcaucaccgucuccuccaccuucugcuccaccaaccacgacuacaccaucuggaugcccgagaacgcccgccucggcaccuccugcgacaucuucaccaccuccaagggcaagaaggccuccaagggcggcaagaucugcggcuucgucgacgagcgcggccucuacaagucccucaagggcgccugcaagcucaagcucugcggcgucuccggccuccgccuccucgacggcaccugggucaccauccagaccuccgacgagaucaaguggugcccccccgacaagcucgucaaccuccacgacuuccacuccgacgagaucgagcaccucgucgucgaggagcucguccgcaagcgcgaggagugccucgacacccucgaguccaucaugaccaccaaguccgucuccuuccgccgccucucccaccuccgcaagcucguccccggcuucggcaaggccuacaccaucuucaacaagacccucauggaggccgacgcccacuacaaguccgucaacaccuggaacgagaucauccccuccaagggcugccucaccgucggcggccgcugccacccccacgucaacggcgucuucuucaacggcaucauccucggccccgacggccacguccucauccccgagaugcaguccucccuccuccagcagcacauggagcuccucgaguccuccgucaucccccucaugcacccccucgccgaccccuccaccgucuucaaggagggcgacgaggccgaggacuucgucgagguccaccuccccgacguccacaagcaggucuccggcaucgaccucggccuccccaacuggggcaaguacguccucaucuccgccggcuuccucgucacccuccuccucaucaucuuccucaugaucugcugccgccgcgccaaccgccgcgucuccacccagcagucccucggcgaguccggcaagaagauguucgucaucccccagaacggcaaggucaucuccuccugggaguccuacaagaacggcgccgagaccggccucuga

SEQ ID NO: 127716 - RNA, 1575 nt, Artificial Sequence
  derived and/or modified CDS sequence (opt2) from glycoprotein__RABV__KM594029.1
augauccaccaggcccuccuccucgucccccucaugaucuccucccagugccucggcaaguuccccaucuacaccauccccgacaagcucggccccuggucccccaucgacauccaccaccucuccugccccaacaaccucaucgucgaggacgagggcugcaccucccucuccggccucuccuacauggagcucaaggucggcuacaucuccgccaucaaggucaacggcuucaccugcaccggcgucgucaccgaggccgagaccuacaccaacuucgucggcuacgucaccaccaccuucaagcgcaagcacuuccgccccaugcccgacgccugccgcgccgccuacaacuggaagaucgccggcgacccccgcuacgaggagucccuccagaaccccuaccccgacucccacuggcuccgcaccgucaagaccaccaaggagucccucaucaucaucucccccuccgucgccgaccucgaccccuacgacaagucccuccgcucccgcgucuuccccggcggcaagugccucggcaucaccaucuccuccaccuacugcuccaccaaccacgacuacaccaucuggaugcccgaggaggcccgccucggcaccuccugcgacaucuucaccaacuccaagggcaagcgcgccuccaagggcggcaagaucugcggcuucgucgacgagcgcggccucuacaagucccucaagggcgccugcaagcucaagcucugcggcgucuccggccuccgccucauggacggcaccugggucuccauccagauccccgacgagaucaaguggugccccuccgaccagcucgucaaccuccacgacuuccacuccgacgagaucgagcaccucgucgucgaggagcucgucaagaagcgcgaggagugccucgacgcccucgaguccaucaugaccaccaaguccgucuccuuccgccgccucucccaccuccgcaagcucguccccggcuucggcaaggccuacaccaucuucaacaagacccucauggaggccgacgcccacuacaacuccguccgcaccuggaacgagaucauccccuccaagggcugccucaaggucggcggccgcugccacccccacgucgacggcgucuucuucaacggcaucaucaugggccccgacggcuccguccucauccccgagaugcaguccucccuccuccagcagcacauggagcuccucgaguccuccgucaucccccucaugcacccccucgccgaccccuccaccgucuucaaggacgacgacgaggccgagaacuucgucgagguccaccuccccgacauccacaagcaggucuccggcaucgaccucggccuccccgacuggggcaaguaccuccucauguccaccggcgcccucgccgcccucauccucaccaucuuccucauccucugcugccgcaaggucaaccgcaaggaguccauccagcgcucccucgaggaguccggccgcaagguccccgucaccccccagaacggcaaggucaucuccuccugggagcucuacaagaacggcggcgagaccaagcucuga

SEQ ID NO: 127717 - RNA, 1575 nt, Artificial Sequence
  derived and/or modified CDS sequence (opt2) from glycoprotein__RABV__KM594030.1
augaucccccaggcccuccucuucguccuccuccucaucuccuccuccugcuucggcaaguuccccgucuacaccauccccgacaagcucggccccuggucccccaucgacauccaccaccucuccugccccaacaaccucaucgucgaggacgagggcugcaacaaccucuccggcuucuccuacauggagcucaaggucggcuacaucuccgccaucaaggucaacggcuucaccugcaccggcgucgucaccgaggccgagaccuacaccaacuucgucggcuacgucaccaccaccuucaagcgcaagcacuuccgccccacccccgacgccugccgcgccgccuacaacuggaagauggccggcgacccccgcuacgaggagucccuccacaaccccuaccccgacuaccacuggcuccgcaccgucaagaccaccaaggagucccucaucaucaucucccccuccgucgccgaccucgaccccuacgacaagucccuccacucccgcgucuuccccuccggcaagugccucggcaucaccaucuccuccaccuacugcuccaccaaccacgacuacaccaucuggaugcccgagaaggcccgccucggcaccuccugcgacaucuucaccaacuccaagggcaagaaggccuccaagggcggcaaggucugcggcuucgucgacgagcgcggccucuacaagucccucaagggcgccugcaagcucaagcucugcggcguccccggccuccgccucauggacggcaccugggucuccguccagacccccgacgaggccaaguggugcccccccgaccagcucgucaaccuccacgacuuccacuccgacgagaucgagcaccucgucgucgaggagcucgucaagaagcgcgaggagugccucgacacccucgaguccaucaugaccaccaaguccgucuccuuccgccgccucucccaccuccgcaagcucguccccggcuucggcaaggccuacaccaucuucaacaagacccucauggaggccgacgcccacuacaaguccguccacaccuggaacgaggucauccccuccaagggcugccucaaggucggcggccgcugccacccccacgucaacggcgucuuccucaacggcaucauccucggccccgacggcaacguccucauccccgagaugcaguccucccuccuccagcagcacauggagcuccucgaguccuccgucaucccccucaugcacccccucuccgaccccuccaccgucuucaaggacggcgacgaggccgaggacuucgucgagguccaccuccccgacguccacaagcaggucuccggcgucgacuucggccuccccaacuggggccgcuacguccucauguccgccggcguccucgccauccucauccucaccaucuuccucaugaucugcugccgccgcgucaaccgcaaggacuccucccgcuccucccccggcgagcucggccgcaaggucuccgucaccccccagaacggcaaggucaucuccuccugggaguccuacaaguccgagggcgagacccgccucuga

SEQ ID NO: 127718 - RNA, 1575 nt, Artificial Sequence
  derived and/or modified CDS sequence (opt2) from glycoprotein__RABV__KM594031.1
augaucccccaggcccuccucuucguccuccuccucaucuccuccuccugcuucggcaaguuccccgucuacaccauccccgacaagcucggccccuggucccccaucgacauccaccaccucuccugccccaacaaccucaucgucgaggacgagggcugcaacaaccucuccggcuucuccuacauggagcucaaggucggcuacaucuccgccaucaaggucaacggcuucaccugcaccggcgucgucaccgaggccgagaccuacaccaacuucgucggcuacgucaccaccaccuucaagcgcaagcacuuccgccccacccccgacgccugccgcgccgccuacaacuggaagauggccggcgacccccgcuacgaggagucccuccacaaccccuaccccgacuaccacuggcuccgcaccgucaagaccaccaaggagucccucaucaucaucucccccuccgucgccgaccucgaccccuacgacaagucccuccacucccgcgucuuccccuccggcaagugccucggcaucaccaucuccuccaccuacugcuccaccaaccacgacuacaccaucuggaugcccgagaaggcccgccucggcaccuccugcgacaucuucaccaacuccaagggcaagaaggccuccaagggcggcaaggucugcggcuucgucgacgagcgcggccucuacaagucccucaagggcgccugcaagcucaagcucugcggcguccccggccuccgccucauggacggcaccugggucuccguccagacccccgacgaggccaaguggugcccccccgaccagcucgucaaccuccacgacuuccacuccgacgagaucgagcaccucgucgucgaggagcucgucaagaagcgcgaggagugccucgacacccucgaguccaucaugaccaccaaguccgucuccuuccgccgccucucccaccuccgcaagcucguccccggcuucggcaaggccuacaccaucuucaacaagacccucauggaggccgacgcccacuacaaguccguccacaccuggaacgaggucauccccuccaagggcugccucaaggucggcggccgcugccacccccacgucaacggcgucuuccucaacggcaucauccucggccccgacggcaacguccucauccccgagaugcaguccucccuccuccagcagcacauggagcuccucgaguccuccgucaucccccucaugcacccccucuccgaccccuccaccgucuucaaggacggcgacgaggccgaggacuucgucgagguccaccuccccgacguccacaagcaggucuccggcgucgacuucggccuccccaacuggggccgcuacguccucauguccgccggcguccucgccauccucauccucaccaucuuccucaugaucugcugccgccgcgucaaccgcaaggacuccucccgcuccucccucggcgagcucggccgcaaggucuccgucaccccccagaacggcaaggucaucuccuccugggaguccuacaaguccgagggcgagacccgccucuga

SEQ ID NO: 127719 - RNA, 1575 nt, Artificial Sequence
  derived and/or modified CDS sequence (opt2) from glycoprotein__RABV__KM594032.1
augaucccccaggcccuccucuucguccuccuccucaucuccucccucugcuccggcaaguuccccaucuacaccauccccgacaagcucggccccuggucccccaucgacauccaccaccucuccugccccaacaaccucaucgucgaggacgagggcugcuccucccucuccggcuucuccuacauggagcucaaggucggcuacaucuccgccaucaaggucaacggcuucaccugcaccggcgucgucaccgaggccgagaccuacaccaacuucgucggcuacgucaccaccaccuucaagcgcaagcacuuccgccccaugcccgacgccugccgcgccgccuacaacuggaagauggccggcgacccccgcuacgaggagucccuccacaaccccuaccccgacuaccacuggcuccgcaccgucaagaccaccaaggagucccucaucaucaucucccccuccgucgccgaccucgaccccuacgacaagucccuccacucccgcgucuuccccggcggcaagugccucggcaucaccaucuccuccaccuacugcuccaccaaccacgacuacaccaucuggaugcccgaggagccccgccuccgcaccuccugcgacaucuucaccaacuccaagggcaagcgcgccuccaagggcggcaagaugugcggcuucgucgacgagcgcggccucuacaagucccucaagggcgccugcaagcucaagcucugcggcguccccggccuccgccucauggacggcaccugggucuccguccagacccccgacgagaccaaguggugcucccccgaccagcucgucaaccuccacgacuuccacuccgacgagaucgagcaccucgucgucgaggagcucgucaagaagcgcgaggagugccucgacacccucgaguccaucaugaccaccaaguccgucuccuuccgccgccucucccaccuccgcaagcucguccccggcuucggcaaggccuacaccaucuucaacaagacccucauggaggccgacgcccacuacaaguccauccagaccuggaacgaggucauccccuccaagggcugccucaaggucggcggccgcugccacccccacgucaacggcgucuuccucaacggcaucauccucggccccgacggcaacguccucauccccgagaugcaguccucccuccuccagcagcacauggagcuccucgaguccuccgucaucccccucaugcacccccucuccgaccccuccaccgucuucaaggacggcgacgaggccgaggacuucgucgagguccaccuccccgacguccacaagcaggucuccggcgucgacuucggccuccccaacuggggccgcuacguccucauguccgccggcgcccucgccauccucaugcucaccaucuuccucaugaucugcugccgcaaggucaagcgcaccgacuccucccaguccucccucgaggagcuccgccgcaaggucuccgucaccccccagaacggcaaggucaucuccuccugggaguccuacaaguccgagggcgagacccgccucuga

SEQ ID NO: 127720 - RNA, 1575 nt, Artificial Sequence
  derived and/or modified CDS sequence (opt2) from glycoprotein__RABV__KM594033.1
augaucccccaggcccuccuccucgucccccucgucaucuccucccucugccucggcaaguuccccaucuacaccauccccgacaagcucggccccuggucccccaucgacauccaccaccucuccugccccaacaaccucgucgucgaggacgagggcugcaccucccucuccggcuucuccuacauggagcucaaggucggcuacaucuccgccaucaaggucaacggcuucaccugcaccggcgucgucaccgaggccgagaccuacaccaacuucgucggcuacgucaccaccaccuucaagcgcaagcacuuccgccccauguccgacgccugccgcgccgccuacaacuggaaggucgccggcgacccccgcuacgaggagucccuccagaaccccuaccccgacuaccacuggcuccgcaccgucaagaccaccaaggagucccucaucaucaucucccccuccgucgccgaccucgaccccuacgacaagucccuccgcucccgcaucuuccccggcggcaagugccucggcaucaccgucuccuccaccuacugcuccaccaaccacgacuacaccaucuggaugcccgaggaggcccgccucggcaccuacugcgacaucuucaccaacuccaagggcaagcgcgccuccaagggcggcaagaucugcggcuucgucgacgagcgcggccucuacaagucccucaagggcgccugccgccucaagcucugcggcgucuccggccuccgccucauggacggcaccugggucgccauccagaccuccgaggagaccaaguggugccccuccgaccagcucgucaaccuccacgacuuccacuccgacgagaucgagcaccucgucgucgaggagcucgucaagaagcgcgaggagugccucgacacccucgaguccaucaugaccaccaaguccgucuccuuccgccgccucucccaccuccgcaagcucguccccggcuucggcaaggccuacaccaucuucaacaagacccucauggaggccgacgcccacuacaacuccguccgcaccuggaacgagaucauccccuccaagggcugccucaaggucggcggccgcugccacccccacgucgacggcgucuucuucaacggcaucauccucggccccgacggcaacguccucauccccgagaugcaguccucccuccuccagcagcacauggagcuccucgaguccuccgucaucccccucaugcacccccucgccgaccccuccaccgucuucaaggagggcgacgaggccgagaacuucgucgagguccaccuccccgacauccacaagcaggucuccggcaucgaccucggccuccccaacuggggcaaguaccuccucauguccgccggcgcccucgccgcccucauccucaccaucuuccucaucaccugcugccgccgcgucaaccgcaccgaguccaucaagcgcggccccgaggagucccgccgcaaggucuccgucaccccccagaacggcaaggucaucuccuccugggagcucuacaagaacggcggcgagaccaagcucuga

SEQ ID NO: 127721 - RNA, 1575 nt, Artificial Sequence
  derived and/or modified CDS sequence (opt2) from glycoprotein__RABV__KM594034.1
augaucccccaggcccuccuccucgucccccucgucaucuccucccucugccucggcaaguuccccaucuacaccauccccgacaagcucggccccuggucccccaucgacauccaccaccucuccugccccaacaaccucgucgucgaggacgagggcugcaccucccucuccggcuucuccuacauggagcucaaggucggcuacaucuccgccaucaaggucaacggcuucaccugcaccggcgucgucaccgaggccgagaccuacaccaacuucgucggcuacgucaccaccaccuucaagcgcaagcacuuccgccccauguccggcgccugccgcgccgccuacaacuggaaggucgccggcgacccccgcuacgaggagucccuccagaaccccuaccccgacuaccacuggcuccgcaccgucaagaccaccaaggagucccucaucaucaucucccccuccgucgccgaccucgaccccuacgacaagucccuccgcucccgcaucuuccccggcggcaagugccucggcaucaccgucuccuccaccuacugcuccaccaaccacgacuacaccaucuggaugcccgaggaggcccgccucggcaccuccugcgacaucuucaccaacuccaagggcaagcgcgccuccaagggcggcaagaucugcggcuucgucgacgagcgcggccucuacaagucccucaagggcgccugccgccucaagcucugcggcgucuccggccuccgccucauggacggcaccugggucgccauccagaccuccgaggagaccaaguggugccccuccgaccagcucgucaaccuccacgacuuccacuccgacgagaucgagcaccucgucgucgaggagcucgucaagaagcgcgaggagugccucgacacccucgaguccaucaugaccaccaaguccgucuccuuccgccgccucucccaccuccgcaagcucguccccggcuucggcaaggccuacaccaucuucaacaagacccucauggaggccgacgcccacuacaacuccguccgcaccuggaacgagaucauccccuccaagggcugccuccgcgucggcggccgcugccacccccacgucgacggcgucuucuucaacggcaucauccucggccccgacggcaacguccucauccccgagaugcaguccucccuccuccagcagcacauggagcuccucgaguccuccgucaucccccucaugcacccccucgccgaccccuccaccgucuucaaggagggcgacgaggccgagaacuucgucgagguccaccuccccgacauccacaagcaggucuccggcaucgaccucggccuccccaacuggggcaaguaccuccucauguccgccggcgcccucgccgcccucauccucaccaucuuccucaucaccugcugccgccgcgucaaccgcaccgaguccaucaagcagggccccgaggagucccgccgcaaggucuccgucaccccccagaacggcaaggucaucuccuccugggagcucuacaagaacggcggcgagaccaagcucuga

SEQ ID NO: 127722 - RNA, 1575 nt, Artificial Sequence
  derived and/or modified CDS sequence (opt2) from glycoprotein__RABV__KM594035.1
augaucccccaggcccuccuccucgucccccucgucaucuccucccucugccucggcaaguuccccaucuacaccauccccgacaagcucggccccuggucccccaucgacauccaccaccucuccugccccaacaaccucgucgucgaggacgagggcugcaccucccucuccggcuucuccuacauggagcucaaggucggcuacaucuccgccaucaaggucaacggcuucaccugcaccggcgucgucaccgaggccgagaccuacaccaacuucgucggcuacgucaccaccaccuucaagcgcaagcacuuccgccccauguccgacgccugccgcgccgccuacaacuggaaggucgccggcgacccccgcuacgaggagucccuccagaaccccuaccccgacuaccacuggcuccgcaccgucaagaccaccaaggagucccucaucaucaucucccccuccgucgccgaccucgaccccuacgacaagucccuccgcucccgcaucuuccccggcggcaagugccucggcaucaccgucuccuccaccuacugcuccaccaaccacgacuacaccaucuggaugcccgaggaggcccgccucggcaccuccugcgacaucuucaccaacuccaagggcaagcgcgccuccaagggcggcaagaucugcggcuucgucgacgagcgcggccucuacaagucccucaagggcgccugccgccucaagcucugcggcgucuccggccuccgccucauggacggcaccugggucgccauccagaccuccgaggagaccaaguggugccccuccgaccagcucgucaaccuccacgacuuccacuccgacgagaucgagcaccucgucgucgaggagcucgucaagaagcgcgaggagugccucgacacccucgaguccaucaugaccaccaaguccgucuccuuccgccgccucucccaccuccgcaagcucguccccggcuucggcaaggccuacaccaucuucaacaagacccucauggaggccgacgcccacuacaacuccguccgcaccuggaacgagaucauccccuccaagggcugccucaaggucggcggccgcugccacccccacgucgacggcgucuucuucaacggcaucauccucggccccgacggcaacguccucauccccgagaugcaguccucccuccuccagcagcacauggagcuccucgaguccuccgucaucccccucaugcacccccucgccgaccccuccaccgucuucaaggagggcgacgaggccgagaacuucgucgagguccaccuccccgacauccacaagcaggucuccggcaucgaccucggccuccccaacuggggcaaguaccuccucauguccgccggcgcccucgccgcccucauccucaccaucuuccucaucaccugcugccgccgcgucaaccgcaccgaguccaucaagcgcggccccgaggagucccgccgcaaggucuccgucaccccccagaacggcaaggucaucuccuccugggagcucuacaagaacggcggcgagaccaagcucuga

SEQ ID NO: 127723 - RNA, 1575 nt, Artificial Sequence
  derived and/or modified CDS sequence (opt2) from glycoprotein__RABV__KM594036.1
augaucccccaggcccuccuccucgucccccucgucaucuccucccucugccucggcaaguuccccaucuacaccauccccgacaagcucggccccuggucccccaucgacauccaccaccucuccugccccaacaaccucgucgucgaggacgagggcugcaccucccucuccggcuucuccuacauggagcucaaggucggcuacaucuccgccaucaaggucaacggcuucaccugcaccggcgucgucaccgaggccgagaccuacaccaacuucgucggcuacgucaccaccaccuucaagcgcaagcacuuccgccccauguccgacgccugccgcgccgccuacaacuggaaggucgccggcgacccccgcuacgaggagucccuccagaaccccuaccccgacuaccacuggcuccgcaccgucaagaccaccaaggagucccucaucaucaucucccccuccgucgccgaccucgaccccuacgacaagucccuccgcucccgcaucuuccccggcggcaagugccucggcaucaccgucuccuccaccuacugcuccaccaaccacgacuacaccaucuggaugcccgaggaggcccgccucggcaccuccugcgacaucuucaccaacuccaagggcaagcgcgccuccaagggcggcaagaucugcggcuucgucgacgagcgcggccucuacaagucccucaagggcgccugccgccucaagcucugcggcgucuccggccuccgccucauggacggcaccugggucgccauccagaccuccgaggagaccaaguggugccccuccgaccagcucgucaaccuccacgacuuccacuccgacgagaucgagcaccucgucgucgaggagcucgucaagaagcgcgaggagugccucgacacccucgaguccaucaugaccaccaaguccgucuccuuccgccgccucucccaccuccgcaagcucguccccggcuucggcaaggccuacaccaucuucaacaagacccucauggaggccgacgcccacuacaacuccguccgcaccuggaacgagaucauccccuccaagggcugccucaaggucggcggccgcugccacccccacgucgacggcgucuucuucaacggcaucauccucggccccgacggcaacguccucauccccgagaugcaguccucccuccuccagcagcacauggagcuccucgaguccuccgucaucccccucaugcacccccucgccgaccccuccaccgucuucaaggagggcgacgaggccgagaacuucgucgagguccaccuccccgacauccacaagcaggucuccggcaucgaccucggccuccccaacuggggcaaguaccuccucauguccgccggcgcccucgccgcccucauccucaccaucuuccucaucaccugcugccgccgcgucaaccgcaccgaguccaucaagcagggccccgaggagucccgccgcaaggucuccgucaccccccagaacggcaaggucaucuccuccugggagcucuacaagaacggcggcgagaccaagcucuga

SEQ ID NO: 127724 - RNA, 1575 nt, Artificial Sequence
  derived and/or modified CDS sequence (opt2) from glycoprotein__RABV__KM594037.1
augauccuccaggcccuccucuucgucccccuccucaucuccucccucugcuucggcaaguuccccaucuacaccauccccgacaagcucggccccuggucccccaucgacauccaccaccucuccugccccaacaaccucgucgucgaggacgagggcugcaccucccucuccggcuucuccuacauggagcucaaggucggcuacaucuccgccaucaaggucaacggcuucaccugcaccggcgucgucaccgaggccgagaccuacaccaacuucgucggcuacgucaccaccaccuucaagcgcaagcacuuccgccccacccccgacgccugccgcgccgccuacaacuggaaggucgccggcgacccccgcuacgaggagucccuccagaaccccuaccccgacuaccacuggcuccgcaccgucaagaccaccaaggagucccucaucaucaucucccccuccgucgccgaccucgaccccuacgacaagucccuccacucccgcgucuuccccuccggcaagugccucggcaucaccaucuccuccaccuacugcuccaccaaccacgacuacaccaucuggaugcccgaggaggcccgccucggcaccuccugcgacaucuucaccuccuccaagggcaagaaggccuccaagggcggcaagaccugcggcuucgucgacgagcgcggccucuacaagucccucaagggcgccugcaagcucaagcucugcggcguccccggccuccgccucauggacggcaccugggucaccauccagaccuccgacgagaccaaguggugcccccccgaccagcucgucaaccuccacgacuuccacuccgacgagaucgagcaccucgucgucgaggagcucgucaagaagcgcgaggagugccucgacgcccucgaguccaucaugaccaccaaguccgucuccuuccgccgccucucccaccuccgcaagcucguccccggcuucggcaaggccuacaccaucuucaacaagacccucauggaggccgacgcccacuacaaguccguccgcaccuggaacgagaucauccccuccaagggcugccucaaggucggcggccgcugccacccccacgucgacggcgucuucuucaacggcaucauccucggccccgacggcaacguccucauccccgagaugcaguccucccuccuccagcagcacauggagcuccucgaguccuccgucaucccccucaugcacccccucgccgaccccuccaccgucuucaaggacggcgacgaggccgaggacuucgucgagguccaccuccccgacguccacaagcagaucuccggcgucgaccucggccuccccuccuggggcaaguaccuccucaugaucgccggcgcccucgccggccucauccucaucaucuuccucauggccugcugccgccgcgccaagcgcaccgagucccgccgccgcggcuccggcgaguccgagcgcaagguccccguccccccccagaacggcaaggucaucuccuccugggagcucuacaaguccgagggcgagaccggccucuga

SEQ ID NO: 127725 - RNA, 1575 nt, Artificial Sequence
  derived and/or modified CDS sequence (opt2) from glycoprotein__RABV__KM594038.1
augauccuccaggcccuccucuucgucccccuccucaucuccucccucugcuucggcaaguuccccaucuacaccauccccgacaagcucggccccuggucccccaucgacauccaccaccucuccugccccaacaaccucgucgucgaggacgagggcugcaccucccucuccggcuucuccuacauggagcucaaggucggcuacaucuccgccaucaaggucaacggcuucaccugcaccggcgucgucaccgaggccgagaccuacaccaacuucgucggcuacgucaccaccaccuucaagcgcaagcacuuccgccccacccccgacgccugccgcgccgccuacaacuggaaggucgccggcgacccccgcuacgaggagucccuccagaaccccuaccccgacuaccacuggcuccgcaccgucaagaccaccaaggagucccucaucaucaucucccccuccgucgccgaccucgaccccuacgacaagucccuccacucccgcgucuuccccuccggcaagugccucggcaucaccaucuccuccaccuacugcuccaccaaccacgacuacaccaucuggaugcccgaggaggcccgccucggcaccuccugcgacaucuucaccuccuccaagggcaagaaggccuccaagggcggccgcaccugcggcuucgucgacgagcgcggccucuacaagucccucaagggcgccugcaagcucaagcucugcggcguccccggccuccgccucauggacggcaccugggucaccauccagaccuccgacgagaccaaguggugcccccccgaccagcucgucaaccuccacgacuuccacuccgacgagaucgagcaccucgucgucgaggagcucgucaagaagcgcgaggagugccucgacgcccucgaguccaucaugaccaccaaguccgucuccuuccgccgccucucccaccuccgcaagcucguccccggcuucggcaaggccuacaccaucuucaacaagacccucauggaggccgacgcccacuacaaguccguccgcaccuggaacgagaucauccccuccaagggcugccucaaggucggcggccgcugccacccccacgucgacggcgucuucuucaacggcaucauccucggccccgacggcaacguccucauccccgagaugcaguccucccuccuccagcagcacauggagcuccucgaguccuccgucaucccccucaugcacccccucgccgaccccuccaccgucuucaaggacggcgacgaggccgaggacuucgucgagguccaccuccccgacguccacaagcagaucuccggcgucgaccucggccuccccuccuggggcaaguaccuccucaugaucgccggcgcccucgccggccucauccucaucaucuuccucauggccugcugccgccgcgccaagcgcaccgagucccgccgccgcggcuccggcgaguccgagcgcaagguccccguccccccccagaacggcaaggucaucuccuccugggagcucuacaaguccgagggcgagaccggccucuga

SEQ ID NO: 127726 - RNA, 1575 nt, Artificial Sequence; identical to SEQ ID NO: 126561
  derived and/or modified CDS sequence (opt2) from glycoprotein__RABV__KM594039.1

SEQ ID NO: 127727 - RNA, 1575 nt, Artificial Sequence; identical to SEQ ID NO: 126577
  derived and/or modified CDS sequence (opt2) from glycoprotein__RABV__KM594040.1

SEQ ID NO: 127728 - RNA, 1575 nt, Artificial Sequence
  derived and/or modified CDS sequence (opt2) from glycoprotein__RABV__KM594041.1
augauccuccaggcccuccucuucgucccccuccucaucuccucccucugccucggcaaguuccccaucuacaccauccccgacaagcucggccccuggucccccaucgacauccaccaccucuccugccccaacaaccucgucgucgaggacgagggcugcaccaaccucuccggcuucuccuacauggagcucaaggucggcuacaucuccgccaucaaggucaacggcuucaccugcaccggcgucgucaccgaggccgagaccuacaccaacuucgucggcuacgucaccaccaccuucaagcgcaagcacuuccgccccauccccgacgccugccgcgccgccuacaacuggaagauggccggcgacccccgcuacgaggagucccuccagaaccccuaccccgacuaccacuggcuccgcaccgucaagaccaccaaggagucccucaucaucaucucccccuccgucgccgaccucgaccccuacgacaagucccuccacucccgcgucuuccccggcggcaagugccucggcaucaccgucuccuccaccuacugcuccaccaaccacgacuacaccaucuggaugcccgaggagccccgccucggcaccuccugcgacaucuucaccuccuccaagggcaagaaggccuccaagggcggcaagaccugcggcuucgucgacgagcgcggccucuacaagucccucaagggcgccugcaagcucaagcucugcggcguccucggccuccgccucauggacggcaccugggucuccauccagaccuccgacgacaccaaguggugcccccccgaccagcucgucaaccuccacgacuuccacuccgacgagaucgagcaccucgucgucgaggagcucgucaagaagcgcgaggagugccucgacgcccucgaguccaucaugaccaccaaguccgucuccuuccgccgccucuccuaccuccgcaagcucguccccggcuucggcaaggccuacaccaucuucaacaagacccucauggaggccgacgcccacuacaaguccguccgcaccuggaacgagaucauccccuccaagggcugccucaagguccgcgagcgcugccacccccccgucgacggcgucuucuucaacggcaucauccucggccccgacggcaacguccucauccccgagaugcaguccucccuccuccagcagcacauggagcuccucgaguccuccgucaucccccucaugcacccccucgccgaccccuccaccgucuucaaggagggcgacgaggccgaggacuucgucgagguccaccuccccgacguccacaagcagaucuccggcgucgaccucggccuccccuccuggggcaaguaccuccucaugaucgccggcggccucgccacccucguccucaucaucugcuccauggccugcugccgccgcaccaagcgcaccgagucccgccgccgcggcucccgcgaguccgagaagaaggucaccgccgccccccagacccgcaaggucgucuccuccugggagcucuacaaguccgagggcgacgcccgccucuga

SEQ ID NO: 127729 - RNA, 1575 nt, Artificial Sequence; identical to SEQ ID NO: 126577
  derived and/or modified CDS sequence (opt2) from glycoprotein__RABV__KM594042.1

SEQ ID NO: 127730 - RNA, 1575 nt, Artificial Sequence
  derived and/or modified CDS sequence (opt2) from glycoprotein__RABV__KM594043.1
augauccuccaggcccuccucuucgucccccuccucaucuccucccucugccucggcaaguuccccaucuacaccauccccgacaagcucggccccuggucccccaucgacauccaccaccucuccugccccaacaaccucgucgucgaggacgagggcugcaccaaccucuccggcuucuccuacauggagcucaaggucggcuacaucuccgccaucaaggucaacggcuucaccugcaccggcgucgucaccgaggccgagaccuacaccaacuucgucggcuacgucaccaccaccuucaagcgcaagcacuuccgccccauccccgacgccugccgcgccgccuacaacuggaagauggccggcgacccccgcuacgaggagucccuccagaaccccuaccccgacuaccacuggcuccgcaccgucaagaccaccaaggagucccucaucaucaucucccccuccgucgccgaccucgaccccuacgacaagucccuccacucccgcgucuuccccggcggcaagugccucggcaccaccgucuccuccaccuacugcuccaccaaccacgacuacaccaucuggaugcccgaggagccccgccucggcaccuccugcgacaucuucaccuccuccaagggcaagaaggccuccaagggcggcaagaccugcggcuucgucgacgagcgcggccucuacaagucccucaagggcgccugcaagcucaagcucugcggcguccucggccuccgccucauggacggcaccugggucuccauccagaccuccgacgacaccaaguggugcccccccgaccagcucgucaaccuccacgacuuccacuccgacgagaucgagcaccucgucgucgaggagcucgucaagaagcgcgaggagugccucgacgcccucgaguccaucaugaccaccaaguccgucuccuuccgccgccucuccuaccuccgcaagcucguccccggcuucggcaaggccuacaccaucuucaacaagacccucauggaggccgacgcccacuacaaguccguccgcaccuggaacgagaucauccccuccaagggcugccucaagguccgcgagcgcugccacccccccgucgacggcgucuucuucaacggcaucauccucggccccgacggcaacguccucauccccgagaugcaguccucccuccuccagcagcacauggagcuccucgaguccuccgucaucccccucaugcacccccucgccgaccccuccaccgucuucaaggagggcgacgaggccgaggacuucgucgagguccaccuccccgacguccacaagcagaucuccggcgucgaccucggccuccccuccuggggccgcuaccuccucaugaucgccggcggccucgccacccucguccucaucaucugcuccauggccugcugccgccgcaccaagcgcaccgagucccgccgccgcgacucccgcgaguccgagaagaaggucaccgucaccccccagacccgcaaggucgucuccuccugggagcucuacaaguccgagggcgacgccucccucuga

SEQ ID NO: 127731 - RNA, 1575 nt, Artificial Sequence
  derived and/or modified CDS sequence (opt2) from glycoprotein__RABV__KP723638.1
augguccuccagacccuccucuucguccccuuccucgucuucucccucugcuucggcaaguuccccaucuacaccauccccgacaagcucggccccuggucccccaucgacauccaccaccucuccugccccaacaaccucgucgucgaggacgagggcugcaccaaccucuccggcuucuccuacauggagcucaaggucggcuacaucuccgccaucaaggucaacggcuucaccugcaccggcgucgucaccgaggccgagaccuacaccaacuucgucggcuacgucaccaccaccuucaagcgcaagcacuuccgccccacccccgacgccugccgcgccgccuacaacuggaagauggccggcgacccccgcuacgaggagucccuccacaaccccuaccccgacuaccacuggcuccgcaccgucaagaccaccaaggagucccucgucaucaucucccccuccgucgccgaccucgaccccuacgacaagucccuccacucccgcgucuuccccuccggcaagugcuccggcaucaccgucuccuccaccuacugcuccaccaaccacgacuacaccaucuggaugcccgagaacccccgccucggcaccuccugcgacaucuucgccaacucccgcggcaagcgcgccuccaagggcuccaagaccugcggcuucgucgacgagcgcggccucuacaagucccucaagggcgccugcaagcucaagcucugcggcguccucggccuccgccucauggacggcaccugggucgccaugcagaccuccgaggagaccaaguggugcccccccgaccagcucgucaaccuccacgacuuccgcuccgacgagaucgagcaccucgucgucgaggagcucgucaagaagcgcgaggagugccucgacgcccucgaguccaucaugaccaccaaguccgucuccuuccgccgccucucccaccuccgcaagcucguccccggcuucggcaaggccuacaccaucuucaacaagacccucauggaggccgacgcccacuacaaguccguccgcaccuggaacgagaucauccccuccaagggcugccuccgcgucggcggccgcugccacccccacgucaacggcgucuucuucaacggcaucauccucggccccgacggccacguccucauccccgagaugcaguccucccuccuccagcagcacauggagcuccucgaguccuccgucaucccccucaugcacccccucgccgaccccuccaccgucuucaaggacggcgacgaggccgaggacuucgucgagguccaccuccccgacguccacaagcaggucuccggcgucgaccucggccuccccaacuggggcaaguacguccuccucuccgccggcacccucaucguccucaugcucaucaucuuccucaugaccugcugccgccgcgucaaccgccccaagcccacccagcgcucccucggcggcaccggccgcaaggucuccgucaccucccaguccggcaaggucaucuccuccugggaguccuacaaguccggcuccgagacccgccucuga

SEQ ID NO: 127732 - RNA, 1575 nt, Artificial Sequence
  derived and/or modified CDS sequence (opt2) from glycoprotein__RABV__KR105372.1
auggucccccagguccuccucuucgucccccuccucggcuucucccucugcuucggcaaguuccccaucuacaccauccccgacgagcucggccccuggucccccaucgacauccaccaccucuccugccccaacaaccucgucgucgaggacgagggcugcaccaaccucuccgaguucuccuacauggagcucaaggucggcuacaucuccgccaucaaggucaacggcuucaccugcaccggcgucgucaccgaggccgagaccuacaccaacuucgucggcuacgucaccaccaccuucaagcgcaagcacuuccgccccacccccgacgccugccgcgccgccuacaacuggaagauggccggcgacccccgcuacgaggagucccuccacaaccccuaccccgacuaccacuggcuccgcaccguccgcaccaccaaggagucccucaucaucaucucccccuccgucaccgaccucgaccccuacgacaagucccuccacucccgcgucuuccccggcggcaagugcuccggcaucaccgucuccuccaccuacugcuccaccaaccacgacuacaccaucuggaugcccgaggacccccgcccccgcacccccugcgacaucuucaccaacucccgcggcaagcgcgccuccaagggcaacaagaccugcggcuucgucgacgagcgcggccucuacaagucccucaagggcgccugccgccucaagcucugcggcguccucggccuccgccucauggacggcaccugggucgccaugcagaccuccgacgagaccaaguggugcccccccgaccagcucgucaaccuccacgacuuccacuccgacgagaucgagcaccucgucgucgaggagcucgucaagaagcgcgaggagugccucgacgcccucgaguccaucaugaccaccaaguccgucuccuuccgccgccucucccaccuccgcaagcucguccccggcuucggcaaggccuacaccaucuucaacaagacccucauggaggccgacgcccacuacaaguccguccgcaccuggaacgagaucauccccuccaagggcugccucaaggucggcggccgcugccacccccacgucaacggcgucuucuucaacggcaucauccucggccccgacggccacguccucauccccgagaugcaguccucccuccuccagcagcacauggagcuccucaaguccuccgucaucccccucaugcacccccucgccgaccccuccaccgucuucaaggagggcgacgaggccgaggacuucgucgagguccaccuccccgacgucuacaagcgcaucuccggcgucgaccucggccuccccaacuggggcaaguacguccucaugaccgccggcgccaugaucggccucguccucaucuucucccucaugaccuggugccgccgcgccaaccgccccgaguccaagcagcgcuccuucggcggcaccggccgcaacgucuccgucaccucccaguccggcaaggucauccccuccugggaguccuacaaguccggcggcgagacccgccucuga

SEQ ID NO: 127733 - RNA, 1575 nt, Artificial Sequence
  derived and/or modified CDS sequence (opt2) from glycoprotein__RABV__KR906734.1
auggucccccaggcccuccucuucgucccccuccucgucuucccccucugcuucggcaaguuccccaucuacaccauccccgacaagcucggccccuggucccccaucgacauccaccaccucuccugccccaacaaccucgucgucgaggacgagggcugcaccaaccucuccggcuucuccuacauggagcucaaggucggcuacaucuccgccaucaaggucaacggcuucaccugcaccggcgucgucaccgaggccgagaccuacaccaacuucgucggcuacgucaccaccaccuucaagcgcaagcacuuccgccccauccccgacgccugccgcgccgccuacaacuggaagauggccggcgacccccgcuacgaggagucccuccacaaccccuaccccgacuaccacuggcuccgcaccgucaagaccaccaaggagucccucgucaucaucucccccuccgucgccgaccucgaccccuacgacaagucccuccacucccgcgucuuccccuccggcaagugcuccggcaucaccgucuccuccaccuacugcuccaccaaccacgacuacaccaucuggaugcccgagaacccccgccucggcaccuccugcgacaucuucaccaacucccgcggcaagcgcgccuccaagggcggcaagaccugcggcuucgucgacgagcgcggccucuacaagucccuccgcggcgccugcaagcucaagcucugcggcguccucggccuccgccucauggacggcaccugggucgccaugcagaccuccgacgagaccaaguggugcccccccgaccagcucgucaacaugcacgacuuccgcuccgacgagaucgagcaccucgucgucgaggagcucgucaagaagcgcgaggagugccucgacgcccucgaguccaucaugaccaccaaguccgucuccuuccgccgccucucccaccuccgcaagcucguccccggcuucggcaaggccuacaccaucuucaacaagacccucauggaggccgacgcccacuacaaguccguccgcaccuggaacgagaucauccccuccaagggcugccuccgcgucggcggccgcugccacccccacgucaacggcgucuucuucaacggcaucauccucggccccgacggccacguccucauccccgagaugcaguccucccuccuccagcagcacauggagcuccucgaguccuccgucaucccccucaugcacccccucgccgaccccuccaccgucuucaaggagggcgacgaggccgaggacuucgucgagguccaccuccccgacguccacaagcaggucuccggcgucgaccucggccuccccaacuggggcaaguacguccuccucuccgccggcacccucaucgcccucaugcucaucaucuuccucaugaccugcugccgccgcgucaaccgccccgagcccacccagcgcucccucggcggcaccggccgcaaggucuccgucaccucccaguccggcaaggucaucuccuccugggaguccuacaaguccggcggcgagacccgccucuga

SEQ ID NO: 127734 - RNA, 1575 nt, Artificial Sequence
  derived and/or modified CDS sequence (opt2) from glycoprotein__RABV__KR906735.1
auggucccccagacccuccucuucgucccccuccucgucuucucccucugcuucggcaaguuccccaucuacaccauccccgacaagcucggccccuggucccccaucgacauccaccaccucuccugccccaacaaccucgucgucgaggacgagggcugcaccaaccucuccggcuucuccuacauggagcucaaggucggcuacaucuccgccaucaaggucaacggcuucaccugcaccggcgucgucaccgaggccgagaccuacaccaacuucgucggcuacgucaccaccaccuucaagcgcaagcacuuccgccccauccccgacgccugccgcgccgccuacaacuggaagauggccggcgacccccgcuacgaggagucccuccacaaccccuaccccgacuaccacuggcuccgcaccgucaagaccaccaaggagucccucgucaucaucucccccuccgucgccgaccucgaccccuacgacaagucccuccacucccgcgucuuccccuccggcaagugcuccggcaucaccgucuccuccaccuacugcuccaccaaccacgacuacaccaucuggaugcccgagaacccccgccucggcaccuccugcaacaucuucaccaacucccgcggcaagcgcgccuccaagggcggcaagaccugcggcuucgucgacgagcgcggccucuacaagucccucaagggcgccugcaagcucaagcucugcggcguccucggccuccgccucauggacggcaccugggucgccaugcagaccuccgacgagaccaaguggugcccccccgaccagcucgucaacaugcacgacuuccgcuccgacgagaucgagcaccucgucgucgaggagcucgucaagaagcgcgaggagugccucgacgcccucgaguccaucaugaccaccaaguccgucuccuuccgccgccucucccaccuccgcaagcucguccccggcuucggcaaggccuacaccaucuucaacaagacccucauggaggccgacgcccacuacaaguccguccgcaccuggaacgagaucauccccuccaagggcugccuccgcgucggcggccgcugccacccccacgucaacggcgucuucuucaacggcaucauccucggccccgacggccacguccucauccccgagaugcaguccucccuccuccagcagcacauggagcuccucgaguccuccgucaucccccucaugcacccccucgccgaccccuccaccgucuucaaggacggcgacgaggccgaggacuucgucgagguccaccuccccgacguccacaagcaggucuccggcgucgaccucggccuccccaacuggggcaaguacguccuccucuccgccggcacccucaucgcccucaugcucaucaucuuccucaugaccugcugccgccgcgucaaccgccccgaguccacccagcgcucccucggcggcacccgccgcaaggucuccgucaccucccaguccggcaaggucaucuccuccugggaguccuacaaguccggcggcgagacccgccucuga

SEQ ID NO: 127735 - RNA, 1575 nt, Artificial Sequence; identical to SEQ ID NO: 127734
  derived and/or modified CDS sequence (opt2) from glycoprotein__RABV__KR906736.1

SEQ ID NO: 127736 - RNA, 1575 nt, Artificial Sequence
  derived and/or modified CDS sequence (opt2) from glycoprotein__RABV__KR906737.1
auggucccccaggcccuccucuucgucccccuccucgucuucccccucugcuucggcaaguuccccaucuacaccauccccgacaagcucggccccuggucccccaucgacauccaccaccucuccugccccaacaaccucgucgucgaggacgagggcugcaccaaccucuccggcuucuccuacauggagcucaaggucggcuacaucuccgccaucaaggucaacggcuucaccugcaccggcgucgucaccgaggccgagaccuacaccaacuucgucggcuacgucaccaccaccuucaagcgcaagcacuuccgccccauccccgacgccugccgcgccgccuacaacuggaagauggccggcgacccccgcuacgaggagucccuccacaaccccuaccccgacuaccacuggcuccgcaccgucaagaccaccaaggagucccucgucaucaucucccccuccgucgccgaccucgaccccuacgacaagucccuccacucccgcgucuucaccuccggcaagugcuccggcaucaccgucuccuccaccuacugcuccaccaaccacgacuacaccaucuggaugcccgagaacccccgccucggcaccuccugcaacaucuucgucaacuccaagggcaagcgcgccuccaagggcggcaagaccugcggcuucgucgacgagcgcggccucuacaagucccucaagggcgccugcaagcucaagcucugcggcguccucggccuccgccucauggacggcaccugggucgccaugcagaccuccgacgagaccaaguggugcucccccgaccagcucgucaacaugcacgacuuccgcuccgacgagaucgagcaccucgucgucgaggagcucgucaagaagcgcgaggagugccucgacgcccucgaguccaucaugaccaccaaguccgucuccuuccgccgccucucccaccuccgcaagcucguccccggcuucggcaaggccuacaccaucuucaacaagacccucauggaggccgacgcccacuacaaguccguccgcaccuggaacgagaucauccccuccaagggcugccuccgcgucggcggccgcugccacccccacgucaacggcgucuucuucaacggcaucauccucggccccgacggccacguccucauccccgagaugcaguccucccuccuccagcagcacauggagcuccucgaguccuccgucaucccccucaugcacccccucgccgaccccuccaccgucuucaaggacggcgacgaggccgaggacuucgucgagguccaccuccccgacguccacaagcaggucuccggcgucgaccucggccuccccaacuggggcaaguacguccuccucuccgccggcacccucaucgcccucaugcucaucaucuuccucaugaccugcugccgccgcgucaaccgccccgaguccacccagcgcucccucggcggcaccggccgcaaggucuccgucaccucccaguccggcaaggucaucuccuccugggaguccuacaaguccggcggcgagacccgccucuga

SEQ ID NO: 127737 - RNA, 1575 nt, Artificial Sequence; identical to SEQ ID NO: 127736
  derived and/or modified CDS sequence (opt2) from glycoprotein__RABV__KR906738.1

SEQ ID NO: 127738 - RNA, 1575 nt, Artificial Sequence
  derived and/or modified CDS sequence (opt2) from glycoprotein__RABV__KR906739.1
auggucccccaggcccuccucuucgucccccuccucgucuucccccucugcuucggcaaguuccccaucuacaccauccccgacaagcucggccccuggucccccaucgacauccaccaccucuccugccccaacaaccucgucgucgaggacgagggcugcaccaaccucuccggcuucuccuacauggagcucaaggucggcuacaucuccgccaucaaggucaacggcuucaccugcaccggcgucgucaccgaggccgagaccuacaccaacuucgucggcuacgucaccaccaccuucaagcgcaagcacuuccgccccauccccgacgccugccgcgccgccuacaacuggaagauggccggcgacccccgcuacgaggagucccuccacaaccccuaccccgacuaccacuggcuccgcaccgucaagaccaccaaggagucccucgucaucaucucccccuccgucgccgaccucgaccccuacgacaagacccuccacucccgcgucuuccccuccggcaagugcuccggcaucaccgucuccuccaccuacugcuccaccaaccacgacuacaccaucuggaugcccgagaacccccgccucggcaccuccugcgacaucuucaccaacucccgcggcaagcgcgccuccaagggcggcaagaccugcggcuucgucgacgagcgcggccucuacaagucccucaagggcgccugcaagcucaagcucugcggcguccucggccuccgccucauggacggcaccugggucgccaugcagaccuccgacgagaccaaguggugcccccccgaccgccucgucaacaugcacgacuuccgcuccgacgagaucgagcaccucgucgucgaggagcucgucaagaagcgcgaggagugccucgacgcccucgaguccaucaugaccaccaaguccgucuccuuccgccgccucucccaccuccgcaagcucguccccggcuucggcaaggccuacaccaucuucaacaagacccucauggaggccgacgcccacuacaaguccguccgcaccuggaacgagaucauccccuccaagggcugccuccgcgucggcggccgcugccacccccacgucaacggcgucuucuucaacggcaucauccucggccccgacggccacguccucauccccgagaugcaguccucccuccuccagcagcacauggagcuccucgaguccuccgucaucccccucaugcacccccucgccgaccccuccaccgucuucaaggacggcgacgaggccgaggacuucgucgagguccaccuccccgacguccacaagcaggucuccggcgucgaccucggccuccccaacuggggcaaguacguccuccucuccgccggcacccucaucgcccucaugcucaucaucuuccucaugaccugcugccgccgcgucaaccgccccgagcccacccagcgcucccucggcggcaccggccgcaaggucuccgucaccucccaguccggcaaggucaucuccuccugggaguccuacaaguccggcggcgagaccaagcucuga

SEQ ID NO: 127739 - RNA, 1575 nt, Artificial Sequence
  derived and/or modified CDS sequence (opt2) from glycoprotein__RABV__KR906740.1
auggucccccaggcccgccucuucgucccccuccucgucuucccccucugcuucggcaaguuccccaucuacaccauccccgacaagcucggccccuggucccccaucgacauccaccaccucuccugccccaacaaccucgucgucgaggacgagggcugcaccaaccucuccggcuucuccuacauggagcucaaggucggcuacaucuccgccaucaaggucaacggcuucaccugcaccggcgucgucaccgaggccgagaccuacaccaacuucgucggcuacgucaccaccaccuucaagcgcaagcacuuccgccccauccccgacgccugccgcgccgccuacaacuggaagauggccggcgacccccgcuacgaggagucccuccacaaccccuaccccgacuaccacuggcuccgcaccgucaagaccaccaaggagucccucgucaucaucucccccuccgucgccgaccucgaccccuacgaccgcucccuccacucccgcgucuucaccggcggcaagugcuccggcaucaccgucuccuccaccuacugcuccaccaaccacgacuacaccaucuggaugcccgagaacccccgccucggcaccuccugcaacaucuucgccaacuccaagggcaagcgcgccuccaagggcggcaagaccugcggcuucgucgacgagcgcggccucuacaagucccucaagggcgccugcaagcucaagcucugcggcguccucggccuccgccucauggacggcaccugggucgccaugcagaccuccgacgagaccaaguggugcccccccgaccagcucgucaacaugcacgacuuccgcuccgacgagaucgagcaccucgucgucgaggagcucgucaagaagcgcgaggagugccucgacgcccucgaguccaucaugaccaccaaguccgucuccuuccgccgccucucccaccuccgcaagcucguccccggcuucggcaaggccuacaccaucuucaacaagacccucauggaggccgacgcccacuacaaguccguccgcaccuggaacgagaucauccccuccaagggcugccuccgcgucggcggccgcugccacccccacgucaacggcgucuucuucaacggcaucauccucggccccgacggccacguccucauccccgagaugcaguccucccuccuccagcagcacauggagcuccucgaguccuccgucaucccccucaugcacccccucgccgaccccuccaccgucuucaaggacggcgacgaggccgaggacuucgucgagguccaccuccccgacguccacaagcaggucuccggcgucgaccucggccuccccaacuggggcaaguacguccuccucuccgccggcacccucaucgcccucaugcucaucaucuuccucaugaccugcugccgccgcgucucccgccccgaguccacccagcgcucccucggccgcaucggccgcaaggucuccgucaccucccaguccggcaaggucaucuccuccugggaguccuacaaguccggcggcgagacccgccucuga

SEQ ID NO: 127740 - RNA, 1575 nt, Artificial Sequence
  derived and/or modified CDS sequence (opt2) from glycoprotein__RABV__KR906741.1
auggucccccaggcccuccucuucgucccccuccucgucuucccccucugcuucggcaaguuccccaucuacaccauccccgacaagcucggccccuggucccccaucgacauccaccaccucuccugccccaacaaccucgucgucgaggacgagggcugcaccaaccucuccggcuucuccuacauggagcucaaggucggcuacaucuccgccaucaaggucaacggcuucaccugcaccggcgucgucaccgaggccgagaccuacaccaacuucgucggcuacgucaccaccaccuucaagcgcaagcacuuccgccccauccccgacgccugccgcgccgccuacaacuggaagauggccggcgacccccgcuacgaggagucccuccacaaccccuaccccgacuaccacuggcuccgcaccgucaagaccaccaaggagucccucgucaucaucucccccuccgucgccgaccucgaccccuacgacaagucccuccacucccgcgucuucaccuccggcaagugcuccggcaucaccgucuccuccaccuacugcuccaccaaccacgacuacaccaucuggaugcccgagaacccccgccucggcaccuccugcaacaucuucgccaacuccaagggcaagcgcgccuccaagggcggcaagaccugcggcuucgucgacgagcgcggccucuacaagucccucaagggcgccugcaagcucaagcucugcggcguccucggccuccgccucauggacggcaccugggucgccaugcagaccuccgacgagaccaaguggugcccccccgaccagcucgucaacaugcacgacuuccgcuccgacgagaucgagcaccucgucgucgaggagcucgucaagaagcgcgaggagugccucgacgcccucgaguccaucaugaccaccaaguccgucuccuuccgccgccucucccaccuccgcaagcucguccccggcuucggcaaggccuacaccaucuucaacaagacccucauggaggccgacgcccacuacaaguccguccgcaccuggaacgagaucauccccuccaagggcugccuccgcgucggcggccgcugccacccccacgucaacggcgucuucuucaacggcaucauccucggccccgacggccacguccucauccccgagaugcaguccucccuccuccagcagcacauggagcuccucgaguccuccgucaucccccucaugcacccccucgccgaccccuccaccgucuucaaggacggcgacgaggccgaggacuucgucgagguccaccuccccgacguccacaagcaggucuccggcgucgaccucggccuccccaacuggggcaaguacguccuccucuccgccggcacccucaucgcccucaugcucauccucuuccucaugaccugcugccgccgcgucaaccgccccgaguccacccagcgcucccucggcggcaccggccgcaaggucuccgucaccucccaguccggcaaggucaucuccuccugggaguccuacaaguccggcggcgagacccgccucuga

SEQ ID NO: 127741 - RNA, 1575 nt, Artificial Sequence; identical to SEQ ID NO: 127528
  derived and/or modified CDS sequence (opt2) from glycoprotein__RABV__KR906742.1

SEQ ID NO: 127742 - RNA, 1575 nt, Artificial Sequence; identical to SEQ ID NO: 127733
  derived and/or modified CDS sequence (opt2) from glycoprotein__RABV__KR906743.1

SEQ ID NO: 127743 - RNA, 1575 nt, Artificial Sequence
  derived and/or modified CDS sequence (opt2) from glycoprotein__RABV__KR906744.1
auggucccccaggcccuccucuucgucccccuccucgucuucccccucugcuucggcaaguuccccaucuacaccauccccgacaagcucggccccuggucccccaucgacauccaccaccucuccugccccaacaaccucgucgucgaggacgagggcugcaccaaccucuccggcuucuccuacauggagcucaaggucggcuacaucuccgccaucaaggucaacggcuucaccugcaccggcgucgucaccgaggccgagaccuacaccaacuucgucggcuacgucaccaccaccuucaagcgcaagcacuuccgccccauccccgacgccugccgcgccgccuacaacuggaagauggccggcgacccccgcuacgaggagucccuccacaaccccuaccccgacuaccacuggcuccgcaccgucaagaccaccaaggagucccucgucaucaucucccccuccgucgccgaccucgaccccuacgacaagacccuccacucccgcgucuuccccuccggcaagugcuccggcaucaccgucuccuccaccuacugcuccaccaaccacgacuacaccaucuggaugcccgagaacccccgccucggcaccuccugcgacaucuucaccaacucccgcggcaagcgcgccuccaagggcggcaagaccugcggcuucgucgacgagcgcggccucuacaagucccucaagggcgccugcaagcucaagcucugcggcguccucggccuccgccucauggacggcaccugggucgccaugcagaccuccgacgagaccaaguggugcccccccgaccagcucgucaacaugcacgacuuccgcuccgacgagaucgagcaccucgucgucgaggagcucgucaagaagcgcgaggagugccucgacgcccucgaguccaucaugaccaccaaguccgucuccuuccgccgccucucccaccuccgcaagcucguccccggcuucggcaaggccuacaccaucuucaacaagacccucauggaggccgacgcccacuacaaguccguccgcaccuggaacgagaucauccccuccaagggcugccuccgcgucggcggccgcugccacccccacgucaacggcgucuucuucaacggcaucauccucggccccgacggccacguccucauccccgagaugcaguccucccuccuccagcagcacauggagcuccucgaguccuccgucaucccccucaugcacccccucgccgaccccuccaccgucuucaaggacggcgacgaggccgaggacuucgucgagguccaccuccccgacguccacaagcaggucuccggcgucgaccucggccuccccaacuggggcaaguacguccuccucuccgccggcacccucaucgcccucaugcucaucaucuuccucaugaccugcugccgccgcgucaaccgccccgagcccacccagcgcucccucggcggcaccggccgcaaggucuccgucaccucccaguccggcaaggucaucuccuccugggaguccuacaaguccggcggcgagaccaagcucuga

SEQ ID NO: 127744 - RNA, 1575 nt, Artificial Sequence; identical to SEQ ID NO: 127736
  derived and/or modified CDS sequence (opt2) from glycoprotein__RABV__KR906745.1

SEQ ID NO: 127745 - RNA, 1575 nt, Artificial Sequence
  derived and/or modified CDS sequence (opt2) from glycoprotein__RABV__KR906746.1
auggucccccaggcccuccucuucgucacccuccucgucuucucccucugcuucggcaaguuccccaucuacaccauccccgacaagcucggccccuggucccccaucgacauccaccaccucuccugccccaacaaccucgucgucgaggacgagggcugcaccaaccucuccggcuucuccuacauggagcucaaggucggcuacaucuccgccaucaaggucaacggcuucaccugcaccggcgucgucaccgaggccgagaccuacaccaacuucgucggcuacgucaccaccaccuucaagcgcaagcacuuccgccccauccccgacgccugccgcgccgccuacaacuggaagauggccggcgacccccgcuacgaggagucccuccacaaccccuaccccgacuaccacuggcuccgcaccgucaagaccaccaaggagucccucgucaucaucucccccuccgucgccgaccucgaccccuacgacaagucccuccacucccgcgucuuccccggcggcaagugcuccggcaucaccgucuccuccaccuucugcuccaccaaccacgacuacaccaucuggaugcccgagaacccccgccucggcaccuccugcgacaucuucgccaacucccgcggcaagcgcgccuccaagggcggcaagaccugcggcuucgucgacgagcgcggccucuacaagucccucaagggcgccugcaagcucaagcucugcggcguccucggccuccgccucauggacggcaccugggucgccaugcagaccuccgacgagaccaaguggugcccccccgaccagcucgucaacaugcacgacuuccgcuccgacgagaucgagcaccucgucgucgaggagcucgucaagaagcgcgaggagugccucgacgcccucgaguccaucaugaccaccaaguccgucuccuuccgccgccucucccaccuccgcaagcucguccccggcuucggcaaggccuacaccauguucaacaagacccucauggaggccgacgcccacuacaaguccguccgcaccuggaacgagaucauccccuccaagggcugccuccgcgucggcggccgcugccacccccacgucaacggcgucuucuucaacggcaucauccucggccccgacggccacguccucauccccgagaugcaguccucccuccuccagcagcacauggagcuccucgaguccuccgucaucccccucaugcacccccucgccgaccccuccaccgucuucaaggacggcgacgaggccgaggacuucgucgagguccaccuccccgacguccacaagcaggucuccggcgucgaccucggccuccccaacuggggcaaguacguccuccucuccgccggcacccucaucgcccucaugcucaucaucuuccucaugaccugcugccgccgcgucaaccgccccgaguccaccgaccgcucccucggcggcaccggccgcaaggucuccgucaccucccaguccggcaaggucaucuccuccugggaguccuacaaguccggcggcgagacccgccucuga

SEQ ID NO: 127746 - RNA, 1575 nt, Artificial Sequence; identical to SEQ ID NO: 127745
  derived and/or modified CDS sequence (opt2) from glycoprotein__RABV__KR906747.1

SEQ ID NO: 127747 - RNA, 1575 nt, Artificial Sequence
  derived and/or modified CDS sequence (opt2) from glycoprotein__RABV__KR906748.1
auggucccccaggcccuccucuucgucccccuccucgucuucucccucugcuucggcaaguuccccaucuacaccauccccgacaagcucggccccuggucccccaucgacauccaccaccucuccugccccaacaaccucgucgucgaggacgagggcugcaccaaccucuccggcuucuccuacauggagcucaaggucggcuacaucuccgccaucaaggucaacggcuucaccugcaccggcgucgucaccgaggccgagaccuacaccaacuucgucggcuacgucaccaccaccuucaagcgcaagcacuuccgccccauccccgacgccugccgcgccaccuacaacuggaagaucgccggcgacccccgcuacgaggagucccuccacaaccccuaccccgacuaccacuggcuccgcaccgucaagaccaccaaggagucccucgucaucaucucccccuccgucgccgaccucgaccccuacgacaagucccuccacucccgcgucuuccccuccggcaagugcuccggcaucaccgucuccuccacccacugcuccaccaaccacgacuacaccaucuggaugcccgagaacccccgccucggcaccuccugcgacaucuucaccaacucccgcggcaagcgcgccuccaagggcuccaagaccugcggcuucgucgacgagcgcggccucuacaagucccucaagggcgccugcaagcucaagcucugcggcguccucggccuccgccucauggacggcaccugggucgccaugcagaccuccgacgagaccaaguggugcccccccgaccagcucgucaaccuccacgacuuccgcuccgacgagaucgagcaccucgucgucgaggagcucgucaagaagcgcgaggagugccucgacgcccucgaguccaucaugaccaccaaguccgucuccuuccgccgccucucccaccuccgcaagcucguccccggcuucggcaaggccuacaccaucuucaacaagacccucauggaggccgacgcccacuacaaguccguccgcaccuggaacgagaucauccccuccaagggcugccuccgcgucggcggccgcugccacccccccgucaacggcgucuucuucaacggcaucauccucggccccgacggccacguccucauccccgagaugcaguccucccuccuccagcagcacauggagcuccucgaguccuccgucaucccccucaugcacccccucgccgaccccuccgccgucuucaaggacggcgacgaggccgaggacuucgucgagguccaccuccccgacguccacaagcaggucuccggcgucgaccucggccuccccaacuggggcaaguacguccuccucuccgccggcacccucaucgcccucaugcucaucaucuuccucaugaccugcugccgcggcgucaaccgccccgaguccaagcagugcucccucggcggcacccgccgcaaggucuccgucaccucccaguccggcaaggucaucuccuccugggaguccuacaaguccggcggcgagacccgccucuga

SEQ ID NO: 127748 - RNA, 1575 nt, Artificial Sequence
  derived and/or modified CDS sequence (opt2) from glycoprotein__RABV__KR906749.1
auggucccccaggaccuccucuucgucccccuccucguccucccccucugcuucggcaaguuccccaucuacaccauccccgacaagcucggccccuggucccccaucgacauccaccaccucuccugccccaacaaccucgucgucgaggacgagggcugcaccaaccucuccggcuucuccuacauggagcucaaggucggcuacaucuccgccaucaaggucaacggcuucaccugcaccggcgucgucaccgaggccgagaccuacaccaacuucgucggcuacgucaccaccaccuucaagcgcaagcacuuccgccccauccccgacgccugccgcgccgccuacaacuggaagauggccggcgacccccgcuacgaggagucccuccacaaccccuaccccgacuaccacuggcuccgcaccgucaagaccaccaaggagucccucgucaucaucucccccuccgucgccgaccucgaccccuacgacaagucccuccacucccgcgucuucaccuccggcaagugcuccggcaucaccgucuccuccaccuacugcuccaccaaccacgacuacaccaucuggaugcccgagaacccccgccucggcaccuccugcaacaucuucgccaacuccaagggcaagcgcgccuccaagggcggcaagaccugcggcuucgucgacgagcgcggccucuacaagucccucaagggcgccugcaagcucaagcucugcggcguccucggccuccgccucauggacggcaccugggucgccaugcagaccuccgacgagaccaaguggugcccccccgaccagcucgucaacaugcacgacuuccgcuccgacgagaucgagcaccucgucgucgaggagcucgucaagaagcgcgaggagugccucgacgcccucgaguccaucaugaccaccaaguccgucuccuuccgccgccucucccaccuccgcaagcucguccccggcuucggcaaggccuacaccaucuucaacaagacccucauggaggccgacgcccacuacaaguccguccgcaccuggaacgagaucauccccuccaagggcugccuccgcgucggcggccgcugccacccccacgucaacggcgucuucuucaacggcaucauccucggccccgacggccacguccucauccccgagaugcaguccucccuccuccagcagcacauggagcuccucgaguccuccgucaucccccucaugcacccccucgccgaccccuccaccgucuucaaggacggcgacgaggccgaggacuucgucgagguccaccuccccgacguccacaagcaggucuccggcgucgaccucggccuccccaacuggggcaaguacguccuccucuccgccggcacccucaucgcccucaugcucaucaucuuccucaccaccugcugccgccgcgucaaccgccccgaguccacccagcgcucccucggcggcaccggccgcaaggucuccgucaccucccaguccggcaaggucaucuccuccugggaguccuacaaguccggcggcgagacccgccucuga

SEQ ID NO: 127749 - RNA, 1575 nt, Artificial Sequence; identical to SEQ ID NO: 127528
  derived and/or modified CDS sequence (opt2) from glycoprotein__RABV__KR906750.1

SEQ ID NO: 127750 - RNA, 1575 nt, Artificial Sequence
  derived and/or modified CDS sequence (opt2) from glycoprotein__RABV__KR906751.1
auggucccccaggcccuccucuucgucacccuccucgucuucucccucugcuucggcaaguuccccaucuacaccauccccgacaagcucggccccuggucccccaucgacauccaccaccucuccugccccaacaaccucgucgucgaggacgagggcugcaccaaccucuccggcuucuccuacauggagcucaaggucggcuacaucuccgccaucaaggucaacggcuucaccugcaccggcgucgucaccgaggccgagaccuacaccaacuucgucggcuacgucaccaccaccuucaagcgcaagcacuuccgccccauccccgacgccugccgcgccgccuacaacuggaagauggccggcgacccccgcuacgaggagucccuccacaaccccuaccccgacuaccacuggcuccgcaccgucaagaccaccaaggagucccucgucaucaucucccccuccgucgccgaccucgaccccuacgacaagucccuccacucccgcgucuuccccggcggcaagugcuccggcaucaccgucuccuccaccuucugcuccaccaaccacgacuacaccaucuggaugcccgagaacccccgccucggcaccuccugcgacaucuucgccaacuccaagggcaagcgcgccuccaagggcggcaagaccugcggcuucgucgacgagcgcggccucuacaagucccucaagggcgccugcaagcucaagcucugcggcguccucggccuccgccucauggacggcaccugggucgccaugcagaccuccgacgagaccaaguggugcccccccgaccagcucgucaacaugcacgacuuccgcuccgacgagaucgagcaccucgucgucgaggagcucgucaagaagcgcgaggagugccucgacgcccucgaguccaucaugaccaccaaguccgucuccuuccgccgccucucccaccuccgcaagcucguccccggcuucggcaaggccuacaccauguucaacaagacccucauggaggccgacgcccacuacaaguccguccgcaccuggaacgagaucauccccuccaagggcugccuccgcgucggcggccgcugccacccccacgucaacggcgucuucuucaacggcaucauccucggccccgacggccacguccucauccccgagaugcaguccucccuccuccagcagcacauggagcuccucgaguccuccgucaucccccucaugcacccccucgccgaccccuccaccgucuucaaggacggcgacgaggccgaggacuucgucgagguccaccuccccgacguccacaagcaggucuccggcgucgaccucggccuccccaacuggggcaaguacguccuccucuccgccggcacccucaucgcccucaugcucaucaucuuccucaugaccugcugccgccgcgucaaccgccccgaguccacccaccgcucccucggccgcaccggccgcaaggucuccgucaccucccaguccggcaaggucaucuccuccugggaguccuacaaguccggcggcgagacccgccucuga

SEQ ID NO: 127751 - RNA, 1575 nt, Artificial Sequence; identical to SEQ ID NO: 127740
  derived and/or modified CDS sequence (opt2) from glycoprotein__RABV__KR906753.1

SEQ ID NO: 127752 - RNA, 1575 nt, Artificial Sequence
  derived and/or modified CDS sequence (opt2) from glycoprotein__RABV__KR906755.1
auggucccccaggcccuccucuucguccuccuccucgucuucccccucugcuucggcaaguuccccaucuacaccauccccgacaagcucggccccuggucccccaucgacauccaccaccucuccugccccaacaaccucgucgucgaggacgagggcugcaccaaccucuccggcuucuccuacauggagcucaaggucggcuacaucuccgccaucaaggucaacggcuucaccugcaccggcgucgucaccgaggccgagaccuacaccaacuucgucggcuacgucaccaccaccuucaagcgcaagcacuuccgccccauccccgacgccugccgcgccgccuacaacuggaagauggccggcgacccccgcuacgaggagucccuccacaaccccuaccccgacuaccacuggcuccgcaccgucaagaccaccaaggagucccucgucaucaucucccccuccgucgccgaccucgaccccuacgacaagucccuccacucccgcgucuucaccuccggcaagugcuccggcaucaccgucuccuccaccuacugcuccaccaaccacgacuacaccaucuggaugcccgagaacccccgccucggcaccuccugcaacaucuucgucaacuccaagggcaagcgcgccuccaagggcggcaagaccugcggcuucgucgacgagcgcggccucuacaagucccucaagggcgccugcaagcucaagcucugcggcguccucggccuccgccucauggacggcaccugggucgccaugcagaccuccgacgagaccaaguggugcucccccgaccagcucgucaacaugcacgacuuccgcuccgacgagaucgagcaccucgucgucgaggagcucgucaagaagcgcgaggagugccucgacgcccucgaguccaucaugaccaccaaguccgucuccuuccgccgccucucccaccuccgcaagcucguccccggcuucggcaaggccuacaccaucuucaacaagacccucauggaggccgacgcccacuacaaguccguccgcaccuggaacgagaucauccccuccaagggcugccuccgcgucggcggccgcugccacccccacgucaacggcgucuucuucaacggcaucauccucggccccgacggccacguccucauccccgagaugcaguccucccuccuccagcagcacauggagcuccucgaguccuccgucaucccccucaugcacccccucgccgaccccuccaccgucuucaaggacggcgacgaggccgaggacuucgucgagguccaccuccccgacguccacaagcaggucuccggcgucgaccucggccuccccaacuggggcaaguacguccuccucuccgccggcacccucaucgcccucaugcucaucaucuuccucaugaccugcugccgccgcgucaaccgccccgaguccacccagcgcucccucggcggcaccggccgcaaggucuccgucaccucccaguccggcaaggucaucuccuccugggaguccuacaaguccggcggcgagacccgccucuga

SEQ ID NO: 127753 - RNA, 1575 nt, Artificial Sequence
  derived and/or modified CDS sequence (opt2) from glycoprotein__RABV__KR906756.1
auggucccccaggcccuccucuucguccuccuccucgucuucccccucugcuucggcaaguuccccaucuacaccauccccgacaagcucggccccuggucccccaucgacauccaccaccucuccugccccaacaaccucgucgucgaggacgagggcugcaccaaccucuccggcuucuccuacauggagcucaaggucggcuacaucuccgccaucaaggucaacggcuucaccugcaccggcgucgucaccgaggccgagaccuacaccaacuucgucggcuacgucaccaccaccuucaagcgcaagcacuuccgccccauccccgacgccugccgcgccgccuacaacuggaagauggccggcgacccccgcuacgaggagucccuccacaaccccuaccccgacuaccacuggcuccgcaccgucaagaccaccaaggagucccucaucaucaucucccccuccgucgccgaccucgaccccuacgacaagucccuccacucccgcgucuucaccuccggcaagugcuccggcaucaccgucuccuccaccuacugcuccaccaaccacgacuacaccaucuggaugcccgagaacccccgccucggcaccuccugcaacaucuucgucaacuccaagggcaagcgcgccuccaagggcggcaagaccugcggcuucgucgacgagcgcggccucuacaagucccucaagggcgccugcaagcucaagcucugcggcguccucggccuccgccucaucgacggcaccugggucgccaugcagaccuccgacgagaccaaguggugcucccccgaccagcucgucaacaugcacgacuuccgcuccgacgagaucgagcaccucgucgucgaggagcucgucaagaagcgcgaggagugccucgacgcccucgaguccaucaugaccaccaaguccgucuccuuccgccgccucucccaccuccgcaagcucguccccggcuucggcaaggccuacaccaucuucaacaagacccucauggaggccgacgcccacuacaaguccguccgcaccuggaacgagaucauccccuccaagggcugccuccgcgucggcggccgcugccacccccacgucaacggcgucuucuucaacggcaucauccucggccccgacggccacguccucauccccgagaugcaguccucccuccuccagcagcacauggagcuccucgaguccuccgucaucccccucaugcacccccucgccgaccccuccaccgucuucaaggacggcgacgaggccgaggacuucgucgagguccaccuccccgacguccacaagcaggucuccggcgucgaccucggccuccccaacuggggcaaguacguccuccucuccgccggcacccucaucgcccucaugcucaucaucuuccucaugaccugcugccgccgcgucaaccgccccgaguccacccagcgcucccucggcggcaccggccgcaaggucuccgucaccucccaguccggcaaggucaucuccuccugggaguccuacaaguccggcggcgagacccgccucuga

SEQ ID NO: 127754 - RNA, 1575 nt, Artificial Sequence; identical to SEQ ID NO: 127753
  derived and/or modified CDS sequence (opt2) from glycoprotein__RABV__KR906760.1

SEQ ID NO: 127755 - RNA, 1575 nt, Artificial Sequence
  derived and/or modified CDS sequence (opt2) from glycoprotein__RABV__KR906762.1
auggucccccaggcccgccucuucgucccccuccucgucuucccccucugcuucggcaaguuccccaucuacaccauccccgacaagcucggccccuggucccccaucgacauccaccaccucuccugccccaacaaccucgucgucgaggacgagggcugcaccaaccucuccggcuucuccuacauggagcucaaggucggcuacaucuccgccaucaaggucaacggcuucaccugcaccggcgucgucaccgaggccgagaccuacaccaacuucgucggcuacgucaccaccaccuucaagcgcaagcacuuccgccccauccccgacgccugccgcgccgccuacaacuggaagauggccggcgacccccgcuacgaggagucccuccacaaccccuaccccgacuaccacuggcuccgcaccgucaagaccaccaaggagucccucgucaucaucucccccuccgucgccgaccucgaccccuacgacaagucccuccacucccgcgucuucaccggcggcaagugcuccggcaucaccgucuccuccaccuacugcuccaccaaccacgacuacaccaucuggaugcccgagaacccccgccucggcaccuccugcaacaucuucgccaacuccaagggcaagcgcgccuccaagggcggcaagaccugcggcuucgucgacgagcgcggccucuacaagucccucaagggcgccugcaagcucaagcucugcggcguccucggccuccgccucauggacggcaccugggucgccaugcagaccuccgacgagaccaaguggugcccccccgaccagcucgucaacaugcacgacuuccgcuccgacgagaucgagcaccucgucgucgaggagcucgucaagaagcgcgaggagugccucgacgcccucgaguccaucaugaccaccaaguccgucuccuuccgccgccucucccaccuccgcaagcucguccccggcuucggcaaggccuacaccaucuucaacaagacccucauggaggccgacgcccacuacaaguccguccgcaccuggaacgagaucauccccuccaagggcugccuccgcgucggcggccgcugccacccccacgucaacggcgucuucuucaacggcaucauccucggccccgacggccacguccucauccccgagaugcaguccucccuccuccagcagcacauggagcuccucgaguccuccgucaucccccucaugcacccccucgccgaccccuccaccgucuucaaggacggcgacgaggccgaggacuucgucgagguccaccuccccgacguccacaagcaggucuccggcgucgaccucggccuccccaacuggggcaaguacauccuccucuccgccggcacccucaucgcccucaugcucaucaucuuccucaugaccugcugccgccgcgucucccgccccgaguccacccagcgcucccucggccgcaccggccgcaaggucuccgucaccucccaguccggcaaggucaucuccuccugggaguccuacaaguccggcggcgagacccgccucuga

SEQ ID NO: 127756 - RNA, 1575 nt, Artificial Sequence; identical to SEQ ID NO: 127734
  derived and/or modified CDS sequence (opt2) from glycoprotein__RABV__KR906763.1

SEQ ID NO: 127757 - RNA, 1575 nt, Artificial Sequence
  derived and/or modified CDS sequence (opt2) from glycoprotein__RABV__KR906766.1
auggucccccagacccuccucuucgucccccuccucgucuucucccucugcuucggcaaguuccccaucuacaccauccccgacaagcucggccccuggucccccaucgacauccaccaccucuccugccccaacaaccucgucgucgaggacgagggcugcaccaaccucuccggcuucuccuacauggagcucaaggucggcuacaucuccgccauccgcgucaacggcuucaccugcaccggcgucgucaccgaggccgagaccuacaccaacuucgucggcuacgucaccaccaccuucaagcgcaagcacuuccgccccauccccgacgccugccgcgccgccuacaacuggaagauggccggcgacccccgcuacgaggagucccuccacaaccccuaccccgacuaccacuggcuccgcaccgucaagaccaccaaggagucccucgucaucaucucccccuccgucgccgaccucgaccccuacgacaagucccuccacucccgcgucuuccccuccggcaagugcuccggcaucaccgucuccuccaccuacugcuccaccaaccacgacuacaccaucuggaugcccgagaacccccgccucggcaccuccugcaacaucuucaccaacucccgcggcaagcgcgccuccaagggcggcaagaccugcggcuucgucgacgagcgcggccucuacaagucccucaagggcgccugcaagcucaagcucugcggcguccucggccuccgccucauggacggcaccugggucgccaugcagaccuccgacgagaccaaguggugcccccccgaccagcucgucaacaugcacgacuuccgcuccgacgagaucgagcaccucgucgucgaggagcucgucaagaagcgcgaggagugccucgacgcccucgaguccaucaugaccaccaaguccgucuccuuccgccgccucucccaccuccgcaagcucguccccggcuucggcaaggccuacaccaucuucaacaagacccucauggaggccgacgcccacuacaaguccguccgcaccuggaacgagaucauccccuccaagggcugccuccgcgucggcggccgcugccacccccacgucaacggcgucuucuucaacggcaucauccucggccccgacggccacguccucauccccgagaugcaguccucccuccuccagcagcacauggagcuccucgaguccuccgucaucccccucaugcacccccucgccgaccccuccaccgucuucaaggacggcgacgaggccgaggacuucgucgagguccaccuccccgacguccacaagcaggucuccggcgucgaccucggccuccccaacuggggcaaguacguccuccucuccgccggcacccucaucgcccucaugcucaucaucuuccucaugaccugcugccgccgcgucaaccgccccgaguccacccagcgcucccucggcggcacccgccgcaaggucuccgucaccucccaguccggcaaggucaucuccuccugggaguccuacaaguccggcggcgagacccgccucuga

SEQ ID NO: 127758 - RNA, 1575 nt, Artificial Sequence
  derived and/or modified CDS sequence (opt2) from glycoprotein__RABV__KR906767.1
auggucccccaggcccuccucuucgucccccuccucgucuucccccucugcuucggcaaguuccccaucuacaccauccccgacaagcucggccccuggucccccaucgacauccaccaccucuccugccccaacaaccucgucgucgaggacgagggcugcaccaaccucuccggcuucuccuacauggagcucaaggucggcuacaucuccgccaucaaggucaacggcuucaccugcaccggcgucgucaccgaggccgagaccuacaccaacuucgucggcuacgucaccaccaccuucaagcgcaagcacuuccgccccauccccgacgccugccgcgccgccuacaacuggaagauggccggcgacccccgcuacgaggagucccuccacaaccccuaccccgacuaccacuggcuccgcaccgucaagaccaccaaggagucccucgucaucaucucccccuccgucgccgaccucgaccccuacgacaagucccuccacucccgcgucuucaccuccggcaagugcuccggcaucaccgucuccuccaccuacugcuccaccaaccacgacuacaccaucuggaugcccgagaacccccgccucggcaccuccugcaacaucuucgccaacuccaagggcaagcgcgccuccaagggcggcaagaccugcggcuucgucgacgagcgcggccucuacaagucccuccgcggcgccugcaagcucaagcucugcggcguccucggccuccgccucauggacggcaccugggucgccaugcagaccuccgacgagaccaaguggugcccccccgaccagcucgucaacaugcacgacuuccgcuccgacgagaucgagcaccucgucgucgaggagcucgucaagaagcgcgaggagugccucgacgcccucgaguccaucaugaccaccaaguccgucuccuuccgccgccucucccaccuccgcaagcucguccccggcuucggcaaggccuacaccaucuucaacaagacccucauggaggccgacgcccacuacaaguccguccgcaccuggaacgagaucauccccuccaagggcugccuccgcgucggcggccgcugccacccccacgucaacggcgucuucuucaacggcaucauccucggccccgacggccacguccucauccccgagaugcaguccucccuccuccagcagcacauggagcuccucgaguccuccgucaucccccucaugcacccccucgccgaccccuccaccgucuucaaggacggcgacgaggccgaggacuucgucgagguccaccuccccgacguccacaagcaggucuccggcgucgaccucggccuccccaacuggggcaaguacguccuccucuccgccggcacccucaucgcccucaugcucaucaucuuccucaugaccugcugccgccgcgucucccgccccgaguccacccagcgcucccucggcggcaccggccgcaaggucuccgucaccucccaguccggcaaggucaucuccuccugggaguccuacaaguccggcggcgagacccgccucuga

SEQ ID NO: 127759 - RNA, 1575 nt, Artificial Sequence; identical to SEQ ID NO: 127528
  derived and/or modified CDS sequence (opt2) from glycoprotein__RABV__KR906768.1

SEQ ID NO: 127760 - RNA, 1575 nt, Artificial Sequence
  derived and/or modified CDS sequence (opt2) from glycoprotein__RABV__KR906769.1
auggucccccaggcccuccucuucgucccccuccucgucuucccccucugcuucggcaaguuccccaucuacaccauccccgacaagcucggccccuggucccccaucgacauccaccaccucuccugccccaacaaccucgucgucgaggacgagggcugcaccaaccucuccggcuucuccuacauggagcucaaggucggcuacaucuccgccaucaaggucaacggcuucaccugcaccggcgucgucaccgaggccgagaccuacaccaacuucgucggcuacgucaccaccaccuucaagcgcaagcacuuccgccccauccccgacgccugccgcgccgccuacaacuggaagauggccggcgacccccgcuacgaggagucccuccacaaccccuaccccgacuaccacuggcuccgcaccgucaagaccaccaaggagucccucgucaucaucucccccuccgucgccgaccucgaccccuacgacaagucccuccacucccgcgucuuccccuccggcaagugcuccggcaucaccgucuccuccaccuacugcuccaccaaccacgacuacaccaucuggaugcccgagaacccccgccucggcaccuccugcaacaucuucgccaacuccaagggcaagcgcgccuccaagggcggcaagaccugcggcuucgucgacgagcgcggccucuacaagucccucaagggcgccugcaagcucaagcucugcggcguccucggccuccgccucauggacggcaccugggucgccaugcagaccuccgacgagaccaaguggugcccccccgaccagcucgucaacaugcacgacuuccgcuccgacgagaucgagcaccucgucgucgaggagcucgucaagaagcgcgaggagugccucgacgcccucgaguccaucaugaccaccaaguccgucuccuuccgccgccucucccaccuccgcaagcucguccccggcuucggcaaggccuacaccaucuucaacaagacccucauggaggccgacgcccacuacaaguccguccgcaccuggaacgagaucauccccuccaagggcugccuccgcgucggcggccgcugccacccccacgucaacggcgucuucuucaacggcaucauccucggccccgacggccacguccucauccccgagaugcaguccucccuccuccagcagcacauggagcuccucgaguccuccgucaucccccucaugcacccccucgccgaccccuccaccgucuucaaggacggcgacgaggccgaggacuucgucgagguccaccuccccgacguccacaagcaggucuccggcgucgaccucggccuccccaacuggggcaaguacguccuccucuccgccggcacccucaucgcccucaugcucaucaucuuccucaugaccugcugccgccgcgucucccgccccgaguccacccagcgcucccucggccgcaccggccgcaaggucuccgucaccucccaguccggcaaggucaucuccuccugggaguccuacaaguccggcggcgagacccgccucuga

SEQ ID NO: 127761 - RNA, 1575 nt, Artificial Sequence; identical to SEQ ID NO: 127733
  derived and/or modified CDS sequence (opt2) from glycoprotein__RABV__KR906770.1

SEQ ID NO: 127762 - RNA, 1575 nt, Artificial Sequence
  derived and/or modified CDS sequence (opt2) from glycoprotein__RABV__KR906771.1
auggucccccaggcccuccucuucguccuccuccucgucuucccccucugcuucggcaaguuccccaucuacaccauccccgacaagcucggccccuggucccccaucgacauccaccaccucuccugccccaacaaccucgucgucgaggacgagggcugcaccaaccucuccggcuucuccuacauggagcucaaggucggcuacaucuccgccaucaaggucaacggcuucaccugcaccggcgucgucaccgaggccgagaccuacaccaacuucgucggcuacgucaccaccaccuucaagcgcaagcacuuccgccccauccccgacgccugccgcgccgccuacaacuggaagauggccggcgacccccgcuacgaggagucccuccacaaccccuaccccgacuaccacuggcuccgcaccgucaagaccaccaaggagucccucgucaucaucucccccuccgucgccgaccucgaccccuacgacaagucccuccacucccgcgucuucaccuccggcaagugcuccggcaucaccgucuccuccaccuacugcuccaccaaccacgacuacaccaucuggaugcccgagaacccccgccucggcaccuccugcaacaucuucgucaacuccaagggcaagcgcgccuccaagggcggcaagaccugcggcuucgucgacgagcgcggccucuacaagucccucaagggcgccugcaagcucaagcucugcggcguccucggccuccgccucauggacggcaccugggucgccaugcagaccuccgacgagaccaaguggugcucccccgaccagcucgucaacaugcacgacuuccgcuccgacgagaucgagcaccucgucgucgaggagcucgucaagaagcgcgaggagugccucgacgcccucgaguccaucaugaccaccaaguccgucuccuuccgccgccucucccaccuccgcaagcucguccccggcuucggcaaggccuacaccaucuucaacaagacccucauggaggccgacgcccacuacaaguccguccgcaccuggaacgagaucauccccuccaagggcugccuccgcgucggcggccgcugccacccccacgucaacggcgucuucuucaacggcaucauccucggccccaacggccacguccucauccccgagaugcaguccucccuccuccagcagcacauggagcuccucgaguccuccgucaucccccucaugcacccccucgccgaccccuccaccgucuucaaggacggcgacgaggccgaggacuucgucgagguccaccuccccgacguccacaagcaggucuccggcgucgaccucggccuccccaacuggggcaaguacguccuccucuccgccggcacccucaucgcccucaugcucaucaucuuccucaugaccugcugccgccgcgucaaccgccccgaguccacccagcgcucccucggcggcaccggccgcaaggucuccgucaccucccaguccggcaaggucaucuccuccugggaguccuacaaguccggcggcgagacccgccucuga

SEQ ID NO: 127763 - RNA, 1575 nt, Artificial Sequence; identical to SEQ ID NO: 127736
  derived and/or modified CDS sequence (opt2) from glycoprotein__RABV__KR906773.1

SEQ ID NO: 127764 - RNA, 1575 nt, Artificial Sequence; identical to SEQ ID NO: 127733
  derived and/or modified CDS sequence (opt2) from glycoprotein__RABV__KR906776.1

SEQ ID NO: 127765 - RNA, 1575 nt, Artificial Sequence; identical to SEQ ID NO: 127736
  derived and/or modified CDS sequence (opt2) from glycoprotein__RABV__KR906778.1

SEQ ID NO: 127766 - RNA, 1575 nt, Artificial Sequence
  derived and/or modified CDS sequence (opt2) from glycoprotein__RABV__KR906779.1
auggucccccaggcccuccucuucgucccccuccucgucuucccccucugcuucggcaaguuccccaucuacaccauccccgacaagcucggccccuggucccccaucgacauccaccaccucuccugccccaacaaccucgucgucgaggacgagggcugcaccaaccucuccggcuucuccuacauggagcucaaggucggcuacaucuccgccaucaaggucaacggcuucaccugcaccggcgucgucaccgaggccgagaccuacaccaacuucgucggcuacgucaccaccaccuucaagcgcaagcacuuccgccccauccccgacgccugccgcgccgccuacaacuggaagauggccggcgacccccgcuacgaggagucccuccacaaccccuaccccgacuaccacuggcuccgcaccgucaagaccaccaaggagucccucgucaucaucucccccuccgucgccgaccucgaccccuacgacaagucccuccacucccgcgucuuccccuccggcaagugcuccggcaucaccgucuccuccaccuacugcuccaccaaccacgacuacaccaucuggaugcccgagaacccccgccucggcaccuccugcgacaucuucaccaacucccgcggcaagcgcgccuccaagggcggcaagaccugcggcuucgucgacgagcgcggccucuacaagucccucaagggcgccugcaagcucaagcucugcggcguccucggccuccgccucauggacggcaccugggucgccaugcagaccuccgacgagaccaaguggugcccccccgaccagcucgucaacaugcacgacuuccgcuccgacgagaucgagcaccucgucgucgaggagcucgucaagaagcgcgaggagugccucgacgcccucgaguccaucaugaccaccaaguccgucuccuuccgccgccucucccaccuccgcaagcucguccccggcuucggcaaggccuacaccaucuucaacaagacccucauggaggccgacgcccacuacaaguccguccgcaccuggaacgagaucauccccuccaagggcugccuccgcgucggcggccgcugccacccccacgucaacggcgucuucuucaacggcaucauccucggccccgacggccacguccucauccccgagaugcaguccucccuccuccagcagcacauggagcuccucgaguccuccgucaucccccucaugcacccccucgccgaccccuccaccgucuucaaggacggcgacgaggccgaggacuucgucgagguccaccuccccgacguccacaagcaggucuccggcgucgaccucggccuccccaacuggggcaaguacguccuccucuccgccggcacccucaucgcccucaugcucaucaucuuccucaugaccugcugccgccgcgucaaccgccccgaguccacccagcgcucccucggcggcaccggccgcaaggucuccgucaccucccaguccggcaaggucaucuccuccugggaguccuacaaguccggcggcgagacccgccucuga

SEQ ID NO: 127767 - RNA, 1575 nt, Artificial Sequence; identical to SEQ ID NO: 127736
  derived and/or modified CDS sequence (opt2) from glycoprotein__RABV__KR906780.1

SEQ ID NO: 127768 - RNA, 1575 nt, Artificial Sequence; identical to SEQ ID NO: 127736
  derived and/or modified CDS sequence (opt2) from glycoprotein__RABV__KR906781.1

SEQ ID NO: 127769 - RNA, 1575 nt, Artificial Sequence; identical to SEQ ID NO: 127752
  derived and/or modified CDS sequence (opt2) from glycoprotein__RABV__KR906782.1

SEQ ID NO: 127770 - RNA, 1575 nt, Artificial Sequence; identical to SEQ ID NO: 127733
  derived and/or modified CDS sequence (opt2) from glycoprotein__RABV__KR906784.1

SEQ ID NO: 127771 - RNA, 1575 nt, Artificial Sequence
  derived and/or modified CDS sequence (opt2) from glycoprotein__RABV__KR906785.1
auggucccccaggcccuccucuucgucccccuccucgucuucccccucugcuucggcaaguuccccaucuacaccauccccgacaagcucggccccuggucccccaucgacauccaccaccucuccugccccaacaaccucgucgucgaggacgagggcugcaccaaccucuccggcuucuccuacauggagcucaaggucggcuacaucuccgccaucaaggucaacggcuucaccugcaccggcgucgucaccgaggccgagaccuacaccaacuucgucggcuacgucaccaccaccuucaagcgcaagcacuuccgccccauccccgacgccugccgcgccgccuacaacuggaagauggccggcgacccccgcuacgaggagucccuccacaaccccuaccccgacuaccacuggcuccgcaccgucaagaccaccaaggagucccucgucaucaucucccccuccgucgccgaccucgaccccuacgacaagucccuccacucccgcgucuuccccuccggcaagugcuccggcaucaccgucuccuccaccuacugcuccaccaaccacgacuacaccaucuggaugcccgagaacccccgccucggcaccuccugcgacaucuucaccaacucccgcggcaagcgcgccuccaagggcggcaagaccugcggcuucgucgacgagcgcggccucuacaagucccuccgcggcgccugcaagcucaagcucugcggcguccucggccuccgccucauggacggcaccugggucgccaugcagaccuccgacgagaccaaguggugcccccccgaccagcucgucaacaugcacgacuuccgcuccgacgagaucgagcaccucgucgucgaggagcucgucaagaagcgcgaggagugccucgacgcccucgaguccaucaugaccaccaaguccgucuccuuccgccgccucucccaccuccgcaagcucguccccggcuucggcaaggccuacaccaucuucaacaagacccucauggaggccgacgcccacuacaaguccguccgcaccuggaacgagaucauccccuccaagggcugccuccgcgucggcggccgcugccacccccacgucaacggcgucuucuucaacggcaucauccucggccccgacggccacguccucauccccgagaugcaguccucccuccuccagcagcacauggagcuccucgaguccuccgucaucccccucaugcacccccucgccgaccccuccaccgucuucaaggagggcgacgaggccgaggacuucgucgagguccaccuccccgacguccacaagcaggucuccggcgucgaccucggccuccccaacuggggcaaguacguccuccucuccgccggcacccucaucgccuccaugcucaucaucuuccucaugaccugcugccgccgcgucaaccgccccgagcccacccagcgcucccucggcggcaccggccgcaaggucuccgucaccucccaguccggcaaggucaucuccuccugggaguccuacaaguccggcggcgagacccgccucuga

SEQ ID NO: 127772 - RNA, 1575 nt, Artificial Sequence
  derived and/or modified CDS sequence (opt2) from glycoprotein__RABV__KR906787.1
auggucccccaggcccuccucuucguccuccuccucgucuucccccucugcuucggcaaguuccccaucuacaccauccccgacaagcucggccccuggucccccaucgacauccaccaccucuccugccccaacaaccucgucgucgaggacgagggcugcaccaaccucuccggcuucuccuacauggagcucaaggucggcuacaucuccgccaucaaggucaacggcuucaccugcaccggcgucgucaccgaggccgagaccuacaccaacuucgucggcuacgucaccaccaccuucaagcgcaagcacuuccgccccauccccgacgccugccgcgccgccuacaacuggaagauggccggcgacccccgcuacgaggagucccuccacaaccccuaccccgacuaccacuggcuccgcaccgucaagaccaccaaggagucccucgucaucaucucccccuccgucgccgaccucgaccccuacgacaagucccuccacucccgcgucuucaccuccggcaagugcuccggcaucaccgucuccuccaccuacugcuccaccaaccacgacuacaccaucuggaugcccgagaacccccgccucggcaccuccugcaacaucuucgucaacuccaagggcaagcgcgccuccaagggcggcaagaccugcggcuucgucgacgagcgcggccucuacaagucccucaagggcgccugcaagcucaagcucugcggcguccucggccuccgccucauggacggcaccugggucgccaugcagaccuccgacgagaccaaguggugcucccccgaccagcucgucaacaugcacgacuuccgcuccgacgagaucgagcaccucgucgucgaggagcucgucaagaagcgcgaggagugccucgacgcccucgaguccaucaugaccaccaaguccgucuccuuccgccgccucucccaccuccgcaagcucguccccggcuucggcaaggccuacaccaucuucaacaagacccucauggaggccgacgcccacuacaaguccguccgcaccuggaacgagaucauccccuccaagggcugccuccgcgucggcggccgcugccacccccacgucaacggcgucuucuucaacggcaucauccucggccccgacggccacguccucauccccgagaugcaguccucccuccuccagcagcacauggagcuccucgaguccuccgucaucccccucaugcacccccucgccgaccccuccaccgucuucaaggacggcgacgaggccgaggacuucgucgagguccaccuccccgacguccacaagcaggucuccggcgucgaccucggccuccccaacuggggcaaguacguccuccucuccgccggcacccucaucgcccucaugcucaucaucuuccucaugaccugcugccgccgcgucaaccgccccgaguccacccagcgcucccuccgcggcaccggccgcaaggucuccgucaccucccaguccggcaaggucaucuccuccugggaguccuacaaguccggcggcgagacccgccucuga

SEQ ID NO: 127773 - RNA, 1575 nt, Artificial Sequence
  derived and/or modified CDS sequence (opt2) from glycoprotein__RABV__KR906788.1
auggucccccaggcccuccucuucgucccccuccucgucuucccccucugcuucggcaaguuccccaucuacaccauccccgacaagcucggccccuggucccccaucgacauccaccaccucuccugccccaacaaccucgucgucgaggacgagggcugcaccaaccucuccggcuucuccuacauggagcucaaggucggcuacaucuccgccaucaaggucaacggcuucaccugcaccggcgucgucaccgaggccgagaccuacaccaacuucgucggcuacgucaccaccaccuucaagcgcaagcacuuccgccccauccccgacgccugccgcgccgccuacaacuggaagauggccggcgacccccgcuacgaggagucccuccacaaccccuaccccgacuaccacuggcuccgcaccgucaagaccaccaaggagucccucgucaucaucucccccuccgucgccgaccucgaccccuacgacaagucccuccacucccgcgucuucaccuccggcaagugcuccggcaucaccgucuccuccaccuacugcuccaccaaccacgacuacaccaucuggaugcccgagaacccccgccucggcaccuccugcaacaucuucgucaacuccaagggcaagcgcgccuccaagggcggcaagaccugcggcuucgucgacgagcgcggccucuacaagucccucaagggcgccugcaagcucaagcucugcggcguccucggccuccgccucauggacggcaccugggucgccaugcagaccuccgacgagaccaaguggugcucccccgaccagcucgucaacaugcacgacuuccgcuccgacgagaucgagcaccucgucgucgaggagcucgucaagaagcgcgaggagugccucgacgcccucgaguccaucaugaccaccaaguccgucuccuuccgccgccucucccaccuccgcaagcucguccccggcuucggcaaggccuacaccaucuucaacaagacccucauggaggccgacgcccacuacaaguccguccgcaccuggaacgagaucauccccuccaagggcugccuccgcgucggcggccgcugccacccccacgucaacggcgucuucuucaacggcaucauccucggccccgacggccacguccucauccccgagaugcaguccucccuccuccagcagcacauggagcuccucgaguccuccgucaucccccucaugcacccccucgccgaccccuccaccgucuucaaggacggcgacgaggccgaggacuucgucgagguccaccuccccgacguccacaagcaggucuccggcgucgaccucggccuccccaacuggggcaaguacguccuccucuccgccggcacccucaucgcccucaugcucaccaucuuccucaugaccugcugccgccgcgucaaccgccccgaguccacccagcgcucccucggcggcaccggccgcaaggucuccgucaccucccaguccggcaaggucaucuccuccugggaguccuacaaguccggcggcgagacccgccucuga

SEQ ID NO: 127774 - RNA, 1575 nt, Artificial Sequence; identical to SEQ ID NO: 127766
  derived and/or modified CDS sequence (opt2) from glycoprotein__RABV__KR906790.1

SEQ ID NO: 127775 - RNA, 1575 nt, Artificial Sequence; identical to SEQ ID NO: 127728
  derived and/or modified CDS sequence (opt2) from glycoprotein__RABV__KT023100.1

SEQ ID NO: 127776 - RNA, 1575 nt, Artificial Sequence
  derived and/or modified CDS sequence (opt2) from glycoprotein__RABV__KT221112.1
augaucccccaggcccuccucuucgucccccuccucgucuucucccucugcuucggcaaguuccccaucuacaccauccccgacaagcucggccccuggucccccaucgacauccaccaccucuccugccccaacaaccucgucgucgaggacgagggcugcaccaaccucuccggcuucuccuacauggagcucaaggucggcuacaucuccgccaucaaggucaacggcuucaccugcaccggcgucgucaccgaggccgagaccuacaccaacuucgucggcuacgucaccaccaccuucaagcgcaagcacuuccgccccacccccgacgccugccgcgccgccuacaacuggaagauggccggcgacccccgcuacgaggagucccucaacaaccccuaccccgacuaccacuggcuccgcaccgucaagaccaccaaggagucccucgucgucaucucccccuccgucgccgaccucgaccccuacgacaagucccuccacucccgcgucuuccccuccggcaagugcuccggcaucaccgucuccuccaccugcugcuccaccaaccacgacuacaccaucuggaugcccgagaacccccgccucggcaccuccugcgacaucuucgucaacucccgcggcaagcgcgccuccaagggcuccaagaccugcggcuucgucgacgagcgcggccucuacaagucccucaagggcgccugcaagcucaagcucugcggcguccucggccuccgccucauggacggcaccugggucgccauccagaccuccgacgagaccaaguggugcccccccgaccagcucgucaaccuccacgacuuccgcuccgacgagaucgagcaccucgucgucgaggagcucgucaagaagcgcgaggagugccucgacgcccucgaguccaucaugaccaccaaguccgucuccuuccgccgccucucccaccuccgcaagcucguccccggcuucggcaaggccuacaccaucuucaacaagacccucauggaggccgacgcccacuacaaguccguccgcaccuggaacgagaucauccccuccaagggcugccuccgcgucggcggccgcugccacccccacgucaacggcgucuucuucaacggcaucauccucggccccgacggccacguccucauccccgagaugcaguccucccuccuccagcagcacauggagcuccucgaguccuccgucaucccccucaugcacccccucgccgaccccuccaccaucuucaaggacggcgacgaggccgaggacuucgucgagguccaccuccccgacguccacaagcaggucuccggcgucgaccucggccuccccaacuggggcaaguacguccucauguccgccggcgcccucaucgcccucaugcucaugaucuucuccaugaccugcugccgcaagaccgaccgcaucggcuccacccaccacggccccggcgagaccggccgcaaggucuccgucaccucccagaacggccgcgucaucgccuccugggaguccuacaaguccggcggcgagaccaagcucuga

SEQ ID NO: 127777 - RNA, 1575 nt, Artificial Sequence
  derived and/or modified CDS sequence (opt2) from glycoprotein__RABV__KT221113.1
augaucccccaggcccuccucuucgucccccuccucgucuucucccucugcuucggcaaguuccccaucuacaccauccccgacaagcucggccccuggucccccaucgacauccaccaccucuccugccccaacaaccucgucgucgaggacgagggcugcaccaaccucuccggcuucuccuacauggagcucaaggucggcuacaucuccgccaucaaggucaacggcuucaccugcaccggcgucgucaccgaggccgagaccuacaccaacuucgucggcuacgucaccaccaccuucaagcgcaagcacuuccgccccacccccgacgccugccgcgccgcccacaacuggaagauggccggcgacccccgcuacgaggagucccuccacaaccccuaccccgacuaccacuggcuccgcaccgucaagaccaccaaggagucccucgucaucaucucccccuccgucgccgaccucgaccccuacgacaagucccuccacucccgcgucuuccccuccggcaagugcuccggcaucaccgucuccuccaccuacugcuccaccaaccacgacuacaccaucuggaugcccgagaacccccgccucggcaccuccugcgacaucuucgucaacucccgcggcaagcgcgccuccaagggcuccaagaccugcggcuucgucgacgagcgcggccucuacaagucccucaagggcgccugcaagcucaagcucugcggcguccucggccuccgccucauggacggcaccugggucgccauccagaccuccgacgagaccaaguggugcccccccgaccagcucgucaaccuccacgacuuccgcuccgacgagaucgagcaccucgucgucgaggagcucgucaagaagcgcgaggagugccucgacgcccucgaguccaucaugaccaccaaguccgucuccuuccgccgccucucccaccuccgcaagcucguccccggcuucggcaaggccuacaccaucuucaacaagacccucauggaggccgacgcccacuacaaguccguccgcaccuggaacgagaucauccccuccaagggcugccuccgcgucggcggccgcugccacccccacgucaacggcgucuucuucaacggcaucauccucggccccgacggccacguccucauccccgagaugcaguccucccuccuccagcagcacauggagcuccucgaguccuccgucaucccccucaugcacccccucgccgaccccuccaccaucuucaaggacggcgacgaggccgaggacuucgucgagguccaccuccccgacguccaccgccaggucuccggcgucgaccucggccuccccaacuggggcaaguacguccucauguccgccggcgcccucgucgcccucaugcucaugaucuuccucaugaccugcugcgucaagaccgaccgcaccggcuccacccaccacucccccggcgagaccggccgcaaggucuccgucaccucccagaacggccgcgucaucgccuccugggaguccuacaaguccggcggcgagaccaagcucuga

SEQ ID NO: 127778 - RNA, 1575 nt, Artificial Sequence
  derived and/or modified CDS sequence (opt2) from glycoprotein__RABV__KT221114.1
augaucccccaggcccuccucuucgucccccuccucgucuucucccucugcuucggcaaguuccccaucuacaccauccccgacaagcucggccccuggucccccaucgacauccaccaccucuccugccccaacaaccucgucgucgaggacgagggcugcaccaaccucuccggcuucuccuacauggagcucaaggucggcuacaucuccgccaucaaggucaacggcuucaccugcaccggcgucgucaccgaggccgagaccuacaccaacuucgucggcuacgucaccaccaccuucaagcgcaagcacuuccgccccacccccgacgccugccgcgccgcccacaacuggaagauggccggcgacucccgcuacgaggagucccuccacaaccccuaccccgacuaccacuggcuccgcaccgucaagaccaccaaggagucccucgucaucaucucccccuccgucgccgaccucgaccccuacgacaagucccuccacucccgcgucuuccccuccggcaagugcuccggcaucaccgucuccuccaccuacugcuccaccaaccacgacuacaccaucuggaugcccgagaacccccgccucggcaccuccugcgacaucuucgucaacucccgcggcaagcgcgccuccaagggcuccaagaccugcggcuucgucgacgagcgcggccucuacaagucccucaagggcgccugcaagcucaagcucugcggcguccucggccuccgccucauggacggcaccugggucgccauccagaccuccgacgagaccaaguggugcccccccgaccagcucgucaaccuccacgacuuccgcuccgacgagaucgagcaccucgucgucgaggagcucgucaagaagcgcgaggagugccucgacgcccucgaguccaucaugaccaccaaguccgucuccuuccgccgccucucccaccuccgcaagcucguccccggcuucggcaaggccuacaccaucuucaacaagacccucauggaggccgacgcccacuacaaguccguccgcaccuggaacgagaucauccccuccaagggcugccuccgcgucggcggccgcugccacccccacgucaacggcgucuucuucaacggcaucauccucggccccgacggccacguccucauccccgagaugcaguccucccuccuccagcagcacauggagcuccucgaguccuccgucaucccccucaugcacccccucgccgaccccuccaccaucuucaaggacggcgacgaggccgaggacuucgucgagguccaccuccccgacguccaccgccaggucuccggcgucgaccucggccuccccaacuggggcaaguacguccucauguccgccggcgcccucgucgcccucaugcucaugaucuuccucaugaccugcugcgucaagaccgaccgcaccggcuccacccaccacucccccggcgagaccggccgcaaggucuccgucaccucccagaacggccgcgucaucgccuccugggaguccuacaaguccggcggcgagaccaagcucuga

SEQ ID NO: 127779 - RNA, 1575 nt, Artificial Sequence; identical to SEQ ID NO: 127777
  derived and/or modified CDS sequence (opt2) from glycoprotein__RABV__KT221115.1

SEQ ID NO: 127780 - RNA, 1575 nt, Artificial Sequence
  derived and/or modified CDS sequence (opt2) from glycoprotein__RABV__KT221117.1
augaucccccaggcccuccucuucgucccccuccucgucuucucccucugcuucggcaaguuccccaucuacaccauccccgacaagcucggccccuggucccccaucgacauccaccaccucuccugccccaacaaccucgucgucgaggacgagggcugcaccaaccucuccggcuucuccuacauggagcucaaggucggcuacaucuccgccaucaaggucaacggcuucaccugcaccggcgucgucaccgaggccgagaccuacaccaacuucgucggcuacgucaccaccaccuucaagcgcaagcacuuccgccccacccccgacgccugccgcgccgccuacaacuggaagauggccggcgacccccgcuacgaggagucccuccacaaccccuaccccgacuaccacuggcuccgcaccgucaagaccaccaaggagucccucgucgucaucucccccuccgucgccgaccucgaccccuacgacaagucccuccacucccgcgucuuccccuccggcaagugcuccggcaucaccgucuccuccaccuacugcuccaccaaccacgacuacaccaucuggaugcccgagaacccccgccucggcaccuccugcgacaucuucgucaacucccgcggcaagcgcgccuccaagggcuccaagaccugcggcuucgucgacgagcgcggccucuacaagucccucaagggcgccugcaagcucaagcucugcggcguccucggccuccgccucauggacggcaccugggucgccauccagaccuccgacgagaccaaguggugcccccccgaccagcucgucaaccuccacgacuuccgcuccgacgagaucgagcaccucgucgucgaggagcucgucaagaagcgcgaggagugccucgacgcccucgaguccaucaugaccaccaaguccgucuccuuccgccgccucucccaccuccgcaagcucguccccggcuucggcaaggccuacaccaucuucaacaagacccucauggaggccgacgcccacuacaaguccguccgcaccuggaacgagaucauccccuccaagggcugccuccgcgucggcggccgcugccacccccacgucaacggcgucuucuucaacggcaucauccucggccccgacggccacguccucauccccgagaugcaguccucccuccuccagcagcacauggagcuccucgaguccuccgucaucccccucaugcacccccucgccgaccccuccaccaucuucaaggacggcgacgaggccgaggacuucgucgagguccaccuccccgacguccacaagcaggucuccggcgucgaccucggccuccccaacuggggcaaguacguccucauguccgccggcgcccucaucgcccucaugcucauggucuuccucaugaccugcugccgcaagaccgaccgcaccggcuccacccaccacucccccggcgagaccggccgcaaggucuccgucaccucccagaacgagcgcgucaucgccuccugggaguccuacaaguccggcggcgagaccaagcucuga

SEQ ID NO: 127781 - RNA, 1575 nt, Artificial Sequence
  derived and/or modified CDS sequence (opt2) from glycoprotein__RABV__KT221118.1
auggucccccaggcccuccucuucgucccccuccucgccgucccccucugcuucggcaaguuccccaucuacaccauccccgacaagcucggccccuggucccccaucgacauccaccaccucuccugccccaacaaccucgucgucgaggacgagggcugcaccaaccucuccggcuucuccuacauggagcucaaggucggcuacaucuccgccaucaaggucaacggcuucaccugcaccggcgucgucaccgaggccgagaccuacaccaacuucgucggcuacgucaccaccaccuucaagcgcaagcacuuccgccccacccccgacgccugccgcuccgccuacaacuggaagauggccggcgacccccgcuacgaggagucccuccacaaccccuaccccgacuaccacuggcuccgcaccgucaagaccaccaaggaguccuucgucaucaucucccccuccgucgccgaccucgaccccuacgacaagucccuccacucccgcgucuucccccgcggcaagugcuccggcaucaccgucuccuccaccuacugcuccaccaaccacgacuacaccaucuggaugcccgagaacccccgccucggcaccuccugcgacaucuucaccaacucccgcggcaagcgcgccuccaagggcuccaagaccugcggcuucgucgacgagcgcggccucuacaagucccucaagggcgccugcaagcucaagcucugcggcguccucggccuccgccucauggacggcaccugggucgccauccagaccuccgacgagaccaaguggugcccccccgaccagcucgucaaccuccacgacuuccacuccgacgagaucgagcaccucgucgucgagguccucgucaagaagcgcgaggagugccucgacgcccucgaguccaucaugaccaccaaguccgucuccuuccgccgccucucccaccuccgcaagcucguccccggcuucggcaaggccuacaccaucuucaacaagacccucauggaggccgacgcccacuacaaguccguccgcaccuggaacgagaucauccccuccaagggcugccuccgcgucggcggccgcugccacccccacgucaacggcgucuucuucaacggcaucauccucggccccgacggccacguccucauccccgagaugcaguccucccuccuccagcagcacauggagcuccucgaguccuccgucaucccccucaugcacccccucgccgaccccuccaccgucuucaaggacggcgacgaggccgaggacuucgucgagguccaccuccccgacguccacaagcaggucuccggcgucgaccucggccuccccuccuggggcaaguacguccucauguccgccggcauccucaccgcccucaugcucaugaucuuccucaugaccugcugccgccgcaccaaccgcgccgaguccauccagcacucccucggcgagaccggccgcaaggucuccgucaccucccagaacggccgcgucaucuccuccugggaguccuacaaguccggcggcgagaccaagcucuga

SEQ ID NO: 127782 - RNA, 1575 nt, Artificial Sequence; identical to SEQ ID NO: 126863
  derived and/or modified CDS sequence (opt2) from glycoprotein__RABV__KT221120.1

SEQ ID NO: 127783 - RNA, 1575 nt, Artificial Sequence
  derived and/or modified CDS sequence (opt2) from glycoprotein__RABV__KT221122.1
augaucccccagguccuccucuucguccccuuccucgucuucuccuccugcuucggcaaguuccccaucuacaccauccccgacaagcucggccccuggucccccaucgacauccaccaccucuccugccccaacaaccucgucgucgaggacgagggcugcaccaaccucuccggcuucuccuacauggagcucaaggucggcuacaucuccgccaucaaggucaacggcuucaccugcaccggcgucgucaccgaggccgagaccuacaccaacuucgucggcuacgucaccaccaccuucaagcgcaagcacuuccgccccacccccgacgccugccgcgccgccuacaacuggaagauggccggcgacccccgcuacgaggagucccuccacaaccccuaccccgacuaccacuggcuccgcaccgucaagaccuccaaggagucccucgucaucaucucccccuccgucgccgaccucgaccccuacgacaagucccuccacucccgcgucuuccccggcggcaagugcuccggcaucaccgucuccuccaccugcugcuccaccaaccacgacuacaccaucuggaugcccgagaacccccgccucggcaccuccugcgacaucuucaccaacucccgcggcaagcgcgccuccaagggcggcaagaccugcggcuucgucgacgagcgcggccucuacaagucccucaagggcgccugcaagcucaagcucugcggcguccucggccuccgccucauggacggcaccugggucgccauccagaccuccgacgagaucaaguggugcucccccgaccagcucgucaaccuccacgacuuccacuccgacgagaucgagcaccucgucgucgaggagcucgucaagaagcgcgaggagugccucgacgcccucgagaccaucaugaccaccaaguccgucuccuuccgccgccucucccaccuccgcaagcucguccccggcuucggcaaggccuacaccaucuucaacaagacccucauggaggccgacgcccacuacaaguccauccgcaccuggaacgagaucauccccuccaagggcugccuccgcgucggcggccgcugccacccccacgucaacggcgucuucuucaacggcaucauccucggccccgacggccacguccucauccccgagaugcaguccucccuccuccaccagcacauggagcuccucgaguccuccgucaucccccucaugcacccccucgccgaccccuccaccgucuucaaggacggcgacgaggccgaggacuucgucgagguccaccuccccgacguccacaagcagaucuccggcgucgaccucggccuccccaacuggggcaaguacguccucgucuccgccggcgcccucaccgcccucaugcucaugaucuuccucaugaccugcugccgcaagaccaaccgcgccgaguccauccagcacucccccggcgagaccggccgcaaggucuccgucaccucccacaacggccgcgucaucuccuccugggaguccuacaaguccggcggcgagaccaagcucuga

SEQ ID NO: 127784 - RNA, 1575 nt, Artificial Sequence; identical to SEQ ID NO: 126992
  derived and/or modified CDS sequence (opt2) from glycoprotein__RABV__KT221125.1

SEQ ID NO: 127785 - RNA, 1575 nt, Artificial Sequence; identical to SEQ ID NO: 126992
  derived and/or modified CDS sequence (opt2) from glycoprotein__RABV__KT221126.1

SEQ ID NO: 127786 - RNA, 1575 nt, Artificial Sequence; identical to SEQ ID NO: 127211
  derived and/or modified CDS sequence (opt2) from glycoprotein__RABV__KT221127.1

SEQ ID NO: 127787 - RNA, 1575 nt, Artificial Sequence; identical to SEQ ID NO: 126882
  derived and/or modified CDS sequence (opt2) from glycoprotein__RABV__KT221128.1

SEQ ID NO: 127788 - RNA, 1575 nt, Artificial Sequence; identical to SEQ ID NO: 126882
  derived and/or modified CDS sequence (opt2) from glycoprotein__RABV__KT221129.1

SEQ ID NO: 127789 - RNA, 1575 nt, Artificial Sequence
  derived and/or modified CDS sequence (opt2) from glycoprotein__RABV__KT221130.1
auggucccccccguccuccucuucgucccccuccucuucuucuccuccugcuucggcaaguuccccaucuaccccauccccgacaagcucggccccuggucccccaucgacauccaccaccucaccugccccaacaaccucgucgucgagaacgagggcugcaccauccucuccggcuucuccuacauggagcucaaggucggcuacaucucccccaucaaggucaacggcuucaccugcaccggcgucgucaccaaggccaagaccuacaccaacuucgucggcuacgucaccaccaccuucaagaagaagcacuucccccccaugcccgacgccugcaaggccgccuacaacuggaagauggccggcgacccccgcuacgagaagucccuccacaaccccuaccccgacuaccacuggcuccagaccgucaagaccaccaaggagucccucgucaucaucucccccuccgucgccaaccucgaccccuacgacaagucccuccacucccgcgucuuccccggcggcaagugcuccggcaucaccgucuccuccaccugcugcuccaccaaccacgacuacaccaucuggaugcccgagaaccccaagcucggcaccuccugcgacaucuucaccaacucccgcggcaagcgcgccuccaagggcggcaagaccugcggcuucgucgacgagcgcggccucuacaagucccucaagggcgccugcaagcucaagcucugcggcguccucggccuccgccucauggacggcaccugggucgccauccagaccuccgacgagaucaaguggugcucccccgaccagcucgucaaccuccacgacuuccacuccgacgagaucgagcaccucgucgucgaggagcucgucaagaagcgcgaggagugccucgacgcccucgagaccaucaugaccaccaaguccgucuccuuccgccgccucucccaccuccgcaagcucguccccggcuucggcaaggccuacaccaucuucaacaagacccucauggaggccgacgcccacuacaaguccauccgcaccuggaacgagaucauccccuccaagggcugccuccgcgucggcggccgcugccacccccacgucaacggcgucuucuucaacggcaucauccucggccccgacggccacguccucauccccgagaugcaguccucccuccuccaccagcacauggagcuccucgaguccuccgucaucccccucaugcacccccucgccgaccccuccaccgucuucaaggacggcgacgaggccgaggacuucgucgagguccaccuccccgacguccacaagcagaucuccggcgucgaccucggccuccccaacuggggcaaguacguccucaucuccgccggcgcccucaccgcccucaugcucaugaucuuccucaugaccugcugccgcaaggccaaccgcgccgaguccauccagcacaaccccggcgagaccggccgcaaggucuccgucaccucccacaacggccgcgucaucuccuccugggaguccuacaaguccggcggcgagaccaagcucuga

SEQ ID NO: 127790 - RNA, 1575 nt, Artificial Sequence
  derived and/or modified CDS sequence (opt2) from glycoprotein__RABV__KT221132.1
augaucccccagguccuccucuucguccaccuccucgucuucuccuccugcuucggcaaguuccccaucuacaccauccccgacaagcucggccccuggucccccaucgacauccaccaccucuccugccccaacaaccucgucgucgaggacgagggcugcaccaaccucuccggcuucuccuacauggagcucaaggucggcuacaucuccgccaucaaggucaacggcuucaccugcaccggcgucgucaccgaggccgagaccuacaccaacuucgucggcuacgucaccaccaccuucaagcgcaagcacuuccgccccaugcccgacgccugccgcgccgccuacaacuggaagauggccggcgacccccgcuacgaggagucccuccacaaccccuaccccgacuaccacuggcuccgcaccgucaagaccaccaaggagucccucgucaucaucucccccuccgucgccgaccucgaccccuacgacaagucccuccacucccgcgucuuccccggcggcaagugcuccggcaucaccgucuccuccaccugcugcuccaccaaccacgacuacaccaucuggaugcccgagaacccccgccucggcaccuccugcgacaucuucaccaacucccgcggcaagcgcgccuccaagggcggcaagaccugcggcuucgucgacgagcgcggccucuacaagucccucaagggcgccugcaagcucaagcucugcggcguccucggccuccgccucauggacggcaccugggucgccauccagaccuccgacgagaucaaguggugcucccccgaccagcucgucaaccuccacgacuuccacuccgacgagaucgagcaccucgucgucgaggagcucgucaagaagcgcgaggagugccucgacgcccucgagaccaucaugaccaccaaguccgucuccuuccgccgccucucccaccuccgcaagcucguccccggcuucggcaaggccuacaccaucuucaacaagacccucauggaggccgacgcccacuacaaguccauccgcaccuggaacgagaucauccccuccaagggcugccuccgcgucggcggccgcugccacccccacgucaacggcgucuucuucaacggcaucauccucggccccgacggccacguccucauccccgagaugcaguccucccuccuccaccagcacauggagcuccucgaguccuccgucaucccccucaugcacccccucgccgaccccuccaccgucuucaaggacggcgacgaggccgaggacuucgucgagguccaccuccccgacguccacaagcagaucuccggcgucgaccucggccuccccaacuggggcaaguacguccucaucuccgccggcgcccucaccgcccucaugcucaccaucuuccucaugaccugcugccgcaagaccaaccgcgccggcuccauccagcacucccccggcgagaccggccgcaaggucuccgucaccucccacaacggccgcgucaucuccuccugggaguccuacaaguccggcuccgagaccaagcucuga

SEQ ID NO: 127791 - RNA, 1575 nt, Artificial Sequence; identical to SEQ ID NO: 126863
  derived and/or modified CDS sequence (opt2) from glycoprotein__RABV__KT221133.1

SEQ ID NO: 127792 - RNA, 1575 nt, Artificial Sequence; identical to SEQ ID NO: 126863
  derived and/or modified CDS sequence (opt2) from glycoprotein__RABV__KT221134.1

SEQ ID NO: 127793 - RNA, 1575 nt, Artificial Sequence
  derived and/or modified CDS sequence (opt2) from glycoprotein__RABV__KT221136.1
auggucccccaggcccuccucuucgucccccuccucgccaucccccucugcuucggcaaguuccccaucuacaccauccccgacaagcucggccccuggucccccaucgacauccaccaccucuccugccccaacaaccucgucgucgaggacgagggcugcaccaaccucuccggcuucuccuacauggagcucaaggucggcuacaucuccgccaucaaggucaacggcuucaccugcaccggcgucgucaccgaggccgagaccuacaccaacuucgucggcuacgucaccaccaccuucaagcgcaagcacuuccgccccacccccgacgccugccgcuccgccuacaacuggaagauggccggcgacccccgcuacgaggagucccuccacaaccccuaccccgacuaccacuggcuccgcaccgucaagaccaccaaggaguccuucgucaucaucucccccuccgucgccgaccucgaccccuacgacaagucccuccacucccgcgucuucccccgcggcaagugcuccggcaucaccgucuccuccaccuacugcuccaccaaccacgacuacaccaucuggaugcccgagaacccccgccucggcaccuccugcgacaucuucaccaacucccgcggcaagcgcgccuccaagggcuccaagaccugcggcuucgucgacgagcgcggccucuacaagucccucaagggcgccugcaagcucaagcucugcggcguccucggccuccgccucauggacggcaccugggucgccauccagaccuccgacgagaccaaguggugcccccccgaccagcucgucaaccuccacgacuuccacuccgacgagaucgagcaccucgucgucgaggagcucgucaagaagcgcgaggagugccucgacgcccucgaguccaucaugaccaccaaguccgucuccuuccgccgccucucccaccuccgcaagcucguccccggcuucggcaaggccuacaccaucuucaacaagacccucauggaggccgacgcccacuacaaguccguccgcaccuggaacgagaucauccccuccaagggcugccuccgcgucggcggccgcugccacccccacgucaacggcgucuucuucaacggcaucauccucggccccgacggccacguccucauccccgagaugcaguccucccuccuccagcagcacauggagcuccucgaguccuccgucaucccccucaugcacccccucgccgaccccuccaccgucuucaaggacggcgacgaggccgaggacuucgucgagguccaccuccccgacguccacaagcaggucuccggcgucgaccucggccuccccuccuggggcaaguacguccucauguccgccggcauccucaccgcccucaugcucaugaucuuccucaugaccugcugccgccgcaccaaccgcgccgaguccauccagcgcucccucggcgagaccggccgcaaggucuccgucaccucccaguccggccgcgucaucuccuccugggaguccuacaaguccggcggcgagaccaagcucuga

SEQ ID NO: 127794 - RNA, 1575 nt, Artificial Sequence; identical to SEQ ID NO: 126992
  derived and/or modified CDS sequence (opt2) from glycoprotein__RABV__KT221138.1

SEQ ID NO: 127795 - RNA, 1575 nt, Artificial Sequence
  derived and/or modified CDS sequence (opt2) from glycoprotein__RABV__KT221139.1
augaucccccagguccuccucuucgucacccuccucgucuucuccuccugcuucggcaaguuccccaucuacaccauccccgacaagcucggccccuggucccccaucgacauccaccaccucuccugccccaacaaccucgucgucgaggacgagggcugcaccaaccucuccggcuucuccuacauggagcucaaggucggcuacaucuccgccaucaaggucaacggcuucaccugcaccggcgucgucaccgaggccgagaccuacaccaacuucgucggcuacgucaccaccaccuucaagcgcaagcacuuccgccccaugcccgacgccugccgcgccgccuacaacuggaagauggccggcgacccccgcuacgaggagucccuccacaaccccuaccccgacuaccacuggcuccgcaccgucaagaccaccaaggagucccucgucaucaucucccccuccgucgccgaccucgaccccuacgacaagucccuccacucccgcgucuuccccggcggcaagugcuccggcaucaccgucuccuccaccugcugcuccaccaaccacgacuacaccaucuggaugcccgagaacccccgccucggcaccuccugcgacaucuucaccaacucccgcggcaagcgcgccuccaagggcggcaagaccugcggcuucgucgacgagcgcggccucuacaagucccucaagggcgccugcaagcucaagcucugcggcguccucggccuccgccucauggacggcaccugggucgccauccagaccuccgacgagaucaaguggugcccccccgaccagcucgucaaccuccacgacuuccacuccgacgagaucgagcaccucgucgucgaggagcucgucaagaagcgcgaggagugccucgacgcccucgagaccaucaugaccaccaaguccgucuccuuccgccgccucucccaccuccgcaagcucguccccggcuucggcaaggccuacaccaucuucaacaagacccucauggaggccgacgcccacuacaaguccauccgcaccuggaacgagaucauccccuccaagggcugccuccgcgucggcggccgcugccacccccacgucaacggcgucuucuucaacggcaucauccucggccccgacggccacguccucauccccgagaugcaguccucccuccuccaccagcacauggagcuccucgaguccuccgucaucccccucaugcacccccucgccgaccccuccaccgucuucaaggacggcgacgaggccgaggacuucgucgagguccaccuccccgacguccacaagcagaucuccggcgucgaccucggccuccccaacuggggcaaguacguccucaucuccgccggcgcccucaccgcccucaugcucaccaucuuccucaugaccugcugccgcaagaccaacggcgccggcuccauccagcacucccccggcgagaccggccgcaaggucuccgucaccucccacaacggccgcgucaucuccuccugggaguccuacaaguccggcuccgagaccaagcucuga

SEQ ID NO: 127796 - RNA, 1575 nt, Artificial Sequence; identical to SEQ ID NO: 127795
  derived and/or modified CDS sequence (opt2) from glycoprotein__RABV__KT221140.1

SEQ ID NO: 127797 - RNA, 1575 nt, Artificial Sequence
  derived and/or modified CDS sequence (opt2) from glycoprotein__RABV__KT276368.1
augauccuccaggcccuccucuucgucccccuccucaucuccucccucugccucggcaaguuccccaucuacaccauccccgacaagcucggccccuggucccccaucgacauccaccaccucuccugccccaacaaccucgucgucgaggacgagggcugcaccaaccucuccggcuucuccuacauggagcucaaggucggcuacaucuccgccaucaaggucaacggcuucaccugcaccggcgucgucaccgaggccgagaccuacaccaacuucgucggcuacgucaccaccaccuucaagcgcaagcacuuccgccccauccccgacgccugccgcgccgccuacaacuggaagauggccggcgacccccgcuacgaggagucccuccagaaccccuaccccgacuaccacuggcuccgcaccgucaagaccaccaaggagucccucaucaucaucucccccuccgucgccgaccucgaccccuacgacaagucccuccacucccgcgucuuccccggcggcaagugccucggcaucaccgucuccuccaccuacugcuccaccaaccacgacuacaccaucuggaugcccgaggagccccgccucggcaccuccugcgacaucuucaccuccuccaagggcaagaaggccuccaagggcggcaagaccugcggcuucgucgacgagcgcggccucuacaagucccucaagggcgccugcaagcucaagcucugcggcguccucggccuccgccucauggacggcaccugggucuccauccagaccuccgacgacaccaaguggugcccccccgaccagcucgucaaccuccacgacuuccacuccgacgagaucgagcaccucgucgucgaggagcucgucaagaagcgcgaggagugccucgacgcccucgaguccaucaugaccaccaaguccgucuccuuccgccgccucuccuaccuccgcaagcucguccccggcuucggcaaggccuacaccaucuucaacaagacccucauggaggccgacgcccacuacaaguccguccgcaccuggaacgagaucauccccuccaagggcugccucaagguccgcgagcgcugccacccccccgucgacggcgucuucuucaacggcaucauccucggccccgacggcaacguccucauccccgagaugcaguccucccuccuccagcagcacauggagcuccucgaguccuccgucaucccccucaugcacccccucgccgaccccuccaccgucuucaaggagggcgacgaggccgaggacuucgucgagguccaccuccccgacguccacaagcagaucuccggcgucgaccucggccuccccuccuggggcaaguaccuccucaugaucgccggcggccucgccacccucguccucaucaucugcuccauggccugcugccgccgcaccaagcagaccgagucccgccgccgcggcucccgcgaguccgagaagaaggucaccgccgccccccagacccgcaaggucgucuccuccugggagcucuacaaguccgagggcgacgcccgccucuga

SEQ ID NO: 127798 - RNA, 1575 nt, Artificial Sequence
  derived and/or modified CDS sequence (opt2) from glycoprotein__RABV__KT336432.1
auggucccccaggcccuccucuucgucccccuccucgucuucccccucugcuucggcaaguuccccaucuacaccauccccgacaagcucggccccuggucccccaucgacauccaccaccucuccugccccaacaaccucgucgucgaggacgagggcugcaccaaccucuccggcuucuccuacauggagcucaaggucggcuacaucuccgccaucaaggucaacggcuucaccugcaccggcgucgucaccgaggccgagaccuacaccaacuucgucggcuacgucaccaccaccuucaagcgcaagcacuuccgcccccuccccgacgccugccgcgccgccuacaacuggaagauggccggcgacccccgcuacgaggagucccuccacaaccccuaccccgacuaccacuggcuccgcaccgucaagaccaccaaggagucccucgucaucaucucccccuccgucgccgaccucgaccccuacgacaagucccuccacucccgcgucuuccccuccggcaagugcuccggcaucaccgucuccuccaccuucugcuccaccaaccacgacuacaccaucuggaugcccgagaacccccgccucggcaccuccugcgacaucuucgccaacucccgcggcaagcgcgccuccaagggcggcaagaccugcggcuucgucgacgagcgcggccucuacaagucccucaagggcgccugcaagcucaagcucugcggcguccucggccuccgccucauggacggcaccugggucgccauccagaccuccgacgagaccaaguggugcccccccgaccagcucgucaacaugcacgacuuccgcuccgacgagaucgagcaccucgucgucgaggagcucgucaagaagcgcgaggagugccucgacgcccucgaguccaucaugaccaccaaguccgucuccuuccgccgccucucccaccuccgcaagcucguccccggcuucggcaaggccuacaccaucuucaacaagacccucauggaggccgacgcccacuacaaguccguccgcaccuggaacgagaucauccccuccaagggcugccuccgcgucggcggccgcugccacccccacgucaacggcgucuucuucaacggcaucauccucggccccgacggccacguccucauccccgagaugcaguccucccuccuccagcagcacauggagcuccucgaguccuccgucaucccccucaugcacccccucgccgaccccuccaccgucuucaaggacggcgacgaggccgaggacuucgucgagguccaccuccccgacguccacaagcaggucuccggcgucgaccucggccuccccaacuggggcaaguacguccuccucuccgccggcacccucaucgcccucaugcucaucaccuuccucaugaccugcugccgccgcgucaaccgccccgaguccaccaagcgcucccucggcggcaccggccgcaaggucuccgucaccucccaguccggcaaggucaucuccuccugggaguccuacaaguccggcggcgagacccgccucuga

SEQ ID NO: 127799 - RNA, 1575 nt, Artificial Sequence
  derived and/or modified CDS sequence (opt2) from glycoprotein__RABV__KT336433.1
auggucccccaggcccuccucuucgucccccuccucgucuucucccucugcuucggcaaguuccccaucuacaccauccccgacaagcucggccccuggucccccaucgacauccaccaccucuccugccccaacaaccucgucgucgaggacgagggcugcaccaaccucuccggcuucuccuacauggagcucaaggucggcuacaucuccgccaucaaggucaacggcuucaccugcaccggcgucgucaccgaggccgagaccuacaccaacuucgucggcuacgucaccaccaccuucaagcgcaagcacuuccgccccauccccgacgccugccgcgccgccuacaacuggaagauggccggcgacccccgcuacgaggagucccuccacaaccccuaccccgacuaccacuggcuccgcaccgucaagaccaccaaggagucccucgucaucaucucccccuccgucgccgaccucgaccccuacgacaagucccuccacucccgcgucuuccccuccggcaagugcuccggcaucaccgucuccuccaccuacugcuccaccaaccacgacuacaccaucuggaugcccgagaacccccgccucggcaccuccugcgacaucuucgccaacucccgcggcaagcgcgccuccaagggcggcaagaccugcggcuucgucgacgagcgcggccucuacaagucccucaagggcgccugcaagcucaagcucugcggcguccucggccuccgccucauggacggcaccugggucgccaugcagaccuccgacgagaccaaguggugcccccccgaccagcucgucaacaugcacgacuuccgcuccgacgagaucgagcaccucgucgucgaggagcucgucaagaagcgcgaggagugccucgacgcccucgaguccaucaucaccaccaaggccgucuccuuccgccgccucucccaccuccgcaagcucguccccggcuucggcaaggccuacaccaucuucaacaagacccucauggaggccgacgcccacuacaaguccguccgcaccuggaacgagaucauccccuccaagggcugccuccgcgucggcggccgcugccacccccacgucaacggcgucuucuucaacggcaucauccucggccccgacggccgcguccucauccccgagaugcaguccucccuccuccagcagcacauggagcuccucgaguccuccgucaucccccucaugcacccccucgccgaccccuccaccgucuucaaggacggcgacgaggccgaggacuucgucgagguccaccuccccgacguccacaagcaggucuccggcgucgaccucggccuccccaacuggggcaaguacguccuccucuccgccggcacccucaucgcccucaugcucaccaucuuccucaucaccugcugccgccgcgucaaccgccccgaguucacccagcgcucccucggcggcaccggccgcaaggucuccgucaccucccaguccggcaaggucaucuccuccugggaguccuacaaguccggcggcgagacccgccucuga

SEQ ID NO: 127800 - RNA, 1575 nt, Artificial Sequence
  derived and/or modified CDS sequence (opt2) from glycoprotein__RABV__KT336434.1
auggucccccaggcccuccucuucgucccccuccucgucuucucccucugcuucggcaaguuccccaucuacaccauccccgacaagcucggccccuggucccccaucgacauccaccaccucuccugccccaacaaccucgucgucgaggacgagggcugcaccaaccucuccggcuucuccuacauggagcucaaggucggcuacaucuccgccaucaaggucaacggcuucaccugcaccggcgucgucaccgaggccgagaccuacaccaacuucgucggcuacgucaccaccaccuucaagcgcaagcacuuccgccccauccccgacgccugccgcgccgccuacaacuggaagauggccggcgacccccgcuacgaggagucccuccacaaccccuaccccgacuaccacuggcuccgcaccgucaagaccaccaaggagucccucgucaucaucucccccuccgucgccgaccucgaccccuacgacaagucccuccacucccgcgucuuccccuccggcaagugcuccggcaucaccgucuccuccaccuucugcuccaccaaccacgacuacaccaucuggaugcccgagaacccccgccucggcaccuccugcgacaucuucgccaacucccgcggcaagcgcgccuccaagggcggcaagaccugcggcuucgucgacgagcgcggccucuacaagucccucaagggcgccugcaagcucaagcucugcggcguccucggccuccgccucauggacggcaccugggucgccaugcagaccuccgacgagaccaaguggugcccccccgaccagcucgucaacaugcacgacuuccgcuccgacgagaucgagcaccucgucgucgaggagcucgucaagaagcgcgaggagugccucgacgcccucgaguccaucaugaccaccaaguccgucuccuuccgccgccucucccaccuccgcaagcucguccccggcuucggcaaggccuacaccaucuucaacaagacccucauggaggccgacgcccacuacaaguccguccgcaccuggaacgagaucauccccuccaagggcugccuccgcgucggcggccgcugccacccccacgucaacggcgucuucuucaacggcaucauccucggccccgacggccacguccucauccccgagaugcaguccucccuccuccagcagcacauggagcuccucgaguccuccgucaucccccucaugcacccccucgccgaccccuccaccgucuucaaggacggcgacgaggccgaggacuucgucgagguccaccuccccgacguccacaagcaggucuccggcgucgaccucggccuccccaacuggggcaaguacguccuccucuccgccggcacccucaucgcccucaugcucaucaucuuccucaugaccugcugccgccgcgucaaccgccccgaguccaccgaccgcucccucggcggcaccggccgcaaggucuccgucaccucccaguccggcaaggucaucuccuccugggaguccuacaaguccggcggcgagacccgccucuga

SEQ ID NO: 127801 - RNA, 1575 nt, Artificial Sequence
  derived and/or modified CDS sequence (opt2) from glycoprotein__RABV__KT336435.1
auggucccccaggcccuccucuuccucccccuccucgucuucccccucugcuucggcaaguuccccaucuacaccauccccgacaagcucggccccuggucccccaucgacauccaccaccucuccugccccaacaaccucgucgucgaggacgagggcugcaccaaccucuccggcuucuccuacauggagcucaaggucggcuacaucuccgccaucaaggucaacggcuucaccugcaccggcgucgucaccgaggccgagaccuacaccaacuucgucggcuacgucaccaccaccuucaagcgcaagcacuuccgccccauccccgacgccugccgcgccgccuacaacuggaagauggccggcgacccccgcuacgaggagucccuccacaaccccuaccccgacuaccacuggcuccgcaccgucaagaccaccaaggagucccucgucaucaucucccccuccgucgccgaccucgaccccuacgacaagucccuccacucccgcgucuuccccuccggcaagugcuccggcaucaccgucuccuccaccuucugcuccaccaaccacgacuacaccaucuggaugcccgagaacccccgccucggcaccuccugcgacaucuucgccaacucccgcggcaagcgcgccuccaagggcggcaagaccugcggcuucgucgacgagcgcggccucuacaagucccucaagggcgccugcaagcucaagcucugcggcguccucggccuccgccucauggacggcaccugggucgccaugcagaccuccgacgagaccaaguggugcccccccgaccagcucgucaacauccacgacuuccgcuccgacgagaucgagcaccucgucgucgaggagcucgucaagaagcgcgaggagugccucgacgcccucgaguccaucaugaccaccaaguccgucuccuuccgccgccucucccaccuccgcaagcucguccccggcuucggcaaggccuacaccaucuucaacaagacccucauggaggccgacgcccacuacaaguccguccgcaccuggaacgagaucauccccuccaagggcugccuccgcgucggcggccgcugccacccccacgucaacggcgucuucuucaacggcaucauccucggccccgacggccacguccucauccccgagaugcaguccucccuccuccagcagcacauggagcuccucgaguccuccgucaucccccucaugcacccccucgccgaccccuccaccgucuucaaggacggcgacgaggccgaggacuucgucgagguccaccuccccgacguccacaagcaggucuccggcgucgaccucggccuccccaacuggggcaaguacguccuccucuccgccggcacccucaucgcccucaugcucaucaucuuccucaugaccugcugccgccgcgucaaccgccccgaguccaccgagcgcucccucggccgcaccggccgcaaggucuccgucaccucccaguccggcaaggucaucuccuccugggaguccuacaaguccggcggcgagacccgccucuga

SEQ ID NO: 127802 - RNA, 1575 nt, Artificial Sequence
  derived and/or modified CDS sequence (opt2) from glycoprotein__RABV__KT336436.1
auggucccccaggcccuccucuucgucccccuccucgucuucccccucugcuucggcaaguuccccaucuacaccauccccgacaagcucggccccuggucccccaucgacauccaccaccucuccugccccaacaaccucgucgucgaggacgagggcugcaccaaccucuccggcuucuccuacauggagcucaaggucggcuacaucuccgccaucaaggucaacggcuucaccugcaccggcgucgucaccgaggccgagaccuacaccaacuucgucggcuacgucaccaccaccuucaagcgcaagcacuuccgccccauccccgacgccugccgcgccgccuacaacuggaagauggccggcgacccccgcuacgaggagucccuccacaaccccuaccccgacuaccacuggcuccgcaccgucaagaccaccaaggagucccucgucaucaucucccccuccgucgccgaccucgaccccuacgacaagucccuccacucccgcgucuuccccuccggcaagugcuccggcaucaccgucuccuccaccuucugcuccaccaaccacgacuacaccaucuggaugcccgagaacccccgccucggcaccuccugcgacaucuucgccaacucccgcggcaagcgcgccuccaagggcggcaagaccugcggcuucgucgacgagcgcggccucuacaagucccucaagggcgccugcaagcucaagcucugcggcguccucggccuccgccucauggacggcaccugggucgccaugcagaccuccgacgagaccaaguggugcccccccgaccagcucgucaacaugcacgacuuccgcuccgacgagaucgagcaccucgucgucgaggagcucgucaagaagcgcgaggagugccucgacgcccucgaguccaucaugaccaccaaguccgucuccuuccgccgccucucccaccuccgcaagcucguccccggcuucggcaaggccuacaccaucuucaacaagacccucauggaggccgacgcccacuacaaguccguccgcaccuggaacgagaucauccccuccaagggcugccuccgcgucggcggccgcugccacccccacgucaacggcgucuucuucaacggcaucauccucggccccgacggccacguccucauccccgagaugcaguccucccuccuccagcagcacauggagcuccucgaguccuccgucaucccccucaugcacccccucgccgaccccuccaccgucuucaaggacggcgacgaggccgaggacuucgucgagguccaccuccccgacguccacaagcaggucuccggcgucgaccucggccuccccaacuggggcaaguacguccuccucuccgccggcacccucaucgcccucaugcucaucaccuuccucaugaccugcugccgccgcgucaaccgccccgaguccaccaagcgccgccucggcggcaccggccgcaaggucuccgucaccucccaguccggcaaggucaucuccuccugggaguccuacaaguccggcggcgagacccgccucuga

SEQ ID NO: 127803 - RNA, 1575 nt, Artificial Sequence
  derived and/or modified CDS sequence (opt2) from glycoprotein__RABV__KT336437.1
auggucccccaggcccuccucuuccucccccuccucgucuucccccucugcuucggcaaguuccccaucuacaccauccccgacaagcucggccccuggucccccaucgacauccaccaccucaacugccccaacaaccucgucgucgaggacgagggcugcaccaaccucuccggcuucuccuacauggagcucaaggucggcuacaucuccgccaucaaggucaacggcuucaccugcaccggcgucgucaccgaggccgagaccuacaccaacuucgucggcuacgucaccaccaccuucaagcgcaagcacuuccgccccauccccgacgccugccgcgccgccuacaacuggaagauggccggcgacccccgcuacgaggagucccuccacaaccccuaccccgacuaccacuggcuccgcaccgucaagaccaccaaggagucccucgucaucaucucccccuccgucgccgaccucgaccccuacgacaagucccuccacucccgcgucuuccccuccggcaagugcuccggcaucaccgucuccuccaccuucugcuccaccaaccacgacuacaccaucuggaugcccgagaacccccgccucggcaccuccugcgacaucuucgccaacucccgcggcaagcgcgccuccaagggcggcaagaccugcggcuucgucgacgagcgcggccucuacaagucccucaagggcgccugcaagcucaagcucugcggcguccucggccuccgccucauggacggcaccugggucgccaugcagaccuccgacgagaccaaguggugcccccccgaccagcucgucaacauccacgacuuccgcuccgacgagaucgagcaccucgucgucgaggagcucgucaagaagcgcgaggagugccucgacgcccucgaguccaucaugaccaccaaguccgucuccuuccgccgccucucccaccuccgcaagcucguccccggcuucggcaaggccuacaccaucuucaacaagacccucauggaggccgacgcccacuacaaguccguccgcaccuggaacgagaucauccccuccaagggcugccuccgcgucggcggccgcugccacccccacgucaacggcgucuucuucaacggcaucauccucggccccgacggccacauccucauccccgagaugcaguccucccuccuccagcagcacauggagcuccucgaguccuccgucaucccccucaugcacccccucgccgaccccuccaccgucuucaaggacggcgacgaggccgaggacuucgucgagguccaccuccccgacguccacaagcaggucuccggcgucgaccucggccuccccaacuggggcaaguacguccuccucuccgccggcacccucaucgcccucaugcucaucaucuuccucaugaccugcugccgccgcgucaaccgccccgaguccaccgagcgcucccucggcggcaccggccgcaaggucuccgucaccucccaguccggcaaggucaucuccuccugggaguccuacaaguccggcggcgagacccgccucuga

SEQ ID NO: 127804 - RNA, 1575 nt, Artificial Sequence
  derived and/or modified CDS sequence (opt2) from glycoprotein__RABV__KU198460.1
auggucccccaggcccuccucuucgucccccuccucgccuuccccaugugcuucggcaaguuccccaucuacaccauccccgacaagcucggccccuggucccccaucgacauccaccaccucuccugccccaacaaccucgucgucgaggacgagggcugcaccaaccucuccggcuucuccuacauggagcucaaggucggcuacaucuccgccaucaaggucaacggcuucaccugcaccggcgucgucaccgaggccgagaccuacaccaacuucgucggcuacgucaccaccaccuucaagcgcaagcacuuccgccccacccccgacgccugccgcgccgccuacaacuggaagauggccggcgacccccgcuacgaggagucccuccacaaccccuaccccgacuaccacuggcuccgcaccgucaagaccaccaaggagucccucaucaucaucucccccuccgucgccgaccucgaccccuacgacaagucccuccacucccgcgucuuccccuccggcaagugccucggcaucaccaucuccuccaccuacugcuccaccaaccacgacuacaccaucuggaugcccgagaaccuccgccucggcaccuccugcgacaucuucaccaacucccgcggcaagcgcgccuccaagggcuccaagaccugcggcuucgucgacgagcgcggccucuacaagucccucaagggcgccugcaagcucaagcucugcggcguccucggccuccgccucauggacggcaccugggucgccaugcagaccuccgacgagaccaaguggugcucccccgaccagcucgucaaccuccacgacuuccgcuccgacgagaucgagcaccucgucgucgaggagcucgucaagaagcgcgaggagugccucgacgcccucgaguccaucaugaccaccaaguccgucuccuuccgccgccucucccaccuccgcaagcucguccccggcuucggcaaggccuacaccaucuucaacaagacccucauggaggccgacgcccacuacaaguccguccgcaccugguccgagaucauccccuccaagggcugccuccgcgucggcggccgcugccacccccacgucaacggcgucuucuucaacggcaucauccucggccccgacggccacguccucauccccgagaugcaguccucccuccuccagcagcacauggagcuccucgaguccuccgucaucccccucaugcacccccucgccgaccccuccaccgucuucaaggacggcgacgaggccgaggacuucgucgagguccaccuccccgacguccacaagcagaucuccggcgucgaccucggccuccccaacuggggccgcuacguccucaucaucgccggcguccucaucgccaugauccucaccaucuuccucaugaccugcugcggccgcggcaaccgccccaaguccacccagcacucccucggcggcaucggccgcaaggucuccgccaccucccaguccggcaaggucaucuccuccugggaguccuacaaguccggcggcgagacccgccucuga

SEQ ID NO: 127805 - RNA, 1575 nt, Artificial Sequence
  derived and/or modified CDS sequence (opt2) from glycoprotein__RABV__KU198461.1
auggucccccaggcccuccucuucgucccccuccucgccuuccccaugugcuucggcaaguuccccaucuacaccauccccgacaagcucggccccuggucccccaucgacauccaccaccucuccugccccaacaaccucgucgucgaggacgagggcugcaccaaccucuccggcuucuccuacauggagcucaaggucggcuacaucuccgccaucaaggucaacggcuucaccugcaccggcgucgucaccgaggccgagaccuacaccaacuucgucggcuacgucaccaccaccuucaagcgcaagcacuuccgccccacccccgacgccugccgcgccgccuacaacuggaagauggccggcgacccccgcuacgaggagucccuccacaaccccuaccccgacuaccacuggcuccgcaccgucaagaccaccaaggagucccucaucaucaucucccccuccgucgccgaccucgaccccuacgacaagucccuccacucccgcgucuuccccuccggcaagugccucggcaucaccaucuccuccaccuacugcuccaccaaccacgacuacaccaucuggaugcccgagaaccuccgccucggcaccuccugcgacaucuucaccaacucccgcggcaagcgcgccuccaagggcuccaagaccugcggcuucgucgacgagcgcggccucuacaagucccucaagggcgccugcaagcucaagcucugcggcguccucggccuccgccucauggacggcaccugggucgccaugcagaccuccgacgagaccaaguggugcucccccgaccagcucgucaaccuccacgacuuccgcuccgacgagaucgagcaccucgucgucgaggagcucgucaagaagcgcgaggagugccucgacgcccucgaguccaucaugaccaccaaguccgucuccuuccgccgccucucccaccuccgcaagcucguccccggcuucggcaaggccuacaccaucuucaacaagacccucauggaggccgacgcccacuacaaguccguccgcaccuggaacgagaucauccccuccaagggcugccuccgcgucggcggccgcugccacccccacgucaacggcgucuucuucaacggcaucauccucggccccgacggccacguccucauccccgagaugcaguccucccuccuccagcagcacauggagcuccucgaguccuccgucaucccccucaugcacccccucgccgaccccuccaccgucuucaaggacggcgacgaggccgaggacuucgucgagguccaccuccccgacguccacaagcagaucuccggcgucgaccucggccuccccaacuggggcaaguacguccucaucaucgccggcguccucaucgccaugauccucaccaucuuccucaugaccugcugcggccgcggcaaccgccccaaguccacccagcacucccucggcggcaucggccgcaaggucuccgccaccucccaguccggcaaggucaucuccuccugggaguccuacaaguccggcggcgagacccgccucuga

SEQ ID NO: 127806 - RNA, 1575 nt, Artificial Sequence
  derived and/or modified CDS sequence (opt2) from glycoprotein__RABV__KU198462.1
auggucccccaggcccuccucuucgucccccuccucgccuuccccaugugcuucggcaaguuccccaucuacaccauccccgacaagcucggccccuggucccccaucgacauccaccaccucuccugccccaacaaccucgucgucgaggacgagggcugcaccaaccucuccggcuucuccuacauggagcucaaggucggcuacaucuccgccaucaaggucaacggcuucaccugcaccggcgucgucaccgaggccgagaccuacaccaacuucgucggcuacgucaccaccaccuucaagcgcaagcacuuccgccccacccccgacgccugccgcgccgccuacaacuggaagauggccggcgacccccgcuacgaggagucccuccacaaccccuaccccgacuaccacuggcuccgcaccgucaagaccaccaaggagucccucaucaucaucucccccuccgucgccgaccucgaccccuacgacaagucccuccacucccgcgucuuccccuccggcaagugccucggcaucaccaucuccuccaccuacugcuccaccaaccacgacuacaccaucuggaugcccgagaaccuccgccucggcaccuccugcgacaucuucaccaacucccgcggcaagcgcgccuccaagggcuccaagaccugcggcuucgucgacgagcgcggccucuacaagucccucaagggcgccugcaagcucaagcucugcggcguccucggccuccgccucauggacggcaccugggucgccaugcagaccuccgacgagaccaaguggugcccccccgaccagcucgucaaccuccacgacuuccgcuccgacgagaucgagcaccucgucgucgaggagcucgucaagaagcgcgaggagugccucgacgcccucgaguccaucaugaccaccaaguccgucuccuuccgccgccucucccaccuccgcaagcucguccccggcuucggcaaggccuacaccaucuucaacaagacccucauggaggccgacgcccacuacaaguccguccgcaccuggaacgagaucauccccuccaagggcugccuccgcgucggcggccgcugccacccccacgucaacggcgucuucuucaacggcaucauccucggccccgacggccacguccucauccccgagaugcaguccucccuccuccagcagcacauggagcuccucgaguccuccgucaucccccucaugcacccccucgccgaccccuccaccgucuucaaggacggcgacgaggccgaggacuucgucgagguccaccuccccgacguccacaagcagaucuccggcgucgaccucggccuccccaacuggggcaaguacguccucaucaucgccggcguccucaucgccaugauccucaccaucuuccucaugaccugcugcggccgcggcaaccgccccaaguccacccagcacucccccggcggcaucggccgcaaggucuccgccaccucccaguccggcaaggucaucuccuccugggaguccuacaaguccggcggcgagacccgccucuga

SEQ ID NO: 127807 - RNA, 1575 nt, Artificial Sequence
  derived and/or modified CDS sequence (opt2) from glycoprotein__RABV__KU198463.1
auggucccccaggcccuccucuucgucccccuccucgccuuccccaugugcuucggcaaguuccccaucuacaccauccccgacaagcucggccccuggucccccaucgacauccaccaccucuccugccccaacaaccucgucgucgaggacgagggcugcaccaaccucuccggcuucuccuacauggagcucaaggucggcuacaucuccgccaucaaggucaacggcuucaccugcaccggcgucgucaccgaggccgagaccuacaccaacuucgucggcuacgucaccaccaccuucaagcgcaagcacuuccgccccacccccgacgccugccgcgccgccuacaacuggaagauggccggcgacccccgcuacgaggagucccuccacaaccccuaccccgacuaccacuggcuccgcaccgucaagaccaccaaggagucccucaucaucaucucccccuccgucgccgaccucgaccccuacgacaagucccuccacucccgcgucuuccccuccggcaagugccucggcaucaccaucuccuccaccuacugcuccaccaaccacgacuacaccaucuggaugcccgagaaccuccgccucggcaccuccugcgacaucuucaccaacucccgcggcaagcgcgccuccaagggcuccaagaccugcggcuucgucgacgagcgcggccucuacaagucccucaagggcgccugcaagcucaagcucugcggcguccucggccuccgccucaucgacggcaccugggucgccaugcagaccuccgacgagaccaaguggugcccccccgaccagcucgucaaccuccacgacuuccgcuccgacgagaucgagcaccucgucgucgaggagcucgucaagaagcgcgaggagugccucgacgcccucgaguccaucaugaccaccaaguccgucuccuuccgccgccucucccaccuccgcaagcucguccccggcuucggcaaggccuacaccaucuucaacaagacccucauggaggccgacgcccacuacaaguccguccgcaccuggaacgagaucauccccuccaagggcugccuccgcgucggcggccgcugccacccccacgucaacggcgucuucuucaacggcaucauccucggccccgacggccacguccucauccccgagaugcaguccucccuccuccagcagcacauggagcuccucgaguccuccgucaucccccucaugcacccccucgccgaccccuccaccgucuucaaggacggcgacgaggccgaggacuucgucgagguccaccuccccgacguccacaagcagaucuccggcgucgaccucggccuccccaacuggggcaaguacguccucaucaucgccggcguccucaucgccaugauccucaccaucuuccucaugaccugcugcggccgcggcaaccgccccaaguccacccagcacucccucggcggcaucggccgcaaggucuccgccaccucccaguccggcaaggucaucuccuccugggaguccuacaaguccggcggcgagacccgccucuga

SEQ ID NO: 127808 - RNA, 1575 nt, Artificial Sequence
  derived and/or modified CDS sequence (opt2) from glycoprotein__RABV__KU198464.1
auggucccccaggcccuccucuucgucccccuccucgccuuccccaugugcuucggcaaguuccccaucuacaccauccccgacaagcucggccccuggucccccaucgacauccaccaccucuccugccccaacaaccucgucgucgaggacgagggcugcaccaaccucuccggcuucuccuacauggagcucaaggucggcuacaucuccgccaucaaggucaacggcuucaccugcaccggcgucgucaccgaggccgagaccuacaccaacuucgucggcuacgucaccaccaccuucaagcgcaagcacuuccgccccacccccgacgccugccgcgccgccuacaacuggaagauggccggcgacccccgcuacgaggagucccuccacaaccccuaccccgacuaccacuggcuccgcaccgucaagaccaccaaggagucccucaucaucaucucccccuccgucgccgaccucgaccccuacgacaagucccuccacucccgcgucuuccccuccggcaagugccucggcaucaccaucuccuccaccuacugcuccaccaaccacgacuacaccaucuggaugcccgagaaccuccgccucggcaccuccugcgacaucuucaccaacucccgcggcaagcgcgccuccaagggcuccaagaccugcggcuucgucgacgagcgcggccucuacaagucccucaagggcgccugcaagcucaagcucugcggcguccucggccuccgccucauggacggcaccugggucgccaugcagaccuccgacgagaccaaguggugcccccccgaccagcucgucaaccuccacgacuuccgcuccgacgagaucgagcaccucgucgucgaggagcucgucaagaagcgcgaggagugccucgacgcccucgaguccaucaugaccaccaaguccgucuccuuccgccgccucucccaccuccgcaagcucguccccggcuucggcaaggccuacaccaucuucaacaagacccucauggaggccgacgcccacuacaaguccguccgcaccugguccgagaucauccccuccaagggcugccuccgcgucggcggccgcugccacccccacgucaacggcgucuucuucaacggcaucauccucggccccgacggccacguccucauccccgagaugcaguccucccuccuccagcagcacauggagcuccucgaguccuccgucaucccccucaugcacccccucgccgaccccuccaccgucuucaaggacggcgacgaggccgaggacuucgucgagguccaccuccccgacguccacaagcagaucuccggcgucgaccucggccuccccaacuggggcaaguacguccucaucaucgccggcguccucaucgccaugauccucaccaucuuccucaugaccugcugcggccgcugcaaccgccccaaguccacccagcacucccucggcggcaucggccgcaaggucuccgccaccucccaguccggcaaggucaucuccuccugggaguccuacaaguccggcggcgagacccgccucuga

SEQ ID NO: 127809 - RNA, 1575 nt, Artificial Sequence
  derived and/or modified CDS sequence (opt2) from glycoprotein__RABV__KU198465.1
auggucccccaggcccuccuccucgucccccuccucgccuuccccaugugcuucggcaaguuccccaucuacaccauccccgacaagcucggccccuggucccccaucgacauccaccaccucuccugccccaacaaccucgucgucgaggacgagggcugcaccaaccucuccggcuucuccuacauggagcucaaggucggcuacaucuccgccaucaaggucaacggcuucaccugcaccggcgucgucaccgaggccgagaccuacaccaacuucgucggcuacgucaccaccaccuucaagcgcaagcacuuccgccccacccccgacgccugccgcgccgccuacaacuggaagauggccggcgacccccgcuacgaggagucccuccacaaccccuaccccgacuaccacuggcuccgcaccgucaagaccaccaaggagucccucaucaucaucucccccuccgucgccgaccucgaccccuacgacaagucccuccacucccgcgucuuccccuccggcaagugccucggcaucaccaucuccuccaccuacugcuccaccaaccacgacuacaccaucuggaugcccgagaaccuccgccucggcaccuccugcgacaucuucaccaacucccgcggcaagcgcgccuccaagggcuccaagaccugcggcuucgucgacgagcgcggccucuacaagucccucaagggcgccugcaagcucaagcucugcggcguccucggccuccgccucauggacggcaccugggucgccaugcagaccuccgacgagaccaaguggugcccccccgaccagcucgucaaccuccacgacuuccgcuccgacgagaucgagcaccucgucgucgaggagcucgucaagaagcgcgaggagugccucgacgcccucgaguccaucaugaccaccaaguccgucuccuuccgccgccucucccaccuccgcaagcucguccccggcuucggcaaggccuacaccaucuucaacaagacccucauggaggccgacgcccacuacaaguccguccgcaccugguccgagaucauccccuccaagggcugccuccgcgucggcggccgcugccacccccacgucaacggcgucuucuucaacggcaucauccucggccccgacggccacguccucauccccgagaugcaguccucccuccuccagcagcacauggagcuccucgaguccuccgucaucccccucaugcacccccucgccgaccccuccaccgucuucaaggacggcgacgaggccgaggacuucgucgagguccaccuccccgacguccacaagcagaucuccggcgucgaccucggccuccccaacuggggcaaguacguccucaucaucgccggcguccucaucgccaugauccucaccaucuuccucaugaccugcugcggccgcggcaaccgccccaaguccacccagcacucccucggcggcaucggccgcaaggucuccgccaccucccaguccggcaaggucaucuccuccugggaguccuacaaguccggcuccgagacccgccucuga

SEQ ID NO: 127810 - RNA, 1575 nt, Artificial Sequence; identical to SEQ ID NO: 127520
  derived and/or modified CDS sequence (opt2) from glycoprotein__RABV__KU198466.1

SEQ ID NO: 127811 - RNA, 1575 nt, Artificial Sequence; identical to SEQ ID NO: 127520
  derived and/or modified CDS sequence (opt2) from glycoprotein__RABV__KU198467.1

SEQ ID NO: 127812 - RNA, 1575 nt, Artificial Sequence
  derived and/or modified CDS sequence (opt2) from glycoprotein__RABV__KU198468.1
auggucccccaggcccuccucuucgucccccuccucgccuuccccaugugcuucggcaaguuccccaucuacaccauccccgacaagcucggccccuggucccccaucgacauccaccaccucuccugccccaacaaccucaucgucgaggacgagggcugcaccaaccucuccggcuucuccuacauggagcucaaggucggcuacaucuccgccaucaaggucaacggcuucaccugcaccggcgucgucaccgaggccgagaccuacaccaacuucgucggcuacgucaccaccaccuucaagcgcaagcacuuccgccccacccccgacgccugccgcgccgccuacaacuggaagauggccggcgacccccgcuacgaggagucccuccacaaccccuaccccgacuaccacuggcuccgcaccgucaagaccaccaaggagucccucaucaucaucucccccuccgucgccgaccucgaccccuacgacaagucccuccacucccgcgucuuccccuccggcaagugccucggcaucaccaucuccuccaccuacugcuccaccaaccacgacuacaccaucuggaugcccgagaaccuccgccucggcaccuccugcgacaucuucaccaacucccgcggcaagcgcgccuccaagggcuccaagaccugcggcuucgucgacgagcgcggccucuacaagucccucaagggcgccugcaagcucaagcucugcggcguccucggccuccgccucauggacggcaccugggucgccaugcagaccuccgacgagaccaaguggugcccccccaaccagcucgucaaccuccacgacuuccgcuccgacgagaucgagcaccucgucgucgaggagcucgucaagaagcgcgaggagugccucgacgcccucgaguccaucaugaccaccaaguccgucuccuuccgccgccucucccaccuccgcaagcucguccccggcuucggcaaggccuacaccaucuucaacaagacccucauggaggccgacgcccacuacaaguccguccgcaccuggaacgagaucauccccuccaagggcugccuccgcgucggcggccgcugccacccccacgucaacggcgucuucuucaacggcaucauccucggccccgacggccacguccucauccccgagaugcaguccucccuccuccagcagcacauggagcuccucgaguccuccgucaucccccucaugcacccccucgccgaccccuccaccgucuucaaggacggcgacgaggccgaggacuucgucgagguccaccuccccgacguccacaagcagaucuccggcgucgaccucggccuccccaacuggggcaaguacguccucaucaucgccggcguccucaucgccaugauccucaccaucuuccucaugaccugcugcggccgcggcaaccgccccaaguccacccagcacucccucggcggcaucggccgcaaggucuccgccaccucccaguccggcaaggucaucuccuccugggaguccuacaaguccggcggcgagacccgccucuga

SEQ ID NO: 127813 - RNA, 1575 nt, Artificial Sequence
  derived and/or modified CDS sequence (opt2) from glycoprotein__RABV__KU198469.1
auggucccccaggcccuccucuucgucccccuccucgccuuccccaugugcuucggcaaguuccccaucuacaccauccccgacaagcucggccccuggucccccaucgacauccaccaccucuccugccccaacaaccucgucgucgaggacgagggcugcaccaaccucuccggcuucuccuacauggagcucaaggucggcuacaucuccgccaucaaggucaacggcuucaccugcaccggcgucgucaccgaggccgagaccuacaccaacuucgucggcuacgucaccaccaccuucaagcgcaagcacuuccgccccacccccgacgccugccgcgccgccuacaacuggaagauggccggcgacccccgcuacgaggagucccuccacaaccccuaccccgacuaccacuggcuccgcaccgucaagaccaccaaggagucccucaucaucaucucccccuccgucgccgaccucgaccccuacgacaagucccuccacucccgcgucuuccccuccggcaagugccucggcaucaccaucuccuccaccuacugcuccaccaaccacgacuacaccaucuggaugcccgagaaccuccgccucggcaccuccugcgacaucuucaccaacucccgcggcaagcgcgccuccaagggcuccaagaccugcggcuucgucgacgagcgcggccucuacaagucccucaagggcgccugcaagcucaagcucugcggcguccucggccuccgccucauggacggcaccugggucgccaugcagaccuccgacgagaccaaguggugcccccccgaccagcucgucaaccuccacgacuuccgcuccgacgagaucgagcaccucgucgucgaggagcucgucaagaagcgcgaggagugccucgacgcccucgaguccaucaugaccaccaaguccgucuccuuccgccgccucucccaccuccgcaagcucguccccggcuucggcaaggccuacaccaucuucaacaagacccucauggaggccgacgcccacuacaaguccguccgcaccuggaacgagaucauccccuccaagggcugccuccgcgucggcggccgcugccacccccacgucaacggcgucuucuucaacggcaucauccucggccccgacggccacguccucauccccgagaugcaguccucccuccuccagcagcacauggagcuccucgaguccuccgucaucccccucaugcacccccucgccgaccccuccaccgucuucaaggacggcgacgaggccgaggacuucgucgagguccaccuccccgacguccacaagcagaucuccggcgucgaccucggccuccccaacuggggcaaguacguccucaucaucgccggcguccucaucgccaugauccucaccaccuuccucaugaccugcugcggccgcggcaaccgccccaaguccacccagcacucccucggcggcaucggccgcaaggucuccgccaccucccaguccggcaaggucaucuccuccugggaguccuacaaguccggcggcgagacccgccucuga

SEQ ID NO: 127814 - RNA, 1575 nt, Artificial Sequence; identical to SEQ ID NO: 127510
  derived and/or modified CDS sequence (opt2) from glycoprotein__RABV__KU198470.1

SEQ ID NO: 127815 - RNA, 1575 nt, Artificial Sequence; identical to SEQ ID NO: 127511
  derived and/or modified CDS sequence (opt2) from glycoprotein__RABV__KU198471.1

SEQ ID NO: 127816 - RNA, 1575 nt, Artificial Sequence
  derived and/or modified CDS sequence (opt2) from glycoprotein__RABV__KU198472.1
auggucccccaggcccuccucuucgucccccuccucgccuuccccaugugcuucggcaaguuccccaucuacaccauccccgacaagcucggccccuggucccccaucgacauccaccaccucuccugccccaacaaccucgucgucgaggacgagggcugcaccaaccucuccggcuucuccuacauggagcucaaggucggcuacaucuccgccaucaaggucaacggcuucaccugcaccggcgucgucaccgaggccgagaccuacaccaacuucgucggcuacgucaccaccaccuucaagcgcaagcacuuccgccccacccccgacgccugccgcgccgccuacaacuggaagauggccggcgacccccgcuacgaggagucccuccacaaccccuaccccgacuaccacuggcuccgcaccgucaagaccaccaaggagucccucaucaucaucucccccuccgucuccgaccucgaccccuacgacaagucccuccacucccgcgucuuccccuccggcaagugccucggcaucaccaucuccuccaccuacugcuccaccaaccacgacuacaccaucuggaugcccgagaacguccgccucggcaccuccugcgacaucuucaccaacucccgcggcaagcgcgccuccaagggcuccaagaccugcggcuucgucgacgagcgcggccucuacaagucccucaagggcgccugcaagcucaagcucugcggcguccucggccuccgccucauggacggcaccugggucuccaugcccaccuccgacgagaccaaguggugcccccccgaccagcucgucaaccuccacgacuuccgcuccgacgagaucgagcaccucgucgucgaggagcucguccgcaagcgcgaggagugccucgacgcccucgaguccaucaugaccaccaaguccgucuccuuccgccgccucucccaccuccgcaagcucguccccggcuucggcaaggccuacaccaucuucaacaagacccucauggaggccgacgcccacuacaaguccguccgcaccugguccgagaucauccccuccaagggcugccuccgcgucggcggccgcugccacccccacgucaacggcgucuucuucaacggcaucauccucggccccgacggccacguccucauccccgagaugcaguccucccuccuccagcagcacauggagcuccucgaguccuccgucaucccccucaugcacccccucgccgaccccuccaccgucuucaaggacggcgacgaggccgaggacuucgucgagguccaccuccccgacguccacaagcagaucuccggcgucgaccucggccuccccaacuggggcaaguacguccucaucaucgccggcguccucaucgccaugauccucaccauccuccucaugaccugcugcggccgcggcaaccgccccaaguccacccagcacucccucggcggcaucggccgcaaggucuccuccaccucccaguccggcaaggucaucuccuccugggaguccuacaaguccggcggcgagacccgccucuga

SEQ ID NO: 127817 - RNA, 1575 nt, Artificial Sequence
  derived and/or modified CDS sequence (opt2) from glycoprotein__RABV__KU198473.1
auggucccccaggcccuccucuucgucccccuccucgccuuccccaugugcuucggcaaguuccccaucuacaccauccccgacaagcucggccccuggucccccaucgacauccaccaccucuccugccccaacaaccucgucgucgaggacgagggcugcaccaaccucuccggcuucuccuacauggagcucaaggucggcuacaucuccgccaucaaggucaacggcuucaccugcaccggcgucgucaccgaggccgagaccuacaccaacuucgucggcuacgucaccaccaccuucaagcgcaagcacuuccgccccacccccgacgccugccgcgccgccuacaacuggaagauggccggcgacccccgcuacgaggagucccuccacaaccccuaccccgacuaccacuggcuccgcaccgucaagaccaccaaggagucccucaucaucaucucccccuccgucgccgaccucgaccccuacgacaagucccuccacucccgcgucuuccccuccggcaagugccucggcaucaccaucuccuccaccuacugcuccaccaaccacgacuacaccaucuggaugcccgagaacguccgccucggcaccuccugcgacaucuucaccaacucccgcggcaagcgcgccuccaagggcuccaagaccugcggcuucgucgacgagcgcggccucuacaagucccucaagggcgccugcaagcucaagcucugcggcguccucggccuccgccucauggacggcaccugggucuccaugcccaccuccgacgagaccaaguggugcccccccgaccagcucgucaaccuccacgacuuccgcuccgacgagaucgagcaccucgucgucgaggagcucguccgcaagcgcgaggagugccucgacgcccucgaguccaucaugaccaccaaguccgucuccuuccgccgccucucccaccuccgcaagcucguccccggcuucggcaaggccuacaccaucuucaacaagacccucauggaggccgacgcccacuacaaguccguccgcaccuggaacgagaucauccccuccaagggcugccuccgcgucggcggccgcugccacccccacgucaacggcgucuucuucaacggcaucauccucggccccgacggccacguccucauccccgagaugcaguccucccuccuccagcagcacauggagcuccucgaguccuccgucaucccccucaugcacccccucgccgaccccuccaccgucuucaaggacggcgacgaggccgaggacuucgucgagguccaccuccccgacguccacaagcagaucuccggcgucgaccucggccuccccaacuggggcaaguacguccucaucaucgccggcguccucaucgccaugauccucaccaucuuccucaugaccugcugcggccgcggcaaccgccccaaguccacccagcacucccucggcggcaucggccgcaaggucuccuccaccucccaguccggcaaggucaucuccuccugggaguccuacaaguccggcggcgagacccgccucuga

SEQ ID NO: 127818 - RNA, 1575 nt, Artificial Sequence; identical to SEQ ID NO: 127817
  derived and/or modified CDS sequence (opt2) from glycoprotein__RABV__KU198474.1

SEQ ID NO: 127819 - RNA, 1575 nt, Artificial Sequence
  derived and/or modified CDS sequence (opt2) from glycoprotein__RABV__KU198475.1
auggucccccaggcccuccucuucgucccccuccucgccuuccccaugugcuucggcaaguuccccaucuacaccauccccgacaagcucggccccuggucccccaucgacauccaccaccucuccugccccaacaaccucgucgucgaggacgagggcugcaccaaccucuccggcuucuccuacauggagcucaaggucggcuacaucuccgccaucaaggucaacggcuucaccugcaccggcgucgucaccgaggccgagaccuacaccaacuucgucggcuacgucaccaccaccuucaagcgcaagcacuuccgccccacccccgacgccugccgcgccgccuacaacuggaagauggccggcgacccccgcuacgaggagucccuccacaaccccuaccccgacuaccacuggcuccgcaccgucaagaccaccaaggagucccucaucaucaucucccccuccgucuccgaccucgaccccuacgacaagucccuccacucccgcgucuuccccuccggcaagugccucggcaucaccaucuccuccaccuacugcuccaccaaccacgacuacaccaucuggaugcccgagaacguccgccucggcaccuccugcgacaucuucaccaacucccgcggcaagcgcgccuccaagggcuccaagaccugcggcuucgucgacgagcgcggccucuacaagucccucaagggcgccugcaagcucaagcucugcggcguccucggccuccgccucauggacggcaccugggucuccaugcccaccuccgacgagaccaaguggugcccccccgaccagcucgucaaccuccacgacuuccgcuccgacgagaucgagcaccucgucgucgaggagcucguccgcaagcgcgaggagugccucgacgcccucgaguccaucaugaccaccaaguccgucuccuuccgccgccucucccaccuccgcaagcucguccccggcuucggcaaggccuacaccaucuucaacaagacccucauggaggccgacgcccacuacaaguccguccgcaccuggaacgagaucauccccuccaagggcugccuccgcgucggcggccgcugccacccccacgucaacggcgucuucuucaacggcaucauccucggccccgacggccacguccucauccccgagaugcaguccucccuccuccagcagcacauggagcuccucgaguccuccgucaucccccucaugcacccccucgccgaccccuccaccgucuucaaggacggcgacgaggccgaggacuucgucgagguccaccuccccgacguccacaagcagaucuccggcgucgaccucggccuccccaacuggggcaaguacguccucaucaucgccggcguccucaucgccaugauccucaccauccuccucaugaccugcugcggccgcggcaaccgccccaaguccacccagcacucccucggcggcaucggccgcaaggucuccuccaccucccaguccggcaaggucaucuccuccugggaguccuacaaguccggcggcgagacccgccucuga

SEQ ID NO: 127820 - RNA, 1575 nt, Artificial Sequence
  derived and/or modified CDS sequence (opt2) from glycoprotein__RABV__KU198476.1
auggucccccaggcccuccucuucgucccccuccucgccuuccccaugugcuucggcaaguuccccaucuacaccauccccgacaagcucggccccuggucccccaucgacauccaccaccucuccugccccaacaaccucgucgucgaggacgagggcugcaccaaccucuccggcuucuccuacauggagcucaaggucggcuacaucuccgccaucaaggucaacggcuucaccugcaccggcgucgucaccgaggccgagaccuacaccaacuucgucggcuacgucaccaccaccuucaagcgcaagcacuuccgccccacccccgacgccugccgcgccgccuacaacuggaagauggccggcgacccccgcuacgaggagucccuccacaaccccuaccccgacuaccacuggcuccgcaccgucaagaccaccaaggagucccucaucaucaucucccccuccgucgccgaccucgaccccuacgacaagucccuccacucccgcgucuuccccuccggcaagugccucggcaucaccaucuccuccaccuacugcuccaccaaccacgacuacaccaucuggaugcccgagaacguccgccucggcaccuccugcgacaucuucaccaacucccgcggcaagcgcgccuccaagggcuccaagaccugcggcuucgucgacgagcgcggccucuacaagucccucaagggcgccugcaagcucaagcucugcggcguccucggccuccgccucauggacggcaccugggucgccaugcccaccuccgacgagaccaaguggugcccccccgaccagcucgucaaccuccacgacuuccgcuccgacgagaucgagcaccucgucgucgaggagcucguccgcaagcgcgaggagugccucgacgcccucgaguccaucaugaccaccaaguccgucuccuuccgccgccucucccaccuccgcaagcucguccccggcuucggcaaggccuacaccaucuucaacaagacccucauggaggccgacgcccacuacaaguccguccgcaccuggaacgagaucauccccuccaagggcugccuccgcgucggcggccgcugccacccccacgucaacggcgucuucuucaacggcaucauccucggccccgacggccacguccucauccccgagaugcaguccucccuccuccagcagcacauggagcuccucgaguccuccgucaucccccucaugcacccccucgccgaccccuccaccgucuucaaggacggcgacgaggccgaggacuucgucgagguccaccuccccgacguccacaagcagaucuccggcgucgaccucggccuccccaacuggggcaaguacguccucaucaucgccggcguccucaucgccaugauccucaccaucuuccucaugaccugcugcggccgcggcaaccgccucaaguccacccagcacucccucggcggcaucggccgcaaggucuccuccaccucccaguccggcaaggucaucuccuccugggaguccuacaaguccggcggcgagacccgccucuga

SEQ ID NO: 127821 - RNA, 1575 nt, Artificial Sequence; identical to SEQ ID NO: 127510
  derived and/or modified CDS sequence (opt2) from glycoprotein__RABV__KU198478.1

SEQ ID NO: 127822 - RNA, 1575 nt, Artificial Sequence
  derived and/or modified CDS sequence (opt2) from glycoprotein__RABV__KU198479.1
auggucccccaggcccuccucuucgucccccuccucgccuuccccaugugcuucggcaaguuccccaucuacaccauccccgacaagcucggccccuggucccccaucgacauccaccaccucuccugccccaacaaccucgucgucgaggacgagggcugcaccaaccucuccggcuucuccuacauggagcucaaggucggcuacaucuccgccaucaaggucaacggcuucaccugcaccggcgucgucaccgaggccgagaccuacaccaacuucgucggcuacgucaccaccaccuucaagcgcaagcacuuccgccccacccccgacgccugccgcgccgccuacaacuggaagauggccggcgacccccgcuacgaggagucccuccacaaccccuaccccgacuaccacuggcuccgcaccgucaagaccgccaaggagucccucaucaucaucucccccuccgucgccgaccucgaccccuacgacaagucccuccacucccgcgucuuccccuccggcaagugccucggcaucaccaucuccuccaccuacugcuccaccaaccacgacuacaccaucuggaugcccgagaacguccgccucggcaccuccugcgacaucuucaccaacucccgcggcaagcgcgccuccaagggcuccaagaccugcggcuucgucgacgagcgcggccucuacaagucccucaagggcgccugcaagcucaagcucugcggcguccucggccuccgccucauggacggcaccugggucuccaugcccaccuccgacgagaccaaguggugcccccccgaccagcucgucaaccuccacgacuuccgcuccgacgagaucgagcaccucgucgucgaggagcucguccgcaagcgcgaggagugccucgacgcccucgaguccaucaugaccaccaaguccgucuccuuccgccgccucucccaccuccgcaagcucguccccggcuucggcaaggccuacaccaucuucaacaagacccucauggaggccgacgcccacuacaaguccguccgcaccuggaacgagaucauccccuccaagggcugccuccgcgucggcggccgcugccacccccacaucaacggcgucuucuucaacggcaucauccucggccccgacggccacguccucauccccgagaugcaguccucccuccuccagcagcacauggagcuccucgaguccuccgucaucccccucaugcacccccucgccgaccccuccaccgucuucaaggacggcgacgaggccgaggacuucgucgagguccaccuccccgacguccacaagcagaucuccggcgucgaccucggccuccccaacuggggcaaguacguccucaucaucgccggcguccucaucgccaugauccucaccaucuuccucaugaccugcugcggccgcggcaaccgccccaaguccacccagcacucccucggcggcaucggccgcaaggucuccuccaccucccaguccggcaaggucaucuccuccugggaguccuacaaguccggcggcgagacccgccucuga

SEQ ID NO: 127823 - RNA, 1575 nt, Artificial Sequence; identical to SEQ ID NO: 127373
  derived and/or modified CDS sequence (opt2) from glycoprotein__RABV__KU534939.1

SEQ ID NO: 127824 - RNA, 1575 nt, Artificial Sequence
  derived and/or modified CDS sequence (opt2) from glycoprotein__RABV__KU534940.1
auggucccccagguccuccucuucgucccccuccucgucuucuccaugugcuucggcaaguuccccaucuacaccauccccgacaagcucggccccuggucccccaucgacauccaccaccucuccugccccaacaaccucgucgucgaggacgagggcugcaccaaccucuccggcuucuccuacauggagcucaaggucggcuacaucuccgccaucaaggucaacggcuucaccugcaccggcgucgucaccgaggccgagaccuacaccaacuucgucggcuacgucaccaccaccuucaagcgcaagcacuuccgccccacccccgacgccugccgcgccgccuacaacuggaagauggccggcgacccccgcuacgaggagucccuccacaaccccuaccccgacuaccacuggcuccgcaccgucaagaccaccaaggagucccucgucaucaucucccccuccgucgccgaccucgaccccuacgacaagucccuccacucccgcgucuuccccuccggcaagugcuccggcaucaccaucuccuccaccuacugcuccaccaaccacgacuacaccaucuggaugcccgagaacccccgccucggcaccuccugcgacaucuucaccaacucccgcggcaagcgcgccuccaagggcggcaagaccugcggcuucgucgacgagcgcggccucuacaagucccucaagggcgccugcaagcucaagcucugcggcguccucggccuccgccucauggacggcaccugggucgccaugcagaccuccgacgagaccaaguggugcccccccgaccagcucgucaaccuccacgacuuccgcuccgacgagaucgagcaccucgucgucgaggagcucgucaagaagcgcgaggagugccucgacgcccucgaguccaucaugaccaccaaguccgucuccuuccgccgccucucccaccuccgcaagcucguccccggcuucggcaaggccuacaccaucuucaacaagacccucauggaggccgacgcccacuacaaguccguccgcaccuggaacgagaucauccccuccaagggcugccuccgcgucggcggccgcugccacccccacgucaagggcgucuucuucaacggcaucauccucggccccgacggccacguccucauccccgagaugcaguccucccuccuccagcagcacauggagcuccucgaguccuccgucaucccccucaugcacccccucgccgaccccuccaccgucuucaaggacggcgacgaggccgaggacuucgucgagguccaccuccccgacguccacaagcagaucuccggcgucgaccucggccuccccuccuggggcaaguacguccucgccuccgccggcguccucgucguccucaugcucaccaucuucaucaucaccugcugcggccgcguccaccgccccaaguccacccagcacggccucggcggcaccggccgcaaggucuccgucaccucccaguccggcaaggucaucuccuccugggaguccuacaaguccggcggcgagacccgccucuga

SEQ ID NO: 127825 - RNA, 1575 nt, Artificial Sequence; identical to SEQ ID NO: 127374
  derived and/or modified CDS sequence (opt2) from glycoprotein__RABV__KU534941.1

SEQ ID NO: 127826 - RNA, 1575 nt, Artificial Sequence; identical to SEQ ID NO: 127160
  derived and/or modified CDS sequence (opt2) from glycoprotein__RABV__KU534942.1

SEQ ID NO: 127827 - RNA, 1575 nt, Artificial Sequence
  derived and/or modified CDS sequence (opt2) from glycoprotein__RABV__KU739036.1
auggucccccagguccucugguucgucccccuccucgucuucuccaugugcuucggcaaguuccccaucuacaccauccccgacaagcucggccccuggucccccaucgacauccaccaccucuccugccccaacaaccucgucgucgaggacgagggcugcaccaaccucuccggcuucuccuacauggagcucaaggucggcuacaucuccgccaucaaggucaacggcuucaccugcaccggcgucgucaccgaggccgagaccuacaccaacuucgucggcuacgucaccaccaccuucaagcgcaagcacuuccgccccacccccgacgccugccgcgccgccuacaacuggaagauggccggcgacccccgcuacgaggagucccuccacaaccccuaccccgacuaccacuggcuccgcaccgucaagaccaccaaggagucccucgucaucaucucccccuccgucgccgaccucgaccccuacgacaagucccuccacucccgcgucuuccccuccggcaagugcuccggcaucaccaucuccuccaccuacugcuccaccaaccacgacuacaccaucuggaugcccgagaacccccgccucggcaccuccugcgacaucuucgccaacucccgcggcaagcgcgccuccaagggcuccaagaccugcggcuucgucgacgagcgcggccucuacaagucccucaagggcgccugcaagcucaagcucugcggcguccucggccuccgccucauggacggcaccugggucgccaugcagaccuccgacgagaccaaguggugcccccccgaccagcucgucaaccuccacgacuuccgcuccgacgagaucgagcaccucgucgucgaggagcucgucaagaagcgcgaggagugccucgacgcccucgaguccaucaugaccaccaaguccgucuccuuccgccgccucucccaccuccgcaagcucguccccggcuucggcaaggccuacaccaucuucaacaagacccucauggaggccgacgcccacuacaaguccguccgcaccuggaacgagaucauccccuccaagggcugccuccgcgucggcggccgcugccacccccacgucaacggcgucuucuucaacggcaucauccucggccccgacggccacguccucauccccgagaugcaguccucccuccuccagcagcacauggagcuccucgaguccuccgucaucccccucaugcacccccucgccgaccccuccaccgucuucaaggacggcgacgaggccgaggacuucgucgagguccaccuccccgacguccacaagcagaucuccggcgucgaccucggccuccccaacuggggcaaguacguccucgucuccgccggcguccucgucguccucaugcucgccaucuucaucaugaccugcugcggccgcgucaaccgccccaaguccacccagcacucccucgagggcaccggccgcaaggucuccgucaccucccaguccggcaaggucaucuccuccugggaguccuacaaguccggcggcgagacccgccucuga

SEQ ID NO: 127828 - RNA, 1575 nt, Artificial Sequence
  derived and/or modified CDS sequence (opt2) from glycoprotein__RABV__KU739037.1
auggucccccaggcccuccucuucgucccccuccucgucuucccccucugcuucggcaaguuccccaucuacaccauccccgacaagcucggccccuggucccccaucgacauccaccaccucuccugccccaacaaccucgucgucgaggacgagggcugcaccaaccucuccggcuucuccuacauggagcucaaggucggcuacaucuccgccaucaaggucaacggcuucaccugcaccggcgucgucaccgaggccgagaccuacaccaacuucgucggcuacgucaccaccaccuuccgccgcaagcacuuccgccccacccccgacgccugccgcgccgccuacaacuggaagauggccggcgacccccgcuacgaggagucccuccacaaccccuaccccgacuaccacuggcuccgcaccgucaagaccaccaaggagucccucgucaucaucucccccuccgucgccgaccucgaccccuacgacaagucccuccacucccgcgucuuccccggcggcaagugcuccggcaucaccgucuccuccaccuacugcuccaccaaccacgacuacaccaucuggcuccccgagaacccccgccucggcaccuccugcgacaucuucaccaacucccgcggcaagcgcgccuccaagggcuccaagaccugcggcuucgucgacgagcgcggccucuacaagucccucaagggcgccugcaagcucaagcucugcggcguccucggccuccgccucauggacggcaccugggucgccaugcagaccuccgacgagaccaaguggugcccccccgaccagcucgucaaccuccacgacuuccgcuccgacgagaucgagcaccucgucgucgaggagcucgucaagaagcgcgaggagugccucgacgcccucgaguccaucaugaccaccaaguccgucuccuuccgccgccucucccaccuccgcaagcucguccccggcuucggcaaggccuacaccaucuucaacaagacccucauggaggccgacgcccacuacaaguccguccgcaccuggaacgagaucauccccuccaagggcugccuccgcgucggcggccgcugccaccaccacgucaacggcgucuucuucaacggcaucauccucggccccgacggccacguccucauccccgagaugcaguccucccuccuccagcagcacauggagcuccucgaguccuccgucaucccccucaugcacccccucgccgaccccuccaccgucuucaaggacggcgacgaggccgaggacuucgucgagguccaccuccccgacguccacaagcaggucuccggcgucgaccucggccuccccaacuggggcaaguacguccuccucuccgccggcgcccucaucgcccucaugcucaucaucuuccucaugaccugcugccgccgcgucaaccgccccgaguccacccagcgcuccuucggcggcaccgagcgcgaggucuccaucaccccccaguccggcaaggucaucuccuccugggaguccuacaaguccggcggcgagacccgccucuga

SEQ ID NO: 127829 - RNA, 1575 nt, Artificial Sequence
  derived and/or modified CDS sequence (opt2) from glycoprotein__RABV__KU739038.1
auggucccccucgcccuccucgucgucccccuccucguccucucccucugcuccggcaaguuccccaucuacaccauccccgacaagcucggccccuggucccccaucgacauccaccaccucuccugccccaacaaccucgucgucgaggacgagggcugcaccaaccucuccggcuucuccuacauggagcucaaggucggcuacaucuccgccaucaaggucaacggcuucaccugcaccggcgucgucaccgaggccgagaccuacaccaacuucgucggcuacgucaccaccaccuuccgccgcaagcacuuccgccccacccccgacgccugccgcgccgccuacaacuggaagauggccggcgacccccgcuacgaggagucccuccacaaccccuaccccgacuaccacuggcuccgcaccgucaagaccaccaaggagucccucgucaucaucucccccuccgucgccgaccucgaccccuacgaccgcucccuccacucccgcgucuuccccaacggcaagugcuccggcaucaccgucuccuccaccuacugccccaccaaccacgacuacaccaucuggaugcccgagaacccccgccucggcaccuccugcgacaucuucgucaacucccgcggcaagcgcgccuccaagggcuccaagaccugcggcuucgucgacgagcgcggccucuacaagucccucaagggcgccugcaagcucaagcucugcggcguccucggccuccgccucauggacggcaccugggucgccaugcgcaccuccgacgagaccaaguggugcccccccgaccagcucgucaacauccacgacuuccgcuccgacgagaucgagcaccucgucgucgaggagcucgucaagaagcgcgaggagugccucgacgcccucgaguccaucaugaccaccaaguccgucuccuuccgccgccucucccaccuccgcaagcucguccccggcuucggcaaggccuacaccaucuucaacaagacccucauggaggccgacgcccacuacaaguccguccgcaccugggacgagaucauccccuccaagggcugccuccgcgucggcggccgcugccacccccacguccacggcgucuucuucaacggcaucauccucggccccgacggccacguccucauccccgagaugcaguccucccuccuccagcagcacauggagcuccucgaguccuccgucaucccccucaugcacccccucgccgaccccuccaccgucuucaaggacggcgacgaggccgaggacuucgucgagguccaccuccccgacguccacaagcagaucuccggcgucgaccucggccuccccaacuggggcaaguacguccucauguccgccggcgcccucaucgcccucaugcucaucaucuuccucaugaccugcugccgcaagaucaagcagcccgaguccacccagcacucccuccgcggcaccggccgcaaggucuccgucaccucccagaacggcaaggucaucuccuccugggaguccuacaaguccggcggcgagacccgccucuga

SEQ ID NO: 127830 - RNA, 1575 nt, Artificial Sequence
  derived and/or modified CDS sequence (opt2) from glycoprotein__RABV__KU739043.1
auggucccccucacccuccucgucgucccccuccucguccucucccucugcuccggcaaguuccccaucuacaccauccccgacaagcucggccccuggucccccaucgacauccaccaccucuccugccccaacaaccucgucgucgaggacgagggcugcaccaaccucuccggcuucuccuacauggagcucaaggucggcuacaucuccgccaucaaggucaacggcuucaccugcaccggcgucgucaccgaggccgagaccuacaccaacuucgucggcuacgucaccaccaccuuccgccgcaagcacuuccgccccacccccgacgccugccgcaccgccuacaacuggaagauggccggcgacccccgcuacgaggagucccuccacaaccccuaccccgacuaccacuggcuccgcaccgucaagaccaccaaggagucccucgucaucaucucccccuccgucgccgaccucgaccccuacgaccgcucccuccacucccgcgucuuccccaacggcaagugcuccggcaucaccgucuccuccaccuacugccccaccaaccacgacuacaccaucuggaugcccgagaacccccgccucggcaccuccugcgacaucuucgucaacucccgcggcaagcgcgccuccaagggcuccaagaccugcggcuucgucgacgagcgcggccucuacaagucccucaagggcgccugcaagcucaagcucugcggcguccucggccuccgccucauggacggcaccugggucgccaugcgcaccuccgacgagaccaaguggugcccccccgaccagcucgucaacauccacgacuuccacuccgacgagaucgagcaccucgucgucgaggagcucgucaagaagcgcgaggagugccucgacgcccucgaguccaucaugaccaccaaguccgucuccuuccgccgccucucccaccuccgcaagcucguccccggcuucggcaaggccuacaccaucuucaacaagacccucauggaggccgacgcccacuacaaguccguccgcaccugggacgagaucauccccuccaagggcugccuccgcgucggcggccgcugccacccccacguccacggcgucuucuucaacggcaucauccucggccccgacggccacguccucauccccgagaugcaguccucccuccuccagcagcacauggagcuccucgaguccuccgucaucccccucaugcacccccucgccgaccccuccaccgucuucaaggacggcgacgaggccgaggacuucgucgagguccaccuccccgacguccacaagcagaucuccggcgucgaccucggccuccccaacuggggcaaguacguccucauguccgccggcgcccucaucgcccucaugcucaucaucuuccucaugaccugcugccgcaagaucaagcgccccgaguccacccagcacuccccccgcggcaccggccgcaaggucuccgucaccucccagaacggcaaggucaucuccuccugggaguccuacaaguccggcggcgagacccgccucuga

SEQ ID NO: 127831 - RNA, 1575 nt, Artificial Sequence
  derived and/or modified CDS sequence (opt2) from glycoprotein__RABV__KU739044.1
auggucccccaggcccuccucuucgucccccuccucgucuucucccucugcuucggcaaguuccccaucuacaccauccccgacaagcucggccccuggucccccaucgacauccaccaccucuccugccccaacaaccucgucgucgaggacgagggcugcaccaaccucuccggcuucuccuacauggagcucaaggucggcuacaucuccgccaucaaggucaacggcuucaccugcaccggcgucgucaccgaggccgagaccuacaccaacuucgucggcuacgucaccaccaccuucaagcgcaagcacuuccgccccacccccgacgccugccgcgccgccuacaacuggaagauggccggcgacccccgcuacgaggagucccuccacaaccccuaccccgacuaccacuggcuccgcaccgucaagaccaccaaggagucccucgucaucaucucccccuccgucgccgaccucgaccccuacgacaagucccuccacucccgcgucuuccccuccggcaagugcuccggcaucaccgucuccuccaccuacugcuccaccaaccacgacuacaccaucuggaugcccgagaacccccgccucggcaccuccugcgacaucuucaccaacucccgcggcaagcgcgccuccaagggcuccaagaccugcggcuucgucgacgagcgcggccucuacaagucccucaagggcgccugcaagcucaagcucugcggcguccucggccuccgccucauggacggcaccugggucgccaugcagaccuccgacgagaccaaguggugcccccccgaccagcucgucaaccuccacgacuuccgcuccgacgagaucgagcaccucgucgucgaggagcucgucaagaagcgcgaggagugccucgacgcccucgaguccaucaugaccaccaaguccgucuccuuccgccgccucucccaccuccgcaagcucguccccggcuucggcaaggccuacaccaucuucaacaagacccucauggaggccgacgcccacuacaaguccguccgcaccuggaacgagaucauccccuccaagggcugccuccgcgucggcggccgcugccacccccacgucaacggcgucuucuucaacggcaucauccucggccccgacggccacguccucauccccgagaugcaguccucccuccuccagcagcacauggagcuccucgaguccuccgucaucccccucaugcacccccucgccgaccccuccaccgucuucaaggacggcgacgaggccgaggacuucgucgagguccaccuccccgacguccacaagcaggucuccggcgucgaccucggccuccccaacuggggcaaguacguccuccucuccgccggcacccucaucgcccucaugcucaucaucuuccucaugaccugcugccgccgcgucaaccgccccaaguccacccagcgcggccccggcgagaccggccgcaaggucuccgucaccucccaguccggcaaggucaucuccuccugggaguccuacaaguccggcggcgagacccgccucuga

SEQ ID NO: 127832 - RNA, 1575 nt, Artificial Sequence; identical to SEQ ID NO: 126591
  derived and/or modified CDS sequence (opt2) from glycoprotein__RABV__KU739045.1

SEQ ID NO: 127833 - RNA, 1575 nt, Artificial Sequence; identical to SEQ ID NO: 127723
  derived and/or modified CDS sequence (opt2) from glycoprotein__RABV__KU739047.1

SEQ ID NO: 127834 - RNA, 1575 nt, Artificial Sequence
  derived and/or modified CDS sequence (opt2) from glycoprotein__RABV__KU739048.1
auggucccccaggcccuccucuucgucccccuccucggcuucucccucugcuucggcaaguuccccaucuacaccauccccgacaagcucggccccuggucccccaucgacauccaccaccucuccugccccaacaaccucgucgucgaggacgagggcugcaccaaccucuccggcuucuccuacauggagcucaaggucggcuacaucuccgccaucaaggucaacggcuucaccugcaccggcgucgucaccgaggccgagaccuacaccaacuucgucggcuacgucaccaccaccuucaagcgcaagcacuuccgccccacccccgacgccugccgcgccgccuacaacuggaagauggccggcgacccccgcuacgaggagucccuccacaaccccuaccccgacuaccacuggcuccgcaccgucaagaccaccaaggagucccucgucaucaucucccccuccgucgccgaccucgaccccuacgacaagucccuccacucccgcgucuuccccggcggcaagugcuccggcaucaccgucuccuccaccuacugcuccaccaaccacgacuacaccaucuggcuccccgagaacccccgccucggcaccuccugcgacaucuucaccaacucccgcggcaagcgcgccuccaagggcuccaagaccugcggcuucgucgacgagcgcggccucuacaagucccucaagggcgccugcaagcucaagcucugcggcguccucggccuccgccucauggacggcaccugggucgccaugcagaccuccgacgagaccaaguggugcucccccgaccagcucgucaaccuccacgacuuccgcuccgacgagaucgagcaccucgucgucgaggagcucgucaagaagcgcgaggagugccucgacacccucgaguccaucaugaccaccaaguccgucuccuuccgccgccucucccaccuccgcaagcucguccccggcuucggcaaggccuacaccaucuucaacaagacccucauggaggccgacgcccacuacaaguccguccgcaccuggaacgagaucauccccuccaagggcugccuccgcgucggcggccgcugccaccaccacgucaacggcgucuucuucaacggcaucauccucggccccgacggccacguccucauccccgagaugcaguccucccuccuccagcagcacauggagcuccucgaguccuccgucaucccccucaugcacccccucgccgaccccuccaccgucuucaaggacggcgacgaggccgaggacuucgucgagguccaccuccccgacguccacaagcaggucuccggcgucgaccucggccuccccaacuggggcaaguacguccuccucuccgccggcgcccucgucgcccucaugcucaucaucuuccucaugaccugcugccgccgcgucaaccgccccgaguccacccagcgcuccuucggcggcaccgagcgcaaggucuccaucaccccccaguccggcaaggucaucuccuccugggaguccuacaaguccggcuccgagacccgccucuga

SEQ ID NO: 127835 - RNA, 1575 nt, Artificial Sequence
  derived and/or modified CDS sequence (opt2) from glycoprotein__RABV__KU739049.1
auggucccccaggcccuccuccucgucccccuccucggcuucucccucugcuucggcaaguuccccaucuacaccauccccgacaagcucggccccuggucccccaucgacauccaccaccucuccugccccaacaaccucgucgucgaggacgagggcugcaccaaccucuccggcuucuccuacauggagcucaaggucggcuacaucuccuccaucaaggucaacggcuucaccugcaccggcgucgucaccgaggccgagaccuacaccaacuucgucggcuacgucaccaccaccuuccgccgcaagcacuuccgccccacccccgacgccugccgcgccgccuacaacuggaagauggccggcgacccccgcuacgaggagucccuccacaaccccuaccccgacuaccacuggcuccgcaccgucaagaccaccaaggagucccucgucaucaucucccccuccgucgccgaccucgaccccuacgacaagucccuccacucccgcgucuuccccuccggcaagugcuccggcaucaccgucuccuccaccuacugcuccaccaaccacgacuacaccaucuggaugcccgagaaccuccgccucggcaccuccugcgacaucuucaccaacucccgcggcaagcgcgccuccaagggcuccaagaccugcggcuucgucgacgagcgcggccucuacaagucccucaagggcgccugcaagcucaagcucugcggcguccucggccuccgccucauggacggcaccugggucgccaugcagaccuccgacgagaccaaguggugcccccccgaccagcucgucaaccuccacgacuuccgcuccgacgagaucgagcaccucgucgucgaggagcucgucaagaagcgcgaggagugccucgacgcccucgaguccaucaugaccaccaaguccgucuccuuccgccgccucucccaccuccgcaagcucguccccggcuucggcaaggccuacaccaucuucaacaagacccucauggaggccgacgcccacuacaaguccguccgcaccuggaacgaggucauccccucccgcggcugccuccgcgucggcggccgcugccacccccacgucaacggcgucuucuucaacggcaucauccucggccccgacggccacguccucauccccgagaugcaguccucccuccuccagcagcacaucgagcuccucgaguccuccgucaucccccucacccacccccucgccgaccccuccaccgucuucaaggacggcgacgaggccgaggacuucgucgagguccaccuccccgacguccacaagcaggucuccggcgucgaccucggccuccccaacuggggcaaguacguccuccucuccgccggcgcccucaucgcccucaugcucaucaucuuccucaucaccugcugccgccgcgucaaccgccccgaguccacccagcgcucccuccgcggcgccggccgcaaggucuccaucaccucccaguccggcaaggucaucuccuccugggaguccuacaaguccggcggcgagacccgccucuga

SEQ ID NO: 127836 - RNA, 1575 nt, Artificial Sequence
  derived and/or modified CDS sequence (opt2) from glycoprotein__RABV__KU739050.1
auggucccccaggcccuccucuucgucccccuccucgucuucucccucugcuucggcaaguuccccaucuacaccauccccgacaagcucggccccuggucccccaucgacauccaccaccucuccugccccaacaaccucgucgucgaggacgagggcugcaccaaccucuccggcuucuccuacauggagcucaaggucggcuacaucuccgccaucaaggucaacggcuucaccugcaccggcgucgucaccgaggccgagaccuacaccaacuucgucggcuacgucaccaccaccuuccgccgcaagcacuuccgccccacccccgacgccugccgcgccgccuacaacuggaagauggccggcgacccccgcuacgaggagucccuccacaaccccuaccccgacuaccacuggcuccgcaccgucaagaccaccaaggagucccucgucaucaucucccccuccgucgccgaccucgaccccuacgacaagucccuccacucccgcgucuuccccuccggcaagugcuccggcaucaccgucuccuccaccuacugcuccaccaaccacgacuacaccaucuggaugcccgagaacccccgccucggcaccuccugcgacaucuucaccaacucccgcggcaagcgcgccuccaagggcuccaagaccugcggcuucgucgacgagcgcggccucuacaagucccucaagggcgccugcaagcucaagcucugcggcguccucggccuccgccucauggacggcaccugggucgccaugcagaccaccgacgagaccaaguggugcccccccgaccagcucgucaaccuccacgacuuccgcuccgacgagaucgagcaccucgucgucgaggagcucgucaagaagcgcgaggagugccucgacgcccucgaguccaucaugaccaccaaguccgucuccuuccgccgccucucccaccuccgcaagcucguccccggcuucggcaaggccuacaccaucuucaacaagacccucauggaggccgacgcccacuacaaguccguccgcaccuggaacgagaucauccccuccaagggcugccuccgcgucggcggccgcugccacccccacgucaacggcgucuucuucaacggcaucauccucggccccgacggccacguccucauccccgagaugcaguccucccuccuccagcagcacauggagcuccucgaguccuccgucaucccccucaugcacccccucgccgaccccuccaccgucuucaaggacggcgacgaggccgaggacuucgucgagguccaccuccccgacguccacaagcaggucuccggcgucgaccucggccuccccaacuggggcaaguacguccuccucuccgccggcacccucaucgcccucaugcucaucaucuuccucaugaccugcugccgccgcgucaaccgccccgaguccaugcagcgcucccucggcgagaccggccgcaaggucuccgucaccucccaguccggcaaggucaucuccuccugggaguccuacaaguccggcggcgagacccgccucuga

SEQ ID NO: 127837 - RNA, 1575 nt, Artificial Sequence
  derived and/or modified CDS sequence (opt2) from glycoprotein__RABV__KU888637.1
auggucccccaggcccuccucuucgucccccuccucgucuucucccucugcuucggcaaguuccccaucuacaccauccccgacaagcucggccccuggucccccaucgacauccaccaccucuccugccccaacaaccucgucgucgaggacgagggcugcaccaaccucuccggcuucuccuacauggagcucaaggucggcuacaucuccgccaucaaggucaacggcuucaccugcaccggcgucgucaccgaggccgagaccuacaccaacuucgucggcuacgucaccaccaccuucaagcgcaagcacuuccgccccacccccgacgccugccgcgccgccuacaacuggaagauggccggcgacccccgcuacgaggagucccuccacaaccccuaccccgacuaccacuggcuccgcaccgucaagaccaccaaggagucccucgucaucaucucccccuccgucgccgaccucgaccccuacgacaagucccuccacucccgcgucuuccccuccggcaagugcuccggcaucaccgucuccuccaccuacugcuccaccaaccacgacuacaccaucuggaugcccgagaacccccgccucggcaccuccugcgacaucuucgccaacucccgcggcaagcgcgccuccaagggcuccaagaccugcggcuucgucgacgagcgcggccucuacaagucccucaagggcgccugcaagcucaagcucugcggcguccucggccuccgccucauggacggcaccugggucgccaugcagaccuccgacgagaccaaguggugcccccccgaccagcucgucaaccuccacgacuuccgcuccgacgagaucgagcaccucgucgucgaggagcucgucaagaagcgcgaggagugccucgacgcccucgaguccaucaugaccaccaaguccgucuccuuccgccgccucucccaccuccgcaagcucguccccggcuucggcaaggccuacaccaucuucaacaagacccucauggaggccgacgcccacuacaaguccguccgcaccuggaacgagaucauccccuccaagggcugccuccgcgucggcggccgcugccacccccacgucaacggcgucuucuucaacggcaucauccucggccccgacggccacguccucauccccgagaugcaguccucccuccuccagcagcacauggagcuccucgaguccuccgucaucccccucaugcacccccucgccgaccccuccaccgucuucaaggacggcgacgaggccgaggacuucgucgagguccaccuccccgacguccacaagcaggucuccggcgucgaccucggccuccccggcuggggcaaguacguccuccucuccgccggcgcccucaucgcccucaugcucaucaucuuccucaugaccugcugccgccgcgucaaccgccccgaguccacccagcgcucccucggcggcaccggccgcaaggucuccaucaccucccaguccggcaaggucaucuccuccugggaguccuacaaguccggcggcgagacccgccucuga

SEQ ID NO: 127838 - RNA, 1575 nt, Artificial Sequence; identical to SEQ ID NO: 127374
  derived and/or modified CDS sequence (opt2) from glycoprotein__RABV__KU888639.1

SEQ ID NO: 127839 - RNA, 1575 nt, Artificial Sequence
  derived and/or modified CDS sequence (opt2) from glycoprotein__RABV__KU888640.1
auggucccccaggcccuccucuucgucccccuccucggcuucucccucugcuucggcaaguuccccaucuacaccauccccgacaagcucggccccuggucccccaucgacauccaccaccucuccugccccaacaaccucgucgucgaggacgagggcugcaccaaccucuccggcuucuccuacauggagcucaaggucggcuacaucuccgccaucaaggucaacggcuucaccugcaccggcgucgucaccgaggccgagaccuacaccaacuucgucggcuacgucaccaccaccuucaagcgcaagcacuuccgccccacccccgacgccugccgcgccgccuacaacuggaagauggccggcgacccccgcuacgaggagucccuccacaaccccuaccccgacuaccacuggcuccgcaccgucaagaccaccaaggagucccucgucaucaucucccccuccgucgccgaccucgaccccuacgacaagucccuccacucccgcgucuuccccuccggcaagugcuccggcaucaccgucuccuccaccuacugccccaccaaccacgacuacaccaucuggaugcccgagaacccccgccucggcaccuccugcgacaucuucaccuccuccaagggcaagcgcgccuccaagggcuccaagaccugcggcuucgucgacgagcgcggccucuacaagucccucaagggcgccugcaagcucaagcucugcggcguccucggccuccgccucauggacggcaccugggucgccaugcagaccuccgacgagaccaaguggugcccccccgaccagcucgucaaccuccacgacuuccgcuccgacgagaucgagcaccucgucgucgaggagcucgucaagaagcgcgaggagugccucgacgcccucgaguccaucaugaccaccaaguccgucuccuuccgccgccucucccaccuccgcaagcucguccccggcuucggcaaggccuacaccaucuucaacaagacccucauggaggccgacgcccacuacaaguccguccgcaccuggaacgagaucauccccuccaagggcugccuccgcaucggcggccgcugccacccccacgucaacggcgucuucuucaacggcaucauccucggccccgacggccacguccucauccccgagaugcaguccucccuccuccagcagcacauggagcuccucgaguccuccgucaucccccucaugcacccccucgccgaccccuccaccguccucaaggacggcgacgaggccgaggacuucgucgagguccaccuccccgacguccacaagcagaucuccggcgucgaccucggccuccccaacuggggcaaguacguccuccucuccgccggcgcccucaucgcccucaugcucaucaucuuccucaugaccugcugccgccgcgucaaccgccaggaguccacccagcgcucccucggcggcaccggccgcaaggucuccaucaccucccaguccggcaaggucaucuccuccugggaguccuacaaguccggcggcgagacccgccucuga

SEQ ID NO: 127840 - RNA, 1575 nt, Artificial Sequence
  derived and/or modified CDS sequence (opt2) from glycoprotein__RABV__KU888641.1
auggucccccaggcccuccucgucaucccccuccucggcuucucccucugcuucggcaaguuccccaucuacaccauccccgacaagcucggccccuggucccccaucgacauccaccaccucuccugccccaacaaccucaucgucgaggacgagggcugcaccaaccucuccggcuucuccuacauggagcucaaggucggcuacaucuccgccaucaaggucaacggcuucaccugcaccggcgucgucaccgaggccgagaccuacaccaacuucgucggcuacgucaccaccaccuucaagcgcaagcacuuccgccccacccccgacgagugccgcgccgccuacaacuggaagauggccggcgacccccgcuacgaggagucccuccacaaccccuaccccgacuaccacuggcuccgcaccgucaagaccaccaaggagucccucgucaucaucucccccuccgucgccgaccucgaccccuacgacaagucccuccacucccgcgucuuccccuccggcaagugcuccggcaucaccgucuccuccaccuacugcuccaccaaccacgacuacaccaucuggaugcccgagaacccccgccucggcaccuccugcgacaucuucaccaacucccgcggcaagcgcgccuccaagggcuccaagaccugcggcuucgucgacgagcgcggccucuacaagucccucaagggcgccugcaagcucaagcucugcggcguccucggccucaagcucauggacggcaccugggucgccaugcaggccuccgacgagaccaaguggugcccccccgaccagcucgucaaccuccacgaccuccgcuccgacgagaucgagcaccucgucgucgaggagcucgucaagaagcgcgaggagugccucgacgcccucgaguccaucaugaccaccaaguccgucuccuuccgccgccucucccaccuccgcaagcucguccccggcuucggcaaggccuacaccaucuucaacaagacccucauggaggccgacgcccacuacaaguccguccgcaccuggaacgagaucauccccuccaagggcugccucaaggucggcggccgcugccacccccacgucaacggcgucuucuucaacggcgucauccucggccccgacggccacguccucauccccgagaugcaguccucccuccuccagcagcacauggagcuccucgaguccuccgucaucccccucaugcacccccucgccgaccccuccaccgucuucaaggacggcgaggaggccgaggacuucgucgagguccaccuccccgacguccacaagcaggucuccggcgucgaccucggccuccccaacuggggcaaguacgucucccucggcgccggcgcccucaucgcccucaugcucaccauccuccucaucaccugcugccgccgcgucaaccgccccgagcccacccgccgcucccucgagggcaaggagcgcaaggucuccgucaccucccaguccggcaaggucaucuccuccugggaguccuacaaguccggcggcgagacccgccucuga

SEQ ID NO: 127841 - RNA, 1575 nt, Artificial Sequence
  derived and/or modified CDS sequence (opt2) from glycoprotein__RABV__KU888642.1
auggucccccaggcccuccucuucgucccccuccucggcuucucccucugcuucggcaaguuccccaucuacaccauccccgacaagcucggccccuggucccccaucgacauccaccaccucuccugccccaacaaccucgucgucgaggacgagggcugcaccaaccucuccggcuucuccuacauggagcucaaggucggcuacaucuccgccaucaaggucaacggcuucaccugcaccggcgucgucaccgaggccgagaccuacaccaacuucgucggcuacgucaccaccaccuucaagcgcaagcacuuccgccccacccccgacgccugccgcgccgccuacaacuggaagauggccggcgacccccgcuacgaggagucccuccacaaccccuaccccgacuaccacuggcuccgcaccgucaagaccaccaaggagucccucgucaucaucucccccuccgucgccgaccucgaccccuacgacaagucccuccacucccgcgucuuccccuccggcaagugcuccggcaucaccgucuccuccaccuacugcuccaccaaccacgacuacaccaucuggaugcccgagaacccccgccucggcaccuccugcgacaucuucaccaacuccaagggcaagcgcgccuccaagggcuccaagaccugcggcuucgucgacgagcgcggccucuacaagucccucaagggcgccugcaagcucaagcucugcggcguccucggccuccgccucauggacggcaccugggucgccaugcagaccuccgacgagaccaaguggugcccccccgaccagcucgucaaccuccacgacuuccgcuccgacgagaucgagcaccucgucgucgaggagcucgucaagaagcgcgaggagugccucgacgcccucgaguccaucaugaccaccaaguccgucuccuuccgccgccucucccaccuccgcaagcucguccccggcuucggcaaggccuacaccaucuucaacaagacccucauggaggccgacgcccacuacaaguccguccgcaccuggaacgagaucauccccuccaagggcugccuccgcgucggcggccgcugccacccccacgucaacggcgucuucuucaacggcaucauccucggccccgacggccacguccucauccccgagaugcaguccucccuccuccagcagcacauggagcuccucgaguccuccgucaucccccucaugcacccccucgccgaccccuccaccguccucaaggacuccgacgaggccgaggacuucgucgagguccaccuccccgacguccacaagcagaucuccggcgucgaccucggccuccccaacuggggcaaguacguccuccucuccgccggcgcccucaucgcccucaugcucaucaucuuccucaugaccugcugccgccgcgucaaccgccaggaguccacccagcgcucccucggcggcaccggccgcaaggucuccaucaccucccaguccggcaaggucaucuccuccugggaguccuacaaguccggcggcgagacccgccucuga

SEQ ID NO: 127842 - RNA, 1575 nt, Artificial Sequence; identical to SEQ ID NO: 126881
  derived and/or modified CDS sequence (opt2) from glycoprotein__RABV__KU888643.1

SEQ ID NO: 127843 - RNA, 1575 nt, Artificial Sequence
  derived and/or modified CDS sequence (opt2) from glycoprotein__RABV__KU946961.1
augaucccccaggcccuccucuucgucccccuccucgucuucccccucugcuucggcaaguuccccaucuacaccauccccgacaagcucggccccuggucccccaucgacauccaccaccucuccugccccaacaaccucgucgucgaggacgagggcugcaccaaccucuccggcuucuccuacauggagcucaaggucggcuacaucuccgccaucaaggucaacggcuucaccugcaccggcgucgucaccgaggccgagaccuacaccaacuucgucggcuacgucaccaccaccuucaagcgcaagcacuuccgccccacccccgacgccugccgcuccgccuacaacuggaagauggccggcgacccccgcuacgaggagucccuccacaaccccuaccccgacuaccacuggcuccgcaccgucaagaccaccaaggaguccgucgucaucaucucccccuccgucgccgaccucgaccccuacgacaagucccuccacucccgcgucuucccccgcggcaagugcuccggcaucaccgucuccuccgccuacugcuccaccaaccacgacuacaccaucuggaugcccgagaacccccgccucggcaccuccugcgacaucuucaccaacucccgcggcaagcgcgccuccaagggcuccaagaccugcggcuucgucgacgagcgcggccucuacaagucccucaagggcgccugcaagcucaagcucugcggcguccucggccuccgccucauggacggcaccugggucgccauccagaccuccaacgagaccaaguggugcccccccgaccagcucgucaaccuccacgacuuccacuccgacgagaucgagcaccucgucgucgaggaggucgucaagaagcgcgaggagugccucgacgcccucgaguccaucaugaccaccaaguccgucuccuuccgccgccucucccaccuccgcaagcucguccccggcuucggcaaggccuacaccaucuucaacaagacccucauggaggccgacgcccacuacaaguccguccagaccugggacgagaucauccccuccaagggcugccuccgcgucggcggccgcugccacccccacgucaacggcgucuucuucaacggcaucauccucggccccgacggccacguccucauccccgagaugcaguccucccuccuccagcagcacauggagcuccucaaguccuccgucaucccccucaugcacccccucgccgaccccuccaccgucuucaaggacggcgacgaggucgaggacuucgucgagguccaccuccccgacguccacaagcaggucuccggcgucgaccucggccuccccaacuggggcaaggacguccucaugggcgccggcguccucaccgcccucaugcucaugaucuuccucaugaccugcugccgccgcaccaaccgcgccgaguccauccagcacucccucggcgagaccggccgcaaggucuccgucaccucccaguccggccgcgucaucuccuccugggaguccuacaaguccggcggcgagaccaagcucuga

SEQ ID NO: 127844 - RNA, 1575 nt, Artificial Sequence; identical to SEQ ID NO: 127510
  derived and/or modified CDS sequence (opt2) from glycoprotein__RABV__KX036361.1

SEQ ID NO: 127845 - RNA, 1575 nt, Artificial Sequence
  derived and/or modified CDS sequence (opt2) from glycoprotein__RABV__KX036363.1
auggucccccaggcccuccucuucgucccccuccucgccuuccccaugugcuucggcaaguuccccaucuacaccauccccgacaagcucggccccuggucccccaucgacauccaccaccucuccugccccaacaaccucgucgucgaggacgagggcugcaccaaccucuccggcuucuccuacauggagcucaaggucggcuacaucuccgccaucaaggucaacggcuucaccugcaccggcgucgucaccgaggccgagaccuacaccaacuucgucggcuacgucaccaccaccuucaagcgcaagcacuuccgccccacccccgacgccugccgcgccgccuacaacuggaagauggccggcgacccccgcuacgaggagucccuccacaaccccuaccccgacuaccacuggcuccgcaccgucaagaccaccaaggagucccucaucaucaucucccccuccgucgccgaccucgaccccuacgacaagucccuccacucccgcgucuuccccuccggcaagugccucggcaucaccaucuccuccaccuacugcuccaccaaccacgacuacaccaucuggaugcccgagaacguccgccucggcaccuccugcgacaucuucaccaacucccgcggcaagcgcgccuccaagggcuccaagaccugcggcuucgucgacgagcgcggccucuacaagucccucaagggcgccugcaagcucaagcucugcggcguccucggccuccgccucauggacggcaccugggucgccaugcccaccuccgacgagaccaaguggugcccccccgaccagcucgucaaccuccacgacuuccgcuccgacgagaucgagcaccucgucgucgaggagcucguccgcaagcgcgaggagugccucgacgcccucgaguccaucaugaccaccaaguccgucuccuuccgccgccucucccaccuccgcaagcucguccccggcuucggcaaggccuacaccaucuucaacaagacccucauggaggccgacgcccacuacaaguccguccgcaccuggaacgagaucauccccuccaagggcugccuccgcgucggcggccgcugccacccccacgucaacggcgucuucuucaacggcaucauccucggccccgacggccacguccucauccccgagaugcaguccucccuccuccagcagcacauggagcuccucgaguccuccgucaucccccucaugcacccccucgccgaccccuccaccgucuucaaggacggcgacgaggccgaggacuucgucgagguccaccuccccgacguccacaagcagaucuccggcgucgaccucggccuccccaacuggggcaaguacguccucaucaucgccggcguccucaucgccaugauccucaccaucuuccucaugaccugcugcggccgcggcaaccgccccaaguccaagcagcacucccucggcggcaucggccgcaaggucuccuccaccucccaguccggcaaggucaucuccuccugggaguccuacaaguccggcggcgagacccgccucuga

SEQ ID NO: 127846 - RNA, 1575 nt, Artificial Sequence; identical to SEQ ID NO: 127845
  derived and/or modified CDS sequence (opt2) from glycoprotein__RABV__KX036364.1

SEQ ID NO: 127847 - RNA, 1575 nt, Artificial Sequence; identical to SEQ ID NO: 127845
  derived and/or modified CDS sequence (opt2) from glycoprotein__RABV__KX036365.1

SEQ ID NO: 127848 - RNA, 1575 nt, Artificial Sequence
  derived and/or modified CDS sequence (opt2) from glycoprotein__RABV__KX036366.1
auggucccccaggcccuccucuucgucccccucauggccuuccccaugugcuucggcaaguuccccaucuacaccauccccgacaagcucggccccuggucccccaucgacauccaccaccucuccugccccaacaaccucgucgucgaggacgagggcugcaccaaccucuccggcuucuccuacauggagcucaaggucggcuacaucuccgccaucaaggucaacggcuucaccugcaccggcgucgucaccgaggccgagaccuacaccaacuucgucggcuacgucaccaccaccuucaagcgcaagcacuuccgccccacccccgacgccugccgcgccgccuacaacuggaagauggccggcgacccccgcuacgaggagucccuccacaaccccuaccccgacuaccacuggcuccgcaccgucaagaccaccaaggagucccucaucaucaucucccccuccgucgccgaccucgaccccuacgacaagucccuccacucccgcgucuuccccuccggcaagugccucggcaucaccaucuccuccaccuacugcuccaccaaccacgacuacaccaucuggaugcccgacaacguccgccucggcaccuccugcgacaucuucaccaacucccgcggcaagcgcgccuccaagggcuccaagaccugcggcuucgucgacgagcgcggccucuacaagucccucaagggcgccugcaagcucaagcucugcggcguccucggccuccgccucauggacggcaccugggucgccaugcccaccuccgacgagaccaaguggugcccccccgaccagcucgucaaccuccacgacuuccgccucgacgagaucgagcaccucgucgucgaggagcucguccgcaagcgcgaggagugccucgacgcccucgaguccaucgucaccaccaaguccgucuccuuccgccgccucucccaccuccgcaagcucguccccggcuucggcaaggccuacaccaucuucaacaagacccucauggaggccgacgcccacuacaaguccguccgcaccuggaacgagaucauccccuccaagggcugccuccgcgucggcggccgcugccacccccacgucaacggcgucuucuucaacggcaucauccucggccccgacggccacguccucauccccgagaugcaguccucccuccuccagcagcacauggagcuccucgaguccuccgucaucccccucaugcacccccucgccgaccccuccaccgucuucaaggacggcgacgaggccgaggacuucgucgagguccaccuccccgacguccacaagcagaucuccggcgucgaccucggccuccccaacuggggcaaguacguccucaucaucgccggcguccucaucgccaugauccucaccaucuuccucaugaccugcugcggccgcggcaaccgccccaaguccacccagcacucccucggcggcaucggccgcaaggucuccuccaccucccaguccggcaaggucaucuccuccugggaguccuacaaguccggcggcgagacccgccucuga

SEQ ID NO: 127849 - RNA, 1575 nt, Artificial Sequence
  derived and/or modified CDS sequence (opt2) from glycoprotein__RABV__KX036367.1
auggucccccaggcccuccucuucgucccccuccucgccuuccccaugugcuucggcaaguuccccaucuacaccauccccgacaagcucggccccuggucccccaucgacauccaccaccucuccugccccaacaaccucgucgucgaggacgagggcugcaccaaccucuccggcuucuccuacauggagcucaaggucggcuacaucuccgccaucaaggucaacggcuucaccugcaccggcgucgucaccgaggccgagaccuacaccaacuucgucggcuacgucaccaccaccuucaagcgcaagcacuuccgccccacccccgacgccugccgcgccgccuacaacuggaagauggccggcgacccccgcuacgaggagucccuccacaaccccuaccccgacuaccacuggcuccgcaccgucaagaccaccaaggagucccucaucaucaucucccccuccgucgccgaccucgaccccuacgacaagucccuccacucccgcgucuuccccuccggcaagugccucggcaucaccaucuccuccaccuacugcuccaccaaccacgacuacaccaucuggaugcccgagaacguccgccucggcaccuccugcgacaucuucaccaacucccgcggcaagcgcgccuccaagggcuccaagaccugcggcuucgucgacgagcgcggccucuacaagucccucaagggcgccugcaagcucaagcucugcggcguccucggccuccgccucauggacggcaccugggucgccaugcccaccuccgacgagaccaaguggugcccccccgaccagcucgucaaccuccacgacuuccgcuccgacgagaucgagcaccucgucgucgaggagcucguccgcaagcgcgaggagugccucgacgcccucgaguccaucaugaccaccaaguccgucuccuuccgccgccucucccaccuccgcaagcucguccccggcuucggcaaggccuacaccaucuucaacaagacccucauggaggccgacgcccacuacaaguccguccgcaccuggaacgagaucauccccuccaagggcugccuccgcgucggcggccgcugccacccccacgucaacggcgucuucuucaacggcaucauccucggccccgacggccacguccucauccccgagaugcaguccucccuccuccagcagcacauggagcuccucgaguccuccgucaucccccucaugcacccccucgccgaccccuccaccgucuucaaggacggcgacgaggccgaggacuucgucgagguccaccuccccgacguccacaagcagaucuccggcgucgaccucggccuccccaacuggggcaaguacguccucaucaucgccggcguccucaucgccaugauccucaccaucuuccucaugaccugcugcggccgcggcaaccgccccauguccaagcagcacucccucggcggcaucggccgcaaggucuccuccaccucccaguccggcaaggucaucuccuccugggaguccuacaaguccggcggcgagacccgccucuga

SEQ ID NO: 127850 - RNA, 1575 nt, Artificial Sequence
  derived and/or modified CDS sequence (opt2) from glycoprotein__RABV__L40426.1
auggucccccagguccuccucuucguccuccuccucggcuucucccucugcuucggcaaguuccccaucuacaccauccccgacaagcucggccccuggucccccaucgacauccaccaccuccgcugccccaacaaccucgucgucgaggacgagggcugcaccaaccucuccggcuucuccuacauggagcucaaggucggcuacaucuccgccaucaaggucaacggcuucaccugcaccggcgucgucaccgaggccgagaccuacaccaacuucgucggcuacgucaccaccaccuucaagcgcaagcacuuccgccccacccccgacgccugccgcgccgccuacaacuggaagauggccggcgacccccgcuacgaggagucccuccagaaccccuaccccgacuaccacuggcuccgcaccguccgcaccaccaaggagucccucaucaucaucucccccuccgucaccgaccucgaccccuacgacaagucccuccacucccgcgucuuccccggcggcaagugcuccggcaucaccgucuccuccaccuacugcuccaccaaccacgacuacaccaucuggaugcccgagaacccccgccccggcacccccugcgacaucuucaccaacucccgcggcaagcgcgccuccaacggcaacaagaccugcggcuucgucgacgagcgcggccucuacaagucccucaagggcgccugccgccucaagcucugcggcguccucggccuccgccucauggacggcaccugggucgccaugcagaccuccgacgagaccaaguggugcucccccgaccagcucgucaaccuccacgacuuccgcuccgacgagaucgagcaccucgucgucgaggagcucgucaagaagcgcgaggagugccucgacacccucgaguccaucaugaccaccaaguccgucuccuuccgccgccucucccaccuccgcaagcucguccccggcuucggcaaggccuacaccaucuucaacaagacccucauggaggccgacgcccacuacaaguccguccgcaccuggaacgagaucauccccuccaagggcugccucaaggucggcggccgcugccacccccacgucaacggcgucuucuucaacggcaucauccucggccccgacgaccgcguccucauccccgagaugcaguccucccuccuccgccagcacauggagcuccucgaguccuccgucaucccccucaugcacccccucgccgaccccuccaccgucuucaaggagggcgacgaggccgaggacuucgucgagguccaccuccccgacgucuacaagcagaucuccggcgucgaccucggccuccccaacuggggcaaguacguccucaugaccgccggcgccaugaucggccucguccucaucuucucccucaugaccuggugccgccgcgccaaccgccccgaguccaagcagcgcuccuucggcggcaccggcggcaacgucuccgucaccucccaguccggcaaggucauccccuccugggaguccuacaaguccggcggcgagauccgccucuga

SEQ ID NO: 127851 - RNA, 1575 nt, Artificial Sequence; identical to SEQ ID NO: 126608
  derived and/or modified CDS sequence (opt2) from glycoprotein__RABV__LC009632.1

SEQ ID NO: 127852 - RNA, 1575 nt, Artificial Sequence
  derived and/or modified CDS sequence (opt2) from glycoprotein__RABV__LC009633.1
augaucccccaggcccuccucuucgucccccuccucgucuucucccucugcuucggcaaguuccccaucuacaccauccccgacaagcucggccccuggucccccaucgacauccaccaccucuccugccccaacaaccucgucgucgaggacgagggcugcaccaaccucuccggcuucuccuacauggagcucaaggucggcuacaucuccgccaucaaggucaacggcuucaccugcaccggcgucgucaccgaggccgagaccuacaccaacuucgucggcuacgucaccaccaccuucaagcgcaagcacuuccgccccacccccgacgccugccgcgccgccuacaacuggaagauggccggcgacccccgcuacgaggagucccuccacaaccccuaccccgacuaccacuggcuccgcaccgucaagaccaccaaggagucccucgucaucaucucccccuccgucgccgaccucgaccccuacgacaagucccuccacucccgcgucuuccccuccggcaagugcuccggcaucaccgucuccuccaccuacugcuccaccaaccacgacuacaccaucuggaugcccgagaacccccgccucggcaccuccugcgacaucuucaccaacucccgcggcaagcgcgccuccaagggcaacaagaccugcggcuucgucgacgagcgcggccucuacaagucccucaagggcgccugcaagcucaagcucugcggcguccucggccuccgccucauggacggcaccugggccgccauccagaccuccgacgagaccaaguggugcccccccgaccagcucgucaaccuccacgacuuccgcuccgacgagaucgagcaccucgucgucgaggagcucgucaagaagcgcgaggagugccucgacgcccucgaguccaucaugaccaccaaguccgucuccuuccgccgccucucccaccuccgcaagcucguccccggcuucggcaaggccuacaccaucuucaacaagacccucauggaggccgacgcccacuacaaguccguccgcaccuggaacgagaucauccccuccaagggcugccuccgcgucggcggccgcugccacccccacgucaacggcgucuucuucaacggcaucauccucggccccgacggccacguccucauccccgagaugcaguccucccuccuccagcagcacauggagcuccucgaguccuccgucaucccccucaugcacccccucgccgaccccuccaccgucuucaaggacgacgacgaggccgaggacuucgucgagguccaccuccccgacguccacaagcaggucuccggcgucgaccucggccuccccuccuggggcaaguacguccucauguccgccggcguccucaccgcccucaugcucaugaucuuccucaugaccugcugccgccgcgccaaccgcgccgaguccgcccagcacucccucggcgagcgcggccgcaaggucuccgucaccucccaguccggccgcgucaucuccuccugggaguccuacaaguccggcggcgagaccaagcucuga

SEQ ID NO: 127853 - RNA, 1575 nt, Artificial Sequence
  derived and/or modified CDS sequence (opt2) from glycoprotein__RABV__LC009635.1
auggucccccagguccuccucuucguccuccuccucggcuucucccucugcuucggcaaguuccccaucuacaccauccccgacgagcucggccccuggucccccaucgacauccaccaccucuccugccccaacaaccucgucgucgaggacgagggcugcaccaaccucuccgaguucuccuacauggagcucaaggucggcuacaucuccgccaucaaggucaacggcuucaccugcaccggcgucgucaccgaggccgagaccuacaccaacuucgucggcuacgucaccaccaccuucaagcgcaagcacuuccgccccacccccgacgccugccgcgccgccuacaacuggaagauggccggcgacccccgcuacgaggagucccuccacaaccccuaccccgacuaccacuggcuccgcaccguccgcaccaccaaggagucccucaucaucaucucccccuccgucaccgaccucgaccccuacgacaagucccuccacucccgcgucuuccccggcggcaagugcuccggcaucaccgucuccuccaccuacugcuccaccaaccacgacuacaccaucuggaugcccgagaacccccgcccccgcacccccugcgacaucuucaccaacucccgcggcaagcgcgccuccaacggcuccaagaccugcggcuucgucgacgagcgcggccucuacaagucccucaagggcgccugccgccucaagcucugcggcguccucggccuccgccucauggacggcaccugggucgccaugcagaccuccgacgagaccaaguggugcccccccgaccagcucgucaaccuccacgacuuccgcuccgacgagaucgagcaccucgucgucgaggagcucgucaagaagcgcgaggagugccucgacgcccucgaguccaucaugaccaccaaguccgucuccuuccgccgccucucccaccuccgcaagcucguccccggcuucggcaaggccuacaccaucuucaacaagacccucauggaggccgacgcccacuacaaguccguccgcaccuggaacgagaucauccccuccaagggcugccucaaggucggcggccgcugccacccccacgucaacggcgucuucuucaacggcaucauccucggccccgacgaccacguccucauccccgagaugcaguccucccuccuccagcagcacauggagcuccucgaguccuccgucaucccccucaugcacccccucgccgaccccuccaccgucuucaaggagggcgacgaggccgaggacuucgucgagguccaccuccccgacgucuacaagcagaucuccggcgucgaccucggccuccccaacuggggcaaguacguccucaugaccgccggcgccaugaucggccucguccucaucuucucccucaugaccuggugccgccgcgccaaccgccccgaguccaagcagcgcuccuucggcggcaccggcggcaacgucuccgucaccucccaguccggcaaggucauccccuccugggaguccuacaaguccggcggcgagauccgccucuga

SEQ ID NO: 127854 - RNA, 1575 nt, Artificial Sequence; identical to SEQ ID NO: 126608
  derived and/or modified CDS sequence (opt2) from glycoprotein__RABV__LC018482.1

SEQ ID NO: 127855 - RNA, 1575 nt, Artificial Sequence; identical to SEQ ID NO: 126607
  derived and/or modified CDS sequence (opt2) from glycoprotein__RABV__LC018483.1

SEQ ID NO: 127856 - RNA, 1575 nt, Artificial Sequence; identical to SEQ ID NO: 126634
  derived and/or modified CDS sequence (opt2) from glycoprotein__RABV__LC018484.1

SEQ ID NO: 127857 - RNA, 1575 nt, Artificial Sequence; identical to SEQ ID NO: 126631
  derived and/or modified CDS sequence (opt2) from glycoprotein__RABV__LC018485.1

SEQ ID NO: 127858 - RNA, 1575 nt, Artificial Sequence; identical to SEQ ID NO: 126608
  derived and/or modified CDS sequence (opt2) from glycoprotein__RABV__LC018486.1

SEQ ID NO: 127859 - RNA, 1575 nt, Artificial Sequence; identical to SEQ ID NO: 126631
  derived and/or modified CDS sequence (opt2) from glycoprotein__RABV__LC018487.1

SEQ ID NO: 127860 - RNA, 1575 nt, Artificial Sequence; identical to SEQ ID NO: 126635
  derived and/or modified CDS sequence (opt2) from glycoprotein__RABV__LC018488.1

SEQ ID NO: 127861 - RNA, 1575 nt, Artificial Sequence; identical to SEQ ID NO: 126631
  derived and/or modified CDS sequence (opt2) from glycoprotein__RABV__LC018489.1

SEQ ID NO: 127862 - RNA, 1575 nt, Artificial Sequence; identical to SEQ ID NO: 126631
  derived and/or modified CDS sequence (opt2) from glycoprotein__RABV__LC018490.1

SEQ ID NO: 127863 - RNA, 1575 nt, Artificial Sequence; identical to SEQ ID NO: 126608
  derived and/or modified CDS sequence (opt2) from glycoprotein__RABV__LC018493.1

SEQ ID NO: 127864 - RNA, 1575 nt, Artificial Sequence; identical to SEQ ID NO: 126631
  derived and/or modified CDS sequence (opt2) from glycoprotein__RABV__LC018494.1

SEQ ID NO: 127865 - RNA, 1575 nt, Artificial Sequence; identical to SEQ ID NO: 126631
  derived and/or modified CDS sequence (opt2) from glycoprotein__RABV__LC018495.1

SEQ ID NO: 127866 - RNA, 1575 nt, Artificial Sequence; identical to SEQ ID NO: 126631
  derived and/or modified CDS sequence (opt2) from glycoprotein__RABV__LC018496.1

SEQ ID NO: 127867 - RNA, 1575 nt, Artificial Sequence
  derived and/or modified CDS sequence (opt2) from glycoprotein__RABV__LC018497.1
augaucccccaggcccuccucuucgucccccuccucgucuucucccucugcuucggcaaguuccccaucuacaccauccccgacaagcucggccccuggucccccaucgacauccaccaccucuccugccccaacaaccucgucgucgaggacgagggcugcaccaaccucuccggcuucuccuacauggagcucaaggucggcuacaucuccgccaucaaggucaacggcuucaccugcaccggcgucgucaccgaggccgagaccuacaccaacuucgucggcuacgucaccaccaccuucaagcgcaagcacuuccgccccacccccgacgccugccgcuccgccuacaacuggaagauggccggcgacccccgcuacgaggagucccuccacaaccccuaccccgacuaccacuggcuccgcaccgucaagaccaccaaggagucccucgucaucaucucccccuccgucgccgaccucgaccccuacgacaagucccuccacucccgcgucuuccccuccggcaagugcuccggcaucaccgucuccuccaccuacugcuccaccaaccacgacuacaccaucuggaugcccgagaacccccgccucggcaccuccugcgacaucuucaccaacucccgcggcaagcgcgccuccaagggcuccaagaccugcggcuucgucgacgagcgcggccucuacaagucccucaagggcgccugcaagcucaagcucugcggcguccucggccuccgccucauggacggcaccugggccgccauccagaccuccgacgagaccaaguggugcccccccgaccagcucgucaaccuccacgacuuccgcuccgacgagaucgagcaccucgucgucgaggagcucgucaagaagcgcgaggagugccucgacgcccucgaguccaucaugaccaccaaguccgucuccuuccgccgccucucccaccuccgcaagcucguccccggcuucggcaaggccuacaccaucuucaacaagacccucauggaggccgacgcccacuacaaguccguccgcaccuggaacgagaucauccccuccaagggcugccuccgcgucggcggccgcugccacccccacgucaacggcgucuucuucaacggcaucauccucggccccgacggccacguccucauccccgagaugcaguccucccuccuccagcagcacauggagcuccucgaguccuccgucaucccccucaugcacccccucgccgaccccuccaccgucuucaaggacgacgacgaggccgaggacuucgucgagguccaccuccccgacguccacaagcaggucuccggcgucgaccucggccuccccuccuggggcaaguacguccucauguccgccggcguccucaccgcccucaugcucaugaucuuccucacccgcugcugccgccgcgccaaccgcgccgaguccgcccagcacucccucggcgagcgcggccgcaaggucuccgucaccucccaguccggccgcgucaucuccuccugggaguccuacaaguccggcggcgagaccaagcucuga

SEQ ID NO: 127868 - RNA, 1575 nt, Artificial Sequence; identical to SEQ ID NO: 126631
  derived and/or modified CDS sequence (opt2) from glycoprotein__RABV__LC018498.1

SEQ ID NO: 127869 - RNA, 1575 nt, Artificial Sequence
  derived and/or modified CDS sequence (opt2) from glycoprotein__RABV__LC018501.1
augaucccccaggcccuccucuucgucccccuccucgucuucucccucugcuucggcaaguuccccaucuacaccauccccgacaagcucggccccuggucccccaucgacauccaccaccucuccugccccaacaaccucgucgucgaggacgagggcugcaccaaccucuccggcuucuccuacauggagcucaaggucggcuacaucuccgccaucaaggucaacggcuucaccugcaccggcgucgucaccgaggccgagaccuacaccaacuucgucggcuacgucaccaccaccuucaagcgcaagcacuuccgccccacccccgacgccugccgcgccgccuacaacuggaagauggccggcgacccccgcuacgaggagucccuccacaaccccuaccccgacuaccacuggcuccgcaccgucaagaccaccaaggagucccucgucaucaucucccccuccgucgccgaccucgaccccuacgacaagucccuccacucccgcgucuuccccuccggcaagugcuccggcaucaccgucuccuccaccuacugcuccaccaaccacgacuacaccaucuggaugcccgagaacccccgccucggcaccuccugcgacaucuucaccaacucccgcggcaagcgcgccuccaagggcuccaagaccugcggcuucgucgacgagcgcggccucuacaagucccucaagggcgccugcaagcucaagcucugcggcguccucggccuccgccucauggacggcaccugggccgccauccagaccuccgacgagaccaaguggugcccccccgaccagcucgucaaccuccacgacuuccgcuccgacgagaucgagcaccucgucgucgaggagcucgucaagaagcgcgaggagugccucgacgcccucgaguccaucaugaccaccaaguccgucuccuuccgccgccucucccaccuccgcaagcucguccccggcuucggcaaggccuacaccaucuucaacaagacccucauggaggccgacgcccacuacaaguccguccgcaccuggaacgagaucauccccuccaagggcugccuccgcgucggcggccgcugccacccccacgucaacggcgucuucuucaacggcaucauccucggccccgacggccacguccucauccccgagaugcaguccucccuccuccagcagcacauggagcuccucgaguccuccgucaucccccucaugcacccccucgccgaccccuccaccgucuucaaggacgacgacgaggccgaggacuucgucgagguccaccuccccgacguccacaagcaggucuccggcgucgaccucggccuccccuccuggggcaaguacguccucauguccgccggcguccucaccgcccucaugcucaugaucuuccucaugaccugcugccgccgcaccaaccgcgccgaguccgcccagcacucccccggcgagcgcggccgcaaggucuccgucaccucccaguccggccgcgucaucuccuccugggaguccuacaaguccggcggcgagaccaagcucuga

SEQ ID NO: 127870 - RNA, 1575 nt, Artificial Sequence; identical to SEQ ID NO: 126608
  derived and/or modified CDS sequence (opt2) from glycoprotein__RABV__LC018502.1

SEQ ID NO: 127871 - RNA, 1575 nt, Artificial Sequence
  derived and/or modified CDS sequence (opt2) from glycoprotein__RABV__LC018503.1
augaucccccaggcccuccucuucgucccccuccucgucuucucccucugcuucggcaaguuccccaucuacaccauccccgacaagcucggccccuggucccccaucgacauccaccaccucuccugccccaacaaccucgucgucgaggacgagggcugcaccaaccucuccggcuucuccuacauggagcucaaggucggcuacaucuccgccaucaaggucaacggcuucaccugcaccggcgucgucaccgaggccgagaccuacaccaacuucgucggcuacgucaccaccaccuucaagcgcaagcacuuccgccccacccccgacgccugccgcgccgccuacaacuggaagauggccggcgacccccgcuacgaggagucccuccacaaccccuaccccgacuaccacuggcuccgcaccgucaagaccaccaaggagucccucgucaucaucucccccuccgucgccgaccucgaccccuacgacaagucccuccacucccgcgucuuccucaacggcaagugcuccggcaucaccgucuccuccaccuacugcuccaccaaccacgacuacaccaucuggaugcccgagaacccccgccucggcaccuccugcgacaucuucaccaacucccgcggcaagcgcgccuccaagggcuccaagaccugcggcuucgucgacgagcgcggccucuacaagucccucaagggcgccugcaagcucaagcucugcggcguccucggccuccgccucauggacggcaccugggccgccauccagaccuccgacgagaccaaguggugcccccccgaccagcucgucaaccuccacgacuuccgcuccgacgagaucgagcaccucgucgucgaggagcucgucaagaagcgcgaggagugccucgacgcccucgaguccaucaugaccaccaaguccgucuccuuccgccgccucucccaccuccgcaagcucguccccggcuucggcaaggccuacaccaucuucaacaagacccucauggaggccgacgcccacuacaaguccguccgcaccuggaacgagaucauccccuccaagggcugccuccgcgucggcggccgcugccacccccacgucaacggcgucuucuucaacggcaucauccucggccccgacggccacguccucauccccgagaugcaguccucccuccuccagcagcacgucgagcuccucgaguccuccgucaucccccucaugcacccccucgccgaccccuccaccgucuucaaggacgacgacgaggccgaggacuucgucgagguccaccuccccgacguccacaagcaggucuccggcgucgaccucggccuccccuccuggggcaaguacguccucauguccgccggcguccucaccgcccucaugcucaugaucuuccucaugaccugcugccgccgcgccaaccgcgccgaguccgcccagcacucccucggcgagcgcggccgcaaggucuccgucaccucccaguccggccgcgucgucuccuccugggaguccuacaaguccggcggcgagaccaagcucuga

SEQ ID NO: 127872 - RNA, 1575 nt, Artificial Sequence; identical to SEQ ID NO: 126608
  derived and/or modified CDS sequence (opt2) from glycoprotein__RABV__LC018504.1

SEQ ID NO: 127873 - RNA, 1575 nt, Artificial Sequence
  derived and/or modified CDS sequence (opt2) from glycoprotein__RABV__LC018505.1
augaucccccaggcccuccucuucgucccccuccucgucuucucccucugcuucggcaaguuccccaucuacaccauccccgacaagcucggccccuggucccccaucgacauccaccaccucuccugccccaacaaccucgucgucgaggacgagggcugcaccaaccucuccggcuucuccuacauggagcucaaggucggcuacaucuccgccaucaaggucaacggcuucaccugcaccggcgucgucaccgaggccgagaccuacaccaacuucgucggcuacgucaccaccaccuucaagcgcaagcacuuccgccccacccccgacgccugccgcgccgccuacaacuggaagauggccggcgacccccgcuacgaggagucccuccacaaccccuaccccgacuaccacuggcuccgcaccgucaagaccaccaaggagucccucgucaucaucucccccuccgucgccgaccucgaccccuacgacaagucccuccacucccgcgucuuccccaacggcaagugcuccggcaucaccgucuccuccaccuacugcuccaccaaccacgacuacaccaucuggaugcccgagaacccccgccucggcaccuccugcgacaucuucaccaacucccgcggcaagcgcgccuccaagggcuccaagaccugcggcuucgucgacgagcgcggccucuacaagucccucaagggcgccugcaagcucaagcucugcggcguccucggccuccgccucauggacggcaccugggccgccauccagaccuccgacgagaccaaguggugcccccccgaccagcucgucaaccuccacgacuuccgcuccgacgagaucgagcaccucgucgucgaggagcucgucaagaagcgcgaggagugccucgacgcccucgaguccaucaugaccaccaaguccgucuccuuccgccgccucucccaccuccgcaagcucguccccggcuucggcaaggccuacaccaucuucaacaagacccucauggaggccgacgcccacuacaaguccguccgcaccuggaacgagaucauccccuccaagggcugccuccgcgucggcggccgcugccacccccacgucaacggcgucuucuucaacggcaucauccucggccccgacggccacguccucauccccgagaugcaguccucccuccuccagcagcacauggagcuccucgaguccuccgucaucccccucaugcacccccucgccgaccccuccaccgucuucaaggacgacgacgaggccgaggacuucgucgagguccaccuccccgacguccacaagcaggucuccggcgucgaccucggccuccccuccuggggcaaguacguccucauguccgccggcguccucaccgcccucaugcucaugaucuuccucaugaccugcugccgccgcgccaaccgcgccgaguccgcccagcacucccucggcgagcgcggccgcaaggucuccgucaccucccaguccggccgcgucaucuccuccugggaguccuacaaguccggcggcgagaccaagcucuga

SEQ ID NO: 127874 - RNA, 1575 nt, Artificial Sequence
  derived and/or modified CDS sequence (opt2) from glycoprotein__RABV__LC018506.1
augaucccccaggcccuccucuucgucccccuccucgucuucucccucugcuucggcaaguuccccaucuacaccauccccgacaagcucggccccuggucccccaucgacauccaccaccucuccugccccaacaaccucgucgucgaggacgagggcugcaccaaccucuccggcuucuccuacauggagcucaaggucggcuacaucuccaccaucaaggucaacggcuucaccugcaccggcgucgucaccgaggccgagaccuacaccaacuucgucggcuacgucaccaccaccuucaagcgcaagcacuuccgccccacccccgacgccugccgcgccgccuacaacuggaagauggccggcgacccccgcuacgaggagucccuccacaaccccuaccccgacuaccacuggcuccgcaccgucaagaccaccaaggagucccucgucaucaucucccccuccgucgccgaccucgaccccuacgacaagucccuccacucccgcgucuuccccaacggcaagugcuccggcaucaccgucuccuccaccuacugcuccaccaaccacgacuacaccaucuggaugcccgagaacccccgccucggcaccuccugcgacaucuucaccaacucccgcggcaagcgcgccuccaagggcuccaagaccugcggcuucgucgacgagcgcggccucuacaagucccucaagggcgccugcaagcucaagcucugcggcguccucggccuccgccucauggacggcaccugggccgccauccagaccuccgacgagaccaaguggugcccccccgaccagcucgucaaccuccacgacuuccgcuccgacgagaucgagcaccucgucgucgaggagcucgucaagaagcgcgaggagugccucgacgcccucgaguccaucaugaccaccaaguccgucuccuuccgccgccucucccaccuccgcaagcucguccccggcuucggcaaggccuacaccaucuucaacaagacccucauggaggccgacgcccacuacaaguccguccgcaccuggaacgagaucauccccuccaagggcugccuccgcgucggcggccgcugccacccccacgucaacggcgucuucuucaacggcaucauccucggccccgacggccacguccucauccccgagaugcaguccucccuccuccagcagcacauggagcuccucgaguccuccgucaucccccucaugcacccccucgccgaccccuccaccgucuucaaggacgacgacgaggccgaggacuucgucgagguccaccuccccgacguccacaagcaggucuccggcgucgaccucggccuccccuccuggggcaaguacguccucauguccgccggcguccucaccgcccucaugcucaugaucuuccucaugaccugcugccgccgcgccaaccgcgccgaguccgcccagcacucccucggcgagcgcggccgcaaggucuccgucaccucccaguccggccgcgucaucuccuccugggaguccuacaaguccggcggcgagaccaagcucuga

SEQ ID NO: 127875 - RNA, 1575 nt, Artificial Sequence; identical to SEQ ID NO: 126608
  derived and/or modified CDS sequence (opt2) from glycoprotein__RABV__LC018507.1

SEQ ID NO: 127876 - RNA, 1575 nt, Artificial Sequence; identical to SEQ ID NO: 126631
  derived and/or modified CDS sequence (opt2) from glycoprotein__RABV__LC018508.1

SEQ ID NO: 127877 - RNA, 1575 nt, Artificial Sequence; identical to SEQ ID NO: 126654
  derived and/or modified CDS sequence (opt2) from glycoprotein__RABV__LC018509.1

SEQ ID NO: 127878 - RNA, 1575 nt, Artificial Sequence; identical to SEQ ID NO: 126631
  derived and/or modified CDS sequence (opt2) from glycoprotein__RABV__LC018513.1

SEQ ID NO: 127879 - RNA, 1575 nt, Artificial Sequence; identical to SEQ ID NO: 126631
  derived and/or modified CDS sequence (opt2) from glycoprotein__RABV__LC018514.1

SEQ ID NO: 127880 - RNA, 1575 nt, Artificial Sequence; identical to SEQ ID NO: 126631
  derived and/or modified CDS sequence (opt2) from glycoprotein__RABV__LC018515.1

SEQ ID NO: 127881 - RNA, 1575 nt, Artificial Sequence
  derived and/or modified CDS sequence (opt2) from glycoprotein__RABV__LC018516.1
augaucccccaggcccuccucuucgucccccuccucgucuucucccucugcuucggcaaguuccccaucuacaccauccccgacaagcucggccccuggucccccaucgacauccaccaccucuccugccccaacaaccucgucgucgaggacgagggcugcaccaaccucuccggcuucuccuacauggagcucaaggucggcuacaucuccgccaucaaggucaacggcuucaccugcaccggcgucgucaccgaggccgagaccuacaccaacuucgucggcuacgucaccaccaccuucaagcgcaagcacuuccgccccacccccgacgccugccgcgccgccuacaacuggaagauggccggcgacccccgcuacgaggagucccuccacaaccccuaccccgacuaccacuggcuccgcaccgucaagaccaccaaggagucccucgucaucaucucccccuccgucgccgaccucgaccccuacgacaagucccuccacucccgcgucuuccccuccggcaagugcuccggcaucaccgucuccuccaccuacugcuccaccaaccacgacuacaccaucuggaugcccgagaacccccgccucggcaccuccugcgacaucuucaccaacucccgcggcaagcgcgccuccaagggcuccaagaccugcggcuucgucgacgagcgcggccucuaccgcucccucaagggcgccugcaagcucaagcucugcggcguccucggccuccgccucauggacggcaccugggccgccauccagaccuccgacgagaccaaguggugcccccccgaccagcucgucaaccuccacgacuuccgcuccgacgagaucgagcaccucgucgucgaggagcucgucaagaagcgcgaggagugccucgacgcccucgaguccaucaugaccaccaaguccgucuccuuccgccgccucucccaccuccgcaagcucguccccggcuucggcaaggccuacaccaucuucaacaagacccucauggaggccgacgcccacuacaaguccguccgcaccuggaacgagaucauccccuccaagggcugccuccgcgucggcggccgcugccacccccacgucaacggcgucuucuucaacggcaucauccucggccccgacggccacguccucauccccgagaugcaguccucccuccuccagcagcacauggagcuccucgaguccuccgucaucccccucaugcacccccucgccgaccccuccaccgucuucaaggacgacgacgaggccgaggacuucgucgagguccaccuccccgacguccacaagcaggucuccggcgucgaccucggccuccccuccuggggcaaguacguccucauguccgccggcguccucaccgcccucaugcucaugaucuuccucaugaccugcugccgccgcaccaaccgcgccgaguccgcccagcacucccucggcgagcgcggccgcaaggucuccgucaccucccaguccggccgcgucaucuccuccugggaguccuacaaguccggcggcgagaccaagcucuga

SEQ ID NO: 127882 - RNA, 1575 nt, Artificial Sequence
  derived and/or modified CDS sequence (opt2) from glycoprotein__RABV__LC018517.1
augaucccccaggcccuccucuucgucccccuccucgucuucucccucugcuucggcaaguuccccaucuacaccauccccgacaagcucggccccuggucccccaucgacauccaccaccucuccugccccaacaaccucgucgucgaggacgagggcugcaccaaccucuccggcuucuccuacauggagcucaaggucggcuacaucuccgccaucaaggucaacggcuucaccugcaccggcgucgucaccgaggccgagaccuacaccaacuucgucggcuacgucaccaccaccuucaagcgcaagcacuuccgccccacccccgacgccugccgcgccgccuacaacuggaagauggccggcgacccccgcuacgaggagucccuccacaaccccuaccccgacuaccacuggcuccgcaccgucaagaccaccaaggagucccucgucaucaucucccccuccgucgccgaccucgaccccuacgacaagucccuccacucccgcgucuuccccaacggcaagugcuccggcaucaccgucuccuccaccuacugcuccaccaaccacgacuacaccaucuggaugcccgagaacccccgccucggcaccuccugcgacaucuucaccaacucccgcggcaagcgcgccuccaagggcuccaagaccugcggcuucgucgacgagcgcggccucuacaagucccucaagggcgccugcaagcucaagcucugcggcguccucggccuccgccucauggacggcaccugggccgccauccagaccuccgacgagaccaaguggugcccccccgaccagcucgucaaccuccacgacuuccgcuccgacgagaucgagcaccucgucgucgaggagcucgucaagaagcgcgaggagugccucgacgcccucgaguccaucaugaccaccaaguccgucuccuuccgccgccucucccaccuccgcaagcucguccccggcuucggcaaggccuacaccaucuucaacaagacccucauggaggccgacgcccacuacaaguccguccgcaccuggaacgagaucauccccuccaagggcugccuccgcgucggcggccgcugccacccccacgucaacggcgucuucuucaacggcaucauccucggccccgacggccacguccucauccccgagaugcaguccucccuccuccagcagcacauggagcuccucgaguccuccgucaucccccucaugcacccccucgccgaccccuccaccgucuucaaggacgacgacgaggccgaggacuucgucgagguccaccuccccgacguccacaagcaggucuccggcgucgaccucggccuccccuccuggggcaaguacguccucauguccgccggcgucuccaccgcccucaugcucaugaucuuccucaugaccugcugccgccgcgccaaccgcgccgaguccgcccagcacucccucggcgagcgcggccgcaaggucuccgucaccucccaguccggccgcgucaucuccuccugggaguccuacaaguccggcggcgagaccaagcucuga

SEQ ID NO: 127883 - RNA, 1575 nt, Artificial Sequence; identical to SEQ ID NO: 126607
  derived and/or modified CDS sequence (opt2) from glycoprotein__RABV__LC018518.1

SEQ ID NO: 127884 - RNA, 1575 nt, Artificial Sequence; identical to SEQ ID NO: 126607
  derived and/or modified CDS sequence (opt2) from glycoprotein__RABV__LC018519.1

SEQ ID NO: 127885 - RNA, 1575 nt, Artificial Sequence; identical to SEQ ID NO: 126608
  derived and/or modified CDS sequence (opt2) from glycoprotein__RABV__LC018520.1

SEQ ID NO: 127886 - RNA, 1575 nt, Artificial Sequence
  derived and/or modified CDS sequence (opt2) from glycoprotein__RABV__LC018522.1
augaucccccaggcccuccucuucgucccccuccucgucuucucccucugcuucggcaaguuccccaucuacaccauccccgacaagcucggccccuggucccccaucgacauccaccaccucuccugccccaacaaccucgucgucgaggacgagggcugcaccaaccucuccggcuucuccuacauggagcucaaggucggcuacaucuccgccaucaaggucaacggcuucaccugcaccggcgucgucaccgaggccgagaccuacaccaacuucgucggcuacgucaccaccaccuucaagcgcaagcacuuccgccccacccccgacgccugccgcgccgccuacaacuggaagauggccggcgacccccgcuacgaggagucccuccacaaccccuaccccgacuaccacuggcuccgcaccgucaagaccaccaaggagucccucgucaucaucucccccuccgucgccgaccucgaccccuacgacaagucccuccacucccgcgucuuccccaacggcaagugcuccggcaucaccgucuccuccaccuacugcuccaccaaccacgacuacaccaucuggaugcccgagaacccccgccucggcaccuccugcgacaucuucaccaacucccgcggcaagcgcgccuccaagggcucccgcaccugcggcuucgucgacgagcgcggccucuacaagucccucaagggcgccugcaagcucaagcucugcggcguccucggccuccgccucauggacggcaccugggccgccauccagaccuccgacgagaccaaguggugcccccccgaccagcucgucaaccuccacgacuuccgcuccgacgagaucgagcaccucgucgucgaggagcucgucaagaagcgcgaggagugccucgacgcccucgaguccaucaugaccaccaaguccgucuccuuccgccgccucucccaccuccgcaagcucguccccggcuucggcaaggccuacaccaucuucaacaagacccucauggaggccgacgcccacuacaaguccguccgcaccuggaacgagaucauccccuccaagggcugccuccgcgucggcggccgcugccacccccacgucaacggcgucuucuucaacggcaucauccucggccccgacggccacguccucauccccgagaugcaguccucccuccuccagcagcacauggagcuccucgaguccuccgucaucccccucaugcacccccucgccgaccccuccaccgucuucaaggacgacgacgaggccgaggacuucgucgagguccaccuccccgacguccacaagcaggucuccggcgucgaccucggccuccccuccuggggcaaguacguccucauguccgccggcguccucaccgcccucaugcucaugaucuuccucaugaccugcugccgccgcgccaaccgcgccgaguccgcccagcacucccucggcgagcgcggccgcaaggucuccgucaccucccaguccggccgcgucaucuccuccugggaguccuacaaguccggcggcgagaccaagcucuga

SEQ ID NO: 127887 - RNA, 1575 nt, Artificial Sequence
  derived and/or modified CDS sequence (opt2) from glycoprotein__RABV__LC018523.1
augaucccccaggcccuccucuucgucccccuccucgucuucucccucugcuucggcaaguuccccaucuacaccauccccgacaagcucggccccuggucccccaucgacauccaccaccucuccugccccaacaaccucgucgucgaggacgagggcugcaccaaccucuccggcuucuccuacauggagcucaaggucggcuacaucuccgccaucaaggucaacggcuucaccugcaccggcgucgucaccgaggccgagaccuacaccaacuucgucggcuacgucaccaccaccuucaagcgcaagcacuuccgccccacccccgacgccugccgcgccgccuacaacuggaagauggccggcgacccccgcuacgaggagucccuccacaaccccuaccccgacuaccacuggcuccgcaccgucaagaccaccaaggagucccucgucaucaucucccccuccgucgccgaccucgaccccuacgacaagucccuccacucccgcgucuuccccuccggcaagugcuccggcaucaccgucuccuccaccuacugcuccaccaaccacgacuacaccaucuggaugcccgagaacccccgccucggcaccuccugcgacaucuucaccaacucccgcggcaagcgcgccuccaagggcuccaagaccugcggcuucgucgacgagcgcggccucuacaagucccucaagggcgccugcaagcucaagcucugcggcguccucggccuccgccucauggacggcaccugggccgccauccagaccuccgacgagaccaaguggugcccccccgaccagcucgucaaccuccacgacuuccgcuccgacgagaucgagcaccucgucgucgaggagcucgucaagaagcgcgaggagugccucgacgcccucgaguccaucaugaccaccaaguccgucuccuuccgccgccucucccaccuccgcaagcucguccccggcuucggcaaggccuacaccaucuucaacaagacccucauggaggccgacgcccacuacaaguccguccgcaccuggaacgagaucauccccuccaagggcugccuccgcgucggcggccgcugccacccccacgucaacggcgucuucuucaacggcaucauccucggccccgacggccacguccucauccccgagaugcaguccucccuccuccagcagcacauggagcuccucgaguccuccgucaucccccucaugcacccccucgccgaccccuccaccgucuucaaggacgacgacgaggccgaggacuucgucgagguccaccuccccgacguccacaagcaggucuccggcgucgaccucggccuccccuccuggggcaaguacguccucauguccgccggcauccucaccgcccucaugcucaugaucuuccucaugaccugcugccgccgcgccaaccgcgucgaguccgcccagcacucccucggcgagcgcggccgcaaggucuccgucaccucccaguccggccgcgucaucuccuccugggaguccuacaaguccggcggcgagaccaagcucuga

SEQ ID NO: 127888 - RNA, 1575 nt, Artificial Sequence; identical to SEQ ID NO: 126607
  derived and/or modified CDS sequence (opt2) from glycoprotein__RABV__LC018524.1

SEQ ID NO: 127889 - RNA, 1575 nt, Artificial Sequence
  derived and/or modified CDS sequence (opt2) from glycoprotein__RABV__LC018525.1
augaucccccaggcccuccucuucgucccccuccucgucuucucccucugcuucggcaaguuccccaucuacaccauccccgacaagcucggccccuggucccccaucgacauccaccaccucuccugccccaacaaccucgucgucgaggacgagggcugcaccaaccucuccggcuucuccuacauggagcucaaggucggcuacaucuccgccaucaaggucaacggcuucaccugcaccggcgucgucaccgaggccgagaccuacaccaacuucgucggcuacgucaccaccaccuucaagcgcaagcacuuccgccccacccccgacgccugccgcgccgccuacaacuggaagauggccggcgacccccgcuacgaggagucccuccacaaccccuaccccgacuaccacuggcuccgcaccgucaagaccaccaaggagucccucgucaucaucucccccuccgucgccgaccucgaccccuacgacaagucccuccacucccgcgucuuccccuccggcaagugcuccggcaucaccgucuccuccaccuacugcuccaccaaccacgacuacaccaucuggaugcccgagaacccccgccucggcaccuccugcgacaucuucaccaacucccgcggcaagcgcgccuccaagggcuccaagaccugcggcuucgucgacgagcgcggccucuacaagucccucaagggcgccugcaagcucaagcucugcggcguccucggccuccgccucauggacggcaccugggccgccauccagaccuccgacgagaccaaguggugcccccccgaccagcucgucaaccuccacgacuuccgcuccgacgagaucgagcacuucgucgucgaggagcucgucaagaagcgcgaggagugccucgacgcccucgaguccaucaucaccaccaaguccgucuccuuccgccgccucucccaccuccgcaagcucguccccggcuucggcaaggccuacaccaucuucaacaagacccucauggaggccgacgcccacuacaaguccguccgcaccuggaacgagaucauccccuccaagggcugccuccgcgucggcggccgcugccacccccacgucaacggcgucuucuucaacggcaucauccucggccccgacggccacguccucauccccgagaugcaguccucccuccuccagcagcacauggagcuccucgaguccuccgucaucccccucaugcacccccucgccgaccccuccaccgucuucaaggacgacgacgaggccgaggacuucgucgagguccaccuccccgacguccacaagcaggucuccggcgucgaccucggccuccccuccuggggcaaguacguccucauguccgccggcguccucaccgcccucaugcucaugaucuuccucaugaccugcugccgccgcgccaaccgcgccgaguccgcccagcacucccucggcgagcgcggccgcaaggucuccgucaccucccaguccggccgcgucaucuccuccugggaguccuacaaguccggcggcgagaccaagcucuga

SEQ ID NO: 127890 - RNA, 1575 nt, Artificial Sequence
  derived and/or modified CDS sequence (opt2) from glycoprotein__RABV__LC018526.1
augaucccccaggcccuccucuucgucccccucauggucuucucccucugcuucggcaaguuccccaucuacaccauccccgacaagcucggccccuggucccccaucgacauccaccaccucuccugccccaacaaccucgucgucgaggacgagggcugcaccaaccucuccggcuucuccuacauggagcucaaggucggcuacaucuccgccaucaaggucaacggcuucaccugcaccggcgucgucaccgaggccgagaccuacaccaacuucgucggcuacgucaccaccaccuucaagcgcaagcacuuccgccccacccccgacgccugccgcgccgccuacaacuggaagauggccggcgacccccgcuacgaggagucccuccacaaccccuaccccgacuaccacuggcuccgcaccgucaagaccaccaaggagucccucgucaucaucucccccuccgucgccgaccucgaccccuacgacaagucccuccacucccgcgucuuccccuccggcaagugcuccggcaucaccgucuccuccaccuacugcuccaccaaccacgacuacaccaucuggaugcccgagaacccccgccucggcaccuccugcgacaucuucaccaacucccgcggcaagcgcgccuccaagggcuccaagaccugcggcuucgucgacgagcgcggccucuacaagucccucaagggcgccugcaagcucaagcucugcggcguccucggccuccgccucauggacggcaccugggccgccauccagaccuccgacgagaccaaguggugcccccccgaccagcucgucaaccuccacgacuuccgcuccgacgagaucgagcaccucgucgucgaggagcucgucaagaagcgcgaggagugccucgacgcccucgaguccaucaugaccaccaaguccgucuccuuccgccgccucucccaccuccgcaagcucguccccggcuucggcaaggccuacaccaucuucaacaagacccucauggaggccgacgcccacuacaaguccguccgcaccuggaacgagaucauccccuccaagggcugccuccgcgucggcggccgcugccacccccacgucaacggcgucuucuucaacggcaucauccucggccccgacggccacguccucauccccgagaugcaguccucccuccuccagcagcacauggagcuccucgaguccuccgucaucccccucaugcacccccucgccgaccccuccaccgucuucaaggacgacgacgaggccgaggacuucgucgagguccaccuccccgacguccacaagcaggucuccggcgucgaccucggccuccccuccuggggcaaguacguccucauguccgccggcguccucaccgcccucaugcucaugaucuuccucaugaccugcugccgccgcaccaaccgcgccgaguccgcccagcacucccucggcgagcgcggccgcaaggucuccgucaccucccaguccggccgcgucaucuccuccugggaguccuacaaguccggcggcgagaccaagcucuga

SEQ ID NO: 127891 - RNA, 1575 nt, Artificial Sequence
  derived and/or modified CDS sequence (opt2) from glycoprotein__RABV__LC018527.1
augaucccccaggcccuccucuucgucccccuccucgucuucucccucugcuucggcaaguuccccaucuacaccauccccgacaagcucggccccuggucccccaucgacauccaccaccucuccugccccaacaaccucaucgucgaggacgagggcugcaccaaccucuccggcuucuccuacauggagcucaaggucggcuacaucuccgccaucaaggucaacggcuucaccugcaccggcgucgucaccgaggccgagaccuacaccaacuucgucggcuacgucaccaccaccuucaagcgcaagcacuuccgccccacccccgacgccugccgcgccgccuacaacuggaagauggccggcgacccccgcuacgaggagucccuccacaaccccuaccccgacuaccacuggcuccgcaccgucaagaccaccaaggagucccucgucaucaucucccccuccgucgccgaccucgaccccuacgacaagucccuccacucccgcgucuuccccuccggcaagugcuccggcaucaccgucuccuccaccuacugcuccaccaaccacgacuacaccaucuggaugcccgagaacccccgccucggcaccuccugcgacaucuucaccaacucccgcggcaagcgcgccuccaagggcuccaagaccugcggcuucgucgacgagcgcggccucuacaagucccucaagggcgccugcaagcucaagcucugcggcguccucggccuccgccucauggacggcaccugggccgccauccagaccuccgacgagaccaaguggugcccccccgaccagcucgucaaccuccacgacuuccgcuccgacgagaucgagcaccucgucgucgaggagcucgucaagaagcgcgaggagugccucgacgcccucgaguccaucaugaccaccaaguccgucuccuuccgccgccucucccaccuccgcaagcucguccccggcuucggcaaggccuacaccaucuucaacaagacccucauggaggccgacgcccacuacaaguccguccgcaccuggaacgagaucauccccuccaagggcugccuccgcgucggcggccgcugccacccccacgucaacggcgucuucuucaacggcaucauccucggccccgacggccacguccucauccccgagaugcaguccucccuccuccagcagcacauggagcuccucgaguccuccgucaucccccucaugcacccccucgccgaccccuccaccgucuucaaggacgacgacgaggccgaggacuucgucgagguccaccuccccgacguccacaagcaggucuccggcgucgaccucggccuccccuccuggggcaaguacguccucauguccgccggcguccucaccgcccucaugcucaugaucuuccucaugaccugcugccgccgcaccaaccgcgccgaguccgcccagcacucccucggcgagcgcggccgcaaggucuccgucaccucccaguccggccgcgucaucuccuccugggaguccuacaaguccggcggcgagaccaagcucuga

SEQ ID NO: 127892 - RNA, 1575 nt, Artificial Sequence; identical to SEQ ID NO: 126631
  derived and/or modified CDS sequence (opt2) from glycoprotein__RABV__LC018529.1

SEQ ID NO: 127893 - RNA, 1575 nt, Artificial Sequence; identical to SEQ ID NO: 126631
  derived and/or modified CDS sequence (opt2) from glycoprotein__RABV__LC018531.1

SEQ ID NO: 127894 - RNA, 1575 nt, Artificial Sequence; identical to SEQ ID NO: 126607
  derived and/or modified CDS sequence (opt2) from glycoprotein__RABV__LC018532.1

SEQ ID NO: 127895 - RNA, 1575 nt, Artificial Sequence; identical to SEQ ID NO: 126631
  derived and/or modified CDS sequence (opt2) from glycoprotein__RABV__LC018534.1

SEQ ID NO: 127896 - RNA, 1575 nt, Artificial Sequence; identical to SEQ ID NO: 126631
  derived and/or modified CDS sequence (opt2) from glycoprotein__RABV__LC018535.1

SEQ ID NO: 127897 - RNA, 1575 nt, Artificial Sequence; identical to SEQ ID NO: 126607
  derived and/or modified CDS sequence (opt2) from glycoprotein__RABV__LC018536.1

SEQ ID NO: 127898 - RNA, 1575 nt, Artificial Sequence; identical to SEQ ID NO: 126631
  derived and/or modified CDS sequence (opt2) from glycoprotein__RABV__LC018539.1

SEQ ID NO: 127899 - RNA, 1575 nt, Artificial Sequence
  derived and/or modified CDS sequence (opt2) from glycoprotein__RABV__LC018540.1
augaucccccaggcccuccucuucgucccccuccucgucuucucccucugcuucggcaaguuccccaucuacaccauccccgacaagcucggccccuggucccccaucgacauccaccaccucuccugccccaacaaccucgucgucgaggacgagggcugcaccaaccucuccggcuucuccuacauggagcucaaggucggcuacaucuccgccaucaaggucaacggcuucaccugcaccggcgucgucaccgaggccgagaccuacaccaacuucgucggcuacgucaccaccaccuucaagcgcaagcacuuccgccccacccccgacgccugccgcgccgccuacaacuggaagauggccggcgacccccgcuacgaggagucccuccacaaccccuaccccgacuaccacuggcuccgcaccgucaagaccaccaaggagucccucgucaucaucucccccuccgucgccgaccucgaccccuacgaccgcucccuccacucccgcgucuuccccuccggcaagugcuccggcaucaccgucuccuccaccuacugcuccaccaaccacgacuacaccaucuggaugcccgagaacccccgccucggcaccuccugcgacaucuucaccaacucccgcggcaagcgcgccuccaagggcuccaagaccugcggcuucgucgacgagcgcggccucuacaagucccucaagggcgccugcaagcucaagcucugcggcguccucggccuccgccucauggacggcaccugggccgccauccagaccuccgacgagaccaaguggugcccccccgaccagcucgucaaccuccacgacuuccgcuccgacgagaucgagcaccucgucgucgaggagcucgucaagaagcgcgaggagugccucgacgcccucgaguccaucaugaccaccaaguccgucuccuuccgccgccucucccaccuccgcaagcucguccccggcuucggcaaggccuacaccaucuucaacaagacccucauggaggccgacgcccacuacaaguccguccgcaccuggaacgagaucauccccuccaagggcugccuccgcgucggcggccgcugccacccccacgucaacggcgucuucuucaacggcaucauccucggccccgacggccacguccucauccccgagaugcaguccucccuccuccagcagcacauggagcuccucgaguccuccgucaucccccucaugcacccccucgccgaccccuccaccgucuucaaggacgacgacgaggccgaggacuucgucgagguccaccuccccgacguccacaagcaggucuccggcgucgaccucggccuccccuccuggggcaaguacguccucauguccgccggcguccucaccgcccucaugcucaugaucuuccucaugaccugcugccgccgcgccaaccgcgucgaguccgcccagcacucccucggcgagcgcggccgcaaggucuccgucaccucccaguccggccgcgucaucuccuccugggaguccuacaaguccggcggcgagaccaagcucuga

SEQ ID NO: 127900 - RNA, 1575 nt, Artificial Sequence
  derived and/or modified CDS sequence (opt2) from glycoprotein__RABV__LC018542.1
augaucccccaggcccuccucuucgucccccuccucgucuucucccucugcuucggcaaguuccccaucuacaccauccccgacaagcucggccccuggucccccaucgacauccaccaccucuccugccccaacaaccucgucgucgaggacgagggcugcaccaaccucuccggcuucuccuacauggagcucaaggucggcuacaucuccgccaucaaggucaacggcuucaccugcaccggcgucgucaccgaggccgagaccuacaccaacuucgucggcuacgucaccaccaccuucaagcgcaagcacuuccgccccacccccgacgccugccgcgccgccuacaacuggaagauggccggcgacccccgcuacgaggagucccuccacaaccccuaccccgacuaccacuggcuccgcaccgucaagaccaccaaggagucccucgucaucaucucccccuccgucgccgaccucgaccccuacgacaagucccuccacucccgcgucuuccccuccggcaagugcuccggcaucaccgucuccuccaccuacugcuccaccaaccacgacuacaccaucuggaugcccgagaacccccgccucggcaccuccugcgacaucuucaccuccucccgcggcaagcgcgccuccaagggcuccaagaccugcggcuucgucgacgagcgcggccucuacaagucccucaagggcgccugcaagcucaagcucugcggcguccucggccuccgccucauggacggcaccugggccgccauccagaccuccgacgagaccaaguggugcccccccgaccagcucgucaaccuccacgacuuccgcuccgacgagaucgagcaccucgucgucgaggagcucgucaagaagcgcgaggagugccucgacgcccucgaguccaucaugaccaccaaguccgucuccuuccgccgccucucccaccuccgcaagcucguccccggcuucggcaaggccuacaccaucuucaacaagacccucauggaggccgacgcccacuacaaguccguccgcaccuggaacgagaucauccccuccaagggcugccuccgcgucggcggccgcugccacccccacgucaacggcgucuucuucaacggcaucauccucggccccgacggccacguccucauccccgagaugcaguccucccuccuccagcagcacauggagcuccucgaguccuccgucaucccccucaugcacccccucgccgaccccuccaccgucuucaaggacgacgacgaggccgaggacuucgucgagguccaccuccccgacguccacaagcaggucuccggcgucgaccucggccuccccuccuggggcaaguacguccucauguccgccggcguccucaccgcccucaugcucaugaucuuccucaugaccugcugccgccgcgccaaccgcgucgaguccgcccagcacucccucggcgagcgcggccgcaaggucuccgucaccucccaguccggccgcgucaucuccuccugggaguccuacaaguccggcggcgagaccaagcucuga

SEQ ID NO: 127901 - RNA, 1575 nt, Artificial Sequence
  derived and/or modified CDS sequence (opt2) from glycoprotein__RABV__LC018544.1
augaucccccaggcccuccucuucgucccccuccucgucuucucccucugcuucggcaaguuccccaucuacaccauccccgacaagcucggccccuggucccccaucgacauccaccaccucuccugccccaacaaccucgucgucgaggacgagggcugcaccaaccucuccggcuucuccuacauggagcucaaggucggcuacaucuccgccaucaaggucaacggcuucaccugcaccggcgucgucaccgaggccgagaccuacaccaacuucgucggcuacgucaccaccaccuucaagcgcaagcacuuccgccccacccccgacgccugccgcgccgccuacaacuggaagauggccggcgacccccgcuacgaggagucccuccacaaccccuaccccgacuaccacuggcuccgcaccgucaagaccaccaaggagucccucgucaucaucucccccuccgucgccgaccucgaccccuacgacaagucccuccacucccgcgucuuccccuccggcaagugcuccggcaucaccgucuccuccaccuacugcuccaccaaccacgacuacaccaucuggaugcccgagaacccccgccucggcaccuccugcgacaucuucaccaacucccgcggcaagcgcgccuccaagggcuccaagaccugcggcuucgucgacgagcgcggccucuacaagucccucaagggcgccugcaagcucaagcucugcggcguccucggccuccgccucauggacggcaccugggccgccauccagaccuccgacgagaccaaguggugcccccccgaccagcucgucaaccuccacgacuuccgcuccgacgagaucgagcaccucgucgucgaggagcucgucaagaagcgcgaggagugccucgacgcccucgaguccaucaugaccaccaaguccgucuccuuccgccgccucucccaccuccgcaagcucguccccggcuucggcaaggccuacaccaucuucaacaagacccucauggaggccgacgcccacuacaaguccguccgcaccuggaacgagaucauccccuccaagggcugccuccgcgucggcggccgcugccacccccacgucaacggcgucuucuucaacggcaucauccucggccccgacggccacguccucauccccgagaugcaguccucccuccuccagcagcacauggagcuccucgaguccuccgucaucccccucaugcacccccucgccgaccccuccaccgucuucaaggacgacgacgaggccgaggacuucgucgagguccaccuccccgacguccacaagcaggucuccggcgucgaccucggccuccccuccuggggcaaguacguccucauguccgccggcguccucaccgcccucaugcucaugaucuuccucaugaccugcugccgccgcgccaacaucgucgaguccgcccagcacucccucggcgagcgcggccgcaaggucuccgucaccucccaguccggccgcgucaucuccuccugggaguccuacaaguccggcggcgagaccaagcucuga

SEQ ID NO: 127902 - RNA, 1575 nt, Artificial Sequence
  derived and/or modified CDS sequence (opt2) from glycoprotein__RABV__LC018545.1
augaucccccaggcccuccucuucgucccccuccucgucuucucccucugcuucggcaaguuccccaucuacaccauccccgacaagcucggccccuggucccccaucgacauccaccaccucuccugccccaacaaccucgucgucgaggacgagggcugcaccaaccucuccggcuucuccuacauggagcucaaggucggcuacaucuccgccaucaaggucaacggcuucaccugcaccggcgucgucaccgaggccgagaccuacaccaacuucgucggcuacgucaccaccaccuucaagcgcaagcacuuccgccccacccccgacgccugccgcgccgccuacaacuggaagauggccggcgacccccgcuacgaggagucccuccacaaccccuaccccgacuaccacuggcuccgcaccgucaagaccaccaaggagucccucgucaucaucucccccuccgucgccgaccucgaccccuacgacaagucccuccacucccgcgucuuccccuccggcaagugcuccggcaucaccgucuccuccaccuacugcuccaccaaccacgacuacaccaucuggaugcccgagaacccccgccucggcaccuccugcgacaucuucaccaacucccgcggcaagcgcgccuccaagggcuccaagaccugcggcuucgucgacgagcgcggccucuacaagucccucaagggcgccugcaagcucaagcucugcggcguccucggccuccgccucauggacggcaccugggccgccauccagaccuccgacgagaccaaguggugcccccccgaccagcucgucaaccuccacgacuuccgcuccgacgagaucgagcaccucgucgucgaggagcucgucaagaagcgcgaggagugccucgacgcccucgaguccaucaugaccaccaaguccgucuccuuccgccgccucucccaccuccgcaagcucguccccggcuucggcaaggccuacaccaucuucaacaagacccucauggaggccgacgcccacuacaaggccguccgcaccuggaacgagaucauccccuccaagggcugccuccgcgucggcggccgcugccacccccacgucaacggcgucuucuucaacggcaucauccucggccccgacggccacguccucauccccgagaugcaguccucccuccuccagcagcacauggagcuccucgaguccuccgucaucccccucaugcacccccucgccgaccccuccaccgucuucaaggacgacgacgaggccgaggacuucgucgagguccaccuccccgacguccacaagcaggucuccggcgucgaccucggccuccccuccuggggcaaguacguccucauguccgccggcguccucaccgcccucaugcucaugaucuuccucaugaccugcugccgccgcgccaaccgcgccgaguccgcccagcacucccucggcgagcgcggccgcaaggucuccgucaccucccaguccggccgcgucaucuccuccugggaguccuacaaguccggcggcgagaccaagcucuga

SEQ ID NO: 127903 - RNA, 1575 nt, Artificial Sequence
  derived and/or modified CDS sequence (opt2) from glycoprotein__RABV__LC018546.1
augaucccccaggcccuccucuucgucccccuccucgucuccucccucugcuucggcaaguuccccaucuacaccauccccgacaagcucggccccuggucccccaucgacauccaccaccucuccugccccaacaaccucgucgucgaggacgagggcugcaccaaccucuccggcuucuccuacauggagcucaaggucggcuacaucuccgccaucaaggucaacggcuucaccugcaccggcgucgucaccgaggccgagaccuacaccaacuucgucggcuacgucaccaccaccuucaagcgcaagcacuuccgccccacccccgacgccugccgcgccgccuacaacuggaagauggccggcgacccccgcuacgaggagucccuccacaaccccuaccccgacuaccacuggcuccgcaccgucaagaccaccaaggagucccucgucaucaucucccccuccgucgccgaccucgaccccuacgacaagucccuccacucccgcgucuuccccuccggcaagugcuccggcaucaccgucuccuccaccuacugcuccaccaaccacgacuacaccaucuggaugcccgagaacccccgccucggcaccuccugcgacaucuucaccaacucccgcggcaagcgcgccuccaagggcuccaagaccugcggcuucgucgacgagcgcggccucuacaagucccucaagggcgccugcaagcucaagcucugcggcguccucggccuccgccucauggacggcaccugggccgccauccagaccuccgacgagaccaaguggugcccccccgaccagcucgucaaccuccacgacuuccgcuccgacgagaucgagcaccucgucgucgaggagcucgucaagaagcgcgaggagugccucgacgcccucgaguccaucaugaccaccaaguccgucuccuuccgccgccucucccaccuccgcaagcucguccccggcuucggcaaggccuacaccaucuucaacaagacccucauggaggccgacgcccacuacaaguccguccgcaccuggaacgagaucauccccuccaagggcugccuccgcgucggcggccgcugccacccccacgucaacggcgucuucuucaacggcaucauccucggccccgacggccacguccucauccccgagaugcaguccucccuccuccagcagcacauggagcuccucgaguccuccgucaucccccucaugcacccccucgccgaccccuccaccgucuucaaggacgacgacgaggccgaggacuucgucgagguccaccuccccgacguccacaagcaggucuccggcgucgaccucggccuccccuccuggggcaaguacguccucaccuccgccggcguccucaccgcccucaugcucaugaucuuccucaugaccugcugccgcaaggccaaccgcgccgaguccgcccagcacucccucggcgagcgcggccgcaaggucuccgucaccucccaguccggccgcgucaucuccuccugggaguccuacaaguccggcggcgagaccaagcucuga

SEQ ID NO: 127904 - RNA, 1575 nt, Artificial Sequence
  derived and/or modified CDS sequence (opt2) from glycoprotein__RABV__LC018548.1
augaucccccaggcccuccucuucgucccccuccucgucuucucccucugcuucggcaaguuccccaucuacaccauccccgacaagcucggccccuggucccccaucgacauccaccaccucuccugccccaacaaccucgucgucgaggacgagggcugcaccaaccucuccggcuucuccuacauggagcucaaggucggcuacaucuccgccaucaaggucaacggcuucaccugcaccggcgucgucaccgaggccgagaccuacaccaacuucgucggcuacgucaccaccaccuucaagcgcaagcacuuccgccccacccccgacgccugccgcgccgccuacaacuggaagauggccggcgacccccgcuacgaggagucccuccacaaccccuaccccgacuaccacuggcuccgcaccgucaagaccaccaaggagucccucgucaucaucucccccuccgucgccgaccucgaccccuacgacaagucccuccacucccgcgucuuccccuccggcaagugcuccggcaucaccgucuccuccaccuacugcuccaccaaccacgacuacaccaucuggaugcccgagaacccccgccucggcaccuccugcgacaucuucaccaacucccgcggcaagcgcgccuccaagggcuccaagaccugcggcuucgucgacgagcgcggccucuacaagucccucaagggcgccugcaagcucaagcucugcggcguccccggccuccgccucauggacggcaccugggccgccauccagaccuccgacgagaccaaguggugcccccccgaccagcucgucaaccuccacgacuuccgcuccgacgagaucgagcaccucgucgucgaggagcucgucaagaagcgcgaggagugccucgacgcccucgaguccaucaugaccaccaaguccgucuccuuccgccgccucucccaccuccgcaagcucguccccggcuucggcaaggccuacaccaucuucaacaagacccucauggaggccgacgcccacuacaaguccguccgcaccuggaacgagaucauccccuccaagggcugccuccgcgucggcggccgcugccacccccacgucaacggcgucuucuucaacggcaucauccucggccccgacggccacguccucauccccgagaugcaguccucccuccuccagcagcacauggagcuccucgaguccuccgucaucccccucaugcacccccucgccgaccccuccaccgucuucaaggacgacgacgaggccgaggacuucgucgagguccaccuccccgacguccacaagcaggucuccggcgucgaccucggccuccccuccuggggcaaguacguccucauguccgccggcguccucaccgcccucaugcucaugaucuuccucaugaccugcugccgccgcgccaaccgcgccgaguccgcccagcacucccucggcgagcgcggccgcaaggucuccgucaccucccaguccggccgcgucaucuccuccugggaguccuacaaguccggcggcgagaccaagcucuga

SEQ ID NO: 127905 - RNA, 1575 nt, Artificial Sequence; identical to SEQ ID NO: 126607
  derived and/or modified CDS sequence (opt2) from glycoprotein__RABV__LC018549.1

SEQ ID NO: 127906 - RNA, 1575 nt, Artificial Sequence; identical to SEQ ID NO: 127873
  derived and/or modified CDS sequence (opt2) from glycoprotein__RABV__LC018552.1

SEQ ID NO: 127907 - RNA, 1575 nt, Artificial Sequence; identical to SEQ ID NO: 126608
  derived and/or modified CDS sequence (opt2) from glycoprotein__RABV__LC018553.1

SEQ ID NO: 127908 - RNA, 1575 nt, Artificial Sequence
  derived and/or modified CDS sequence (opt2) from glycoprotein__RABV__LC018554.1
augaucccccaggcccuccucuucgucccccuccucgucuucucccucugcuucggcaaguuccccaucuacaccauccccgacaagcucggccccuggucccccaucgacauccaccaccucuccugccccaacaaccucgucgucgaggacgagggcugcaccaaccucuccggcuucuccuacauggagcucaaggucggcuacaucuccgccaucaaggucaacggcuucaccugcaccggcgucgucaccgaggccgagaccuacaccaacuucgucggcuacgucaccaccaccuucaagcgcaagcacuuccgccccacccccgacgccugccgcgccgccuacaacuggaagauggccggcgacccccgcuacgaggagucccuccacaaccccuaccccgacuaccacuggcuccgcaccgucaagaccaccaaggagucccucgucaucaucucccccuccgucgccgaccucgaccccuacgacaagucccuccacucccgcgucuuccccuccggcaagugcuccggcaucaccgucuccuccaccuacugcuccaccaaccacgacuacaccaucuggaugcccgagaacccccgccucggcaccuccugcgacaucuucaccaacucccgcggcaagcgcgccuccaagggcuccaagaccugcggcuucgucgacgagcgcggccucuacaagucccucaagggcgccugcaagcucaagcucugcggcguccucggccuccgccucauggacggcaccugggccgccauccagaccuccgacgagaccaaguggugcccccccgaccagcucgucaaccuccacgacuuccgcuccgacgagaucgagcaccucgucgucgaggagcucgucaagaagcgcgaggagugccucgacgcccucgaguccaucaugaccaccaaguccgucuccuuccgccgccucucccaccuccgcaagcucguccccggcuucggcaaggccuacaccaucuucaacaagacccucauggaggccgacgcccacuacaaguccguccgcaccuggaacgagaucauccccuccaagggcugccuccgcgucggcggccgcugccacccccacgucaacggcgucuucuucaacggcaucauccucggccccgacggccacguccucauccccgagaugcaguccucccuccuccagcagcacauggagcuccucgaguccuccgucaucccccucaugcacccccucgccgaccccuccaccgucuucaaggacgacgacgaggccgaggacuucgucgagguccaccuccccgacguccacaagcaggucuccggcgucgaccucggcuuccccuccuggggcaaguacguccucauguccgccggcguccucaccucccucaugcucaugaucuuccucaugaccugcugccgccgcgccaaccgcgucgaguccgcccagcacucccucggcgagcgcggccgcaaggucuccgucaccucccaguccggccgcgucaucuccuccugggaguccuacaaguccggcggcgagaccaagcucuga

SEQ ID NO: 127909 - RNA, 1575 nt, Artificial Sequence
  derived and/or modified CDS sequence (opt2) from glycoprotein__RABV__LC018555.1
augaucccccaggcccuccucuucgucccccuccucgucuucucccucugcuucggcaaguuccccaucuacaccauccccgacaagcucggccccuggucccccaucgacauccaccaccucuccugccccaacaaccucgucgucgaggacgagggcugcaccaaccucuccggcuucuccuacauggagcucaaggucggcuacaucuccgccaucaaggucaacggcuucaccugcaccggcgucgucaccgaggccgagaccuacaccaacuucgucggcuacgucaccaccaccuucaagcgcaagcacuuccgccccacccccgacgccugccgcgccgccuacaacuggaagauggccggcgacccccgcuacgaggagucccuccacaaccccuaccccgacuaccacuggcuccgcaccgucaagaccaccaaggagucccucgucaucaucucccccuccgucgccgaccucgaccccuacgacaagucccuccacucccgcgucuuccccuccggccgcugcuccggcaucaccgucuccuccaccuacugcuccaccaaccacgacuacaccaucuggaugcccgagaacccccgccucggcaccuccugcgacaucuucaccaacucccgcggcaagcgcgccuccaagggcuccaagaccugcggcuucgucgacgagcgcggccucuacaagucccucaagggcgccugcaagcucaagcucugcggcguccucggccuccgccucauggacggcaccugggccgccauccagaccuccgacgagaccaaguggugcccccccgaccagcucgucaaccuccacgacuuccgcuccgacgagaucgagcaccucgucgucgaggagcucgucaagaagcgcgaggagugccucgacgcccucgaguccaucaugaccaccaaguccgucuccuuccgccgccucucccaccuccgcaagcucguccccggcuucggcaaggccuacaccaucuucaacaagacccucauggaggccgacgcccacuacaaguccguccgcaccuggaacgagaucauccccuccaagggcugccuccgcgucggcggccgcugccacccccacgucaacggcgucuucuucaacggcaucauccucggccccgacggccacguccucauccccgagaugcaguccucccuccuccagcagcacauggagcuccucgaguccuccgucaucccccucaugcacccccucgccgaccccuccaccgucuucaaggacgacgacgaggccgaggacuucgucgagguccaccuccccgacguccacaagcaggucuccggcgucgaccucggccuccccuccuggggcaaguacguccucauguccgccggcguccucaccgcccucaugcucaugaucuuccucaugaccugcugccgccgcgccaaccgcgccgaguccgcccagcacucccucggcgagcgcggccgcaaggucuccgucaccucccaguccggccgcgucaucuccuccugggaguccuacaaguccggcggcgagaccaagcucuga

SEQ ID NO: 127910 - RNA, 1575 nt, Artificial Sequence; identical to SEQ ID NO: 126608
  derived and/or modified CDS sequence (opt2) from glycoprotein__RABV__LC018556.1

SEQ ID NO: 127911 - RNA, 1575 nt, Artificial Sequence
  derived and/or modified CDS sequence (opt2) from glycoprotein__RABV__LC018557.1
augaucccccaggcccuccucuucgucccccuccucgucuucucccucugcuucggcaaguuccccaucuacaccauccccgacaagcucggccccuggucccccaucgacauccaccaccucuccugccccaacaaccucgucgucgaggacgagggcugcaccaaccucuccggcuucuccuacauggagcucaaggucggcuacaucuccgccaucaaggucaacggcuucaccugcaccggcgucgucaccgaggccgagaccuacaccaacuucgucggcuacgucaccaccaccuucaagcgcaagcacuuccgccccacccccgacgccugccgcgccgccuacaacuggaagauggccggcgacccccgcuacgaggagucccuccacaaccccuaccccgacuaccacuggcuccgcaccgucaagaccaccaaggagucccucgucaucaucucccccuccgucgccgaccucgaccccuacgacaagucccuccacucccgcgucuuccccuccggcaagugcuccggcaucaccgucuccuccaccuacugcuccaccaaccacgacuacaccaucuggaugcccgagaacccccgccucggcaccuccugcgacaucuucaccaacucccgcggcaagcgcgccuccaagggcuccaagaccugcggcuucgucgacgagcgcggccucuacaagucccucaagggcgccugcaagcucaagcucugcggcguccucggccuccgccucauggacggcaccugggccgccauccagaccuccgacgagaccaaguggugcccccccgaccagcucgucaaccuccacgacuuccgcuccgacgagaucgagcaccucgucgucgaggagcucgucaagaagcgcgaggagugccucgacgcccucgaguccaucaugaccaccaaguccgucuccuuccgccgccucucccaccuccgcaagcucguccccggcuucggcaaggccuacaccaucuucaacaagacccucauggaggccgacgcccacuacaaguccguccgcaccuggaacgagaucauccccuccaagggcugccuccgcgucggcggccgcugccacccccacgucaacggcgucuucuucaacggcaucauccucggccccgacggccacguccucauccccgagaugcaguccucccuccuccagcagcacauggagcuccucgaguccuccgucaucccccucaugcacccccucgccgaccccuccaccgucuucaaggacgacgacgaggccgaggacuucgucgagguccaccuccccgacguccacaagcaggucuccggcgucgaccucggccuccccuccuggggcaaguacguccucauguccgccugcguccucaccgcccucaugcucaugaucuuccucaugaccugcugccgccgcgccaaccgcgccgaguccgcccagcacucccucggcgagcgcggccgcaaggucuccgucaccucccaguccggccgcgucaucuccuccugggaguccuacaaguccggcggcgagaccaagcucuga

SEQ ID NO: 127912 - RNA, 1575 nt, Artificial Sequence; identical to SEQ ID NO: 126631
  derived and/or modified CDS sequence (opt2) from glycoprotein__RABV__LC018558.1

SEQ ID NO: 127913 - RNA, 1575 nt, Artificial Sequence; identical to SEQ ID NO: 126631
  derived and/or modified CDS sequence (opt2) from glycoprotein__RABV__LC018561.1

SEQ ID NO: 127914 - RNA, 1575 nt, Artificial Sequence; identical to SEQ ID NO: 126631
  derived and/or modified CDS sequence (opt2) from glycoprotein__RABV__LC018562.1

SEQ ID NO: 127915 - RNA, 1575 nt, Artificial Sequence; identical to SEQ ID NO: 126631
  derived and/or modified CDS sequence (opt2) from glycoprotein__RABV__LC018564.1

SEQ ID NO: 127916 - RNA, 1575 nt, Artificial Sequence
  derived and/or modified CDS sequence (opt2) from glycoprotein__RABV__LC018565.1
augaucccccaggcccuccucuucgucccccuccucgucuucucccucugcuucggcaaguuccccaucuacaccauccccgacaagcucggccccuggucccccaucgacauccaccaccucuccugccccaacaaccucgucgucgaggacgagggcugcaccaaccucuccggcuucuccuacauggagcucaaggucggcuacaucuccgccaucaaggucaacggcuucaccugcaccggcgucgucaccgaggccgagaccuacaccaacuucgucggcuacgucaccaccaccuucaagcgcaagcacuuccgccccacccccgacgccugccgcgccgccuacaacuggaagauggccggcgacccccgcuacgaggagucccuccacaaccccuaccccgacuaccacuggcuccgcaccgucaagaccaccaaggagucccucgucaucaucucccccuccgucgccgaccucgaccccuacgacaagucccuccacucccgcgucuuccccuccggcaagugcuccggcaucaccgucuccuccaccuacugcuccaccaaccacgacuacaccaucuggaugcccgagaacccccgccucggcaccuccugcgacaucuucaccaacucccgcggcaagcgcgccuccaagggcuccaagaccugcggcuucgucgacgagcgcggccucuacaagucccucaagggcgccugcaagcucaagcucugcggcguccucggccuccgccucauggacggcaccugggccgccauccagaccuccgacgagaccaaguggugcccccccgaccagcucgucaaccuccacgacuuccgcuccgacgagaucgagcaccucgucgucgaggagcucgucaagaagcgcgaggagugccucgacgcccucgaguccaucaugaccaccaaguccgucuccuuccgccgccucucccaccuccgcaagcucguccccggcuucggcaaggccuacaccaucuucaacaagacccucauggaggccgacgcccacuacaaguccguccgcaccuggaacgagaucauccccuccaagggcugccuccgcgucggcggccgcugccacccccacgucaacggcgucuucuucaacggcaucauccucggccccgacggccacguccucauccccgagaugcaguccucccuccuccagcagcacauggagcuccucgaguccuccgucaucccccucaugcacccccucgccgaccccuccaccgucuucaaggacgacgacgaggccgaggacuucgucgagguccaccuccccgacguccacaagcaggucuccggcgucgaccucggccuccccuccuggggcaacuacguccucauguccgccggcguccucaccgcccucaugcucaugaucuuccucaugaccugcugccgccgcaccaaccgcgccgaguccgcccagcacucccucggcgagcgcggccgcaaggucuccgucaccucccaguccggccgcgucaucuccuccugggaguccuacaaguccggcggcgagaccaagcucuga

SEQ ID NO: 127917 - RNA, 1575 nt, Artificial Sequence; identical to SEQ ID NO: 126631
  derived and/or modified CDS sequence (opt2) from glycoprotein__RABV__LC018567.1

SEQ ID NO: 127918 - RNA, 1575 nt, Artificial Sequence
  derived and/or modified CDS sequence (opt2) from glycoprotein__RABV__LC018569.1
augaucccccaggcccuccucuucgucccccuccucgucuucucccucugcuucggcaaguuccccaucuacaccauccccgacaagcucggccccuggucccccaucgacauccaccaccucuccugccccaacaaccucgucgucgaggacgagggcugcaccaaccucuccggcuucuccuacauggagcucaaggucggcuacaucuccgccaucaaggucaacggcuucaccugcaccggcgucgucaccgaggccgagaccuacaccaacuucgucggcuacgucaccaccaccuucaagcgcaagcacuuccgccccacccccgacgccugccgcgccgccuacaacuggaagauggccggcgacccccgcuacgaggagucccuccacaaccccuaccccgacuaccacuggcuccgcaccgucaagaccaccaaggagucccucgucaucaucucccccuccgucgccgaccucgaccccuacgacaagucccuccacucccgcgucuuccccuccggcaagugcuccggcaucaccgucuccuccaccuacugcuccaccaaccacgacuacaccaucuggaugcccgagaacccccgccucggcaccuccugcgacaucuucaccaacucccgcggcaagcgcgccuccaagggcuccaagaccugcggcuucgucgacgagcgcggccucuacaagucccucaagggcgccugcaagcucaagcucugcggcguccucggccuccgccucauggacggcaccugggccgccauccagaccuccgacgagaccaaguggugcccccccgaccagcucgucaaccuccacgacuuccacuccgacgagaucgagcaccucgucgucgaggagcucgucaagaagcgcgaggagugccucgacgcccucgaguccaucaugaccaccaaguccgucuccuuccgccgccucucccaccuccgcaagcucguccccggcuucggcaaggccuacaccaucuucaacaagacccucauggaggccgacgcccacuacaaguccguccgcaccuggaacgagaucauccccuccaagggcugccuccgcgucggcggccgcugccacccccacgucaacggcgucuucuucaacggcaucauccucggccccgacggccacguccucauccccgagaugcaguccucccuccuccagcagcacauggagcuccucgaguccuccgucaucccccucaugcacccccucgccgaccccuccaccgucuucaaggacgacgacgaggccgaggacuucgucgagguccaccuccccgacguccacaagcaggucuccggcgucgaccucggccuccccuccuggggcaaguacguccucauguccgccggcguccucaccgcccucaugcucaugaucuuccucaugaccugcugccgccgcaccaaccgcgccgaguccgcccagcacucccucggcgagcgcggccgcaaggucuccgucaccucccaguccggccgcgucaucuccuccugggaguccuacaaguccggcggcgagaccaagcucuga

SEQ ID NO: 127919 - RNA, 1575 nt, Artificial Sequence; identical to SEQ ID NO: 126631
  derived and/or modified CDS sequence (opt2) from glycoprotein__RABV__LC018570.1

SEQ ID NO: 127920 - RNA, 1575 nt, Artificial Sequence
  derived and/or modified CDS sequence (opt2) from glycoprotein__RABV__LC018571.1
augaucccccaggcccuccucuucgucccccuccucgucuucucccucugcuucggcaaguuccccaucuacaccauccccgacaagcucggccccuggucccccaucgacauccaccaccucuccugccccaacaaccucgucgucgaggacgagggcugcaccaaccucuccggcuucuccuacauggagcucaaggucggcuacaucuccgccaucaaggucaacggcuucaccugcaccggcgucgucaccgaggccgagaccuacaccaacuucgucggcuacgucaccaccaccuucaagcgcaagcacuuccgccccacccccgacgccugccgcgccgccuacaacuggaagauggccggcgacccccgcuacgaggagucccuccacaaccccuaccccgacuaccacuggcuccgcaccgucaagaccaccaaggagucccucgucaucaucucccccuccgucgccgaccucgaccccuacgacaagucccuccacucccgcgucuucuccuccggcaagugcuccggcaucaccgucuccuccaccuacugcuccaccaaccacgacuacaccaucuggaugcccgagaacccccgccucggcaccuccugcgacaucuucaccaacucccgcggcaagcgcgccuccaagggcuccaagaccugcggcuucgucgacgagcgcggccucuacaagucccucaagggcgccugcaagcucaagcucugcggcguccucggccuccgccucauggacggcaccugggccgccauccagaccuccgacgagaccaaguggugcccccccgaccagcucgucaaccuccacgacuuccgcuccgacgagaucgagcaccucgucgucgaggagcucgucaagaagcgcgaggagugccucgacgcccucgaguccaucaugaccaccaaguccgucuccuuccgccgccucucccaccuccgcaagcucguccccggcuucggcaaggccuacaccaucuucaacaagacccucauggaggccgacgcccacuacaaguccguccgcaccuggaacgagaucauccccuccaagggcugccuccgcgucggcggccgcugccacccccacgucaacggcgucuucuucaacggcaucauccucggccccgacggccacguccucauccccgagaugcaguccucccuccuccagcagcacauggagcuccucgaguccuccgucaucccccucaugcacccccucgccgaccccuccaccgucuucaaggacgacgacgaggccgaggacuucgucgagguccaccuccccgacguccacaagcaggucuccggcgucgaccucggccuccccuccuggggcaaguacguccucauguccgccggcguccucaccgcccucaugcucaugaucuuccucaugaccugcugccgccgcaccaaccgcgccgaguccgcccagcacucccucggcgagcgcggccgcaaggucuccgucaccucccaguccggccgcgucaucuccuccugggaguccuacaaguccggcggcgagaccaagcucuga

SEQ ID NO: 127921 - RNA, 1575 nt, Artificial Sequence; identical to SEQ ID NO: 126631
  derived and/or modified CDS sequence (opt2) from glycoprotein__RABV__LC018572.1

SEQ ID NO: 127922 - RNA, 1575 nt, Artificial Sequence; identical to SEQ ID NO: 126631
  derived and/or modified CDS sequence (opt2) from glycoprotein__RABV__LC018573.1

SEQ ID NO: 127923 - RNA, 1575 nt, Artificial Sequence; identical to SEQ ID NO: 126631
  derived and/or modified CDS sequence (opt2) from glycoprotein__RABV__LC018581.1

SEQ ID NO: 127924 - RNA, 1575 nt, Artificial Sequence
  derived and/or modified CDS sequence (opt2) from glycoprotein__RABV__LC018584.1
augaucccccaggcccuccucuucgucccccuccucgucuucucccucugcuucggcaaguuccccaucuacaccauccccgacaagcucggccccuggucccccaucgacauccaccaccucuccugccccaacaaccucgucgucgaggacgagggcugcaccaaccucuccggcuucuccuaccucgagcucaaggucggcuacaucuccgccaucaaggucaacggcuucaccugcaccggcgucgucaccgaggccgagaccuacaccaacuucgucggcuacgucaccaccaccuucaagcgcaagcacuuccgccccaugcccgacgccugccgcgccgccuacaacuggaagauggccggcgacccccgcuacgaggagucccuccacaaccccuaccccgacuaccacuggcuccgcaccgucaagaccaccaaggagucccucgucaucaucucccccuccgucgccgaccucgaccccuacaacaagucccuccacucccgcgucuuccccuccggcaagugcuccggcaucaccgucuccuccaccuacugcuccaccaaccacgacuacaccaucuggaugcccgagaacccccgccucggcaccuccugcgacaucuucaccaacucccgcggcaagcgcgccuccaagggcuccaagaccugcggcuucgucgacgagcgcggccucuacaagucccucaagggcgccugcaagcucaagcucugcggcguccucggccuccgccucauggacggcaccugggccgccauccagaccuccgacgagaccaaguggugcccccccgaccagcucgucaaccuccacgacuuccgcuccgacgagaucgagcaccucgucgucgaggagcucgucaagaagcgcgaggagugccucgacgcccucgaguccaucaugaccaccaaguccgucuccuuccgccgccucucccaccuccgcaagcucguccccggcuucggcaaggccuacaccaucuucaacaagacccucauggaggccgacgcccacuacaaguccguccgcaccuggaacgagauccuccccuccaagggcugccuccgcgucggcggccgcugccacccccacgucaacggcgucuucuucaacggcaucauccucggccccgacggccacguccucauccccgagaugcaguccucccuccuccagcagcacauggagcuccucgaguccuccgucaucccccucaugcacccccucgccgaccccuccaccgucuucaaggacgacgacgaggccgaggacuucgucgagguccaccuccccgacguccacaagcaggucuccggcgucgaccucggccuccccuccuggggcaaguacguccucauguccgccggcguccucaccgcccucaugcucaugaucuuccucaugaccugcugccgccgccccaaccgcgccgaguccgcccagcacucccucggcgagcgcgagaagaaggucuccgucaccucccaguccggccgcgucaucuccuccugggaguccuacaaguccggcggcgagaccaagcucuga

SEQ ID NO: 127925 - RNA, 1575 nt, Artificial Sequence
  derived and/or modified CDS sequence (opt2) from glycoprotein__RABV__LC018585.1
augaucccccaggcccuccucuucgucccccuccucgucuucucccucugcuucggcaaguuccccaucuacaccauccccgacaagcucggccccuggucccccaucgacauccaccaccucuccugccccaacaaccucgucgucgaggacgagggcugcaccaaccucuccggcuucuccuaccucgagcucaaggucggcuacaucuccgccaucaaggucaacggcuucaccugcaccggcgucgucaccgaggccgagaccuacaccaacuucgucggcuacgucaccaccaccuucaagcgcaagcacuuccgccccaugcccgacgccugccgcgccgccuacaacuggaagauggccggcgacccccgcuacgaggagucccuccacaaccccuaccccgacuaccacuggcuccgcaccgucaagaccaccaaggagucccucgucaucaucucccccuccgucgccgaccucgaccccuacgacaagucccuccacucccgcgucuuccccuccggcaagugcuccggcaucaccgucuccuccaccuacugcuccaccaaccacgacuacaccaucuggaugcccgagaacccccgccucggcaccuccugcgacaucuucaccaacucccgcggcaagcgcgccuccaagggcuccaagaccugcggcuucgucgacgagcgcggccucuacaagucccucaagggcgccugcaagcucaagcucugcggcguccucggccuccgccucauggacggcaccugggccgccauccagaccuccgacgagaccaaguggugcccccccgaccagcucgucaaccuccacgacuuccgcuccgacgagaucgagcaccucgucgucgaggagcucgucaagaagcgcgaggagugccucgacgcccucgaguccaucaugaccaccaaguccgucuccuuccgccgccucucccaccuccgcaagcucguccccggcuucggcaaggccuacaccaucuucaacaagacccucauggaggccgacgcccacuacaaguccguccgcaccuggaacgagaucauccccuccaagggcugccuccgcgucggcggccgcugccacccccacgucaacggcgucuucuucaacggcaucauccucggccccgacggccacguccucauccccgagaugcaguccucccuccuccagcagcacauggagcuccucgaguccuccgucaucccccucaugcacccccucgccgaccccuccaccgucuucaaggacgacgacgaggccgaggacuucgucgagguccaccuccccgacguccacaagcaggucuccggcgucgaccucggccuccccuccuggggcaaguacguccucauguccgccggcguccucaccgcccucaugcucaugaucuuccucaugaccugcugccgccgccccaaccgcgccgaguccgcccagcacucccucggcgagcgcgagaagaaggucuccgucaccucccaguccggccgcgucaucuccuccugggaguccuacaaguccggcggcgagaccaagcucuga

SEQ ID NO: 127926 - RNA, 1575 nt, Artificial Sequence; identical to SEQ ID NO: 126608
  derived and/or modified CDS sequence (opt2) from glycoprotein__RABV__LC018586.1

SEQ ID NO: 127927 - RNA, 1575 nt, Artificial Sequence
  derived and/or modified CDS sequence (opt2) from glycoprotein__RABV__LC018587.1
augaucccccaggcccuccucuucgucccccuccucgucuucucccucugcuucggcaaguuccccaucuacaccauccccgacaagcucggccccuggucccccaucgacauccaccaccucuccugccccaacaaccucgucgucgaggacgagggcugcaccaaccucuccggcuucuccuacauggagcucaaggucggcuacaucuccgccaucaaggucaacggcuucaccugcaccggcgucgucaccgaggccgagaccuacaccaacuucgucggcuacgucaccaccaccuucaagcgcaagcacuuccgccccacccccgacgccugccgcgccgccuacaacuggaagauggccggcgacccccgcuacgaggagucccuccacaaccccuaccccgacuaccacuggcuccgcaccgucaagaccaccaaggagucccucgucaucaucucccccuccgucgccgaccucgaccccuacgacaagucccuccacucccgcgucuuccccuccggcaagugcuccggcaucaccgucuccuccaccuacugcuccaccaaccacgacuacaccaucuggaugcccgagaacccccgccucggcaccuccugcgacaucuucaccaacucccgcggcaagcgcgccuccaagggcuccaagaccugcggcuucgucgacgagcgcggccucuacaagucccucaagggcgccugcaagcucaagcucugcggcguccucggccuccgccucauggacggcaccugggucgccauccagaccuccgacgagaccaaguggugcccccccgaccagcucgucaaccuccacgacuuccgcuccgacgagaucgagcaccucgucgucgaggagcucgucaagaagcgcgaggagugccucgacgcccucgaguccaucaugaccaccaaguccgucuccuuccgccgccucucccaccuccgcaagcucguccccggcuucggcaaggccuacaccaucuucaacaagacccucauggaggccgacgcccacuacaaguccguccgcaccuggaacgagaucauccccuccaagggcugccuccgcgucggcggccgcugccacccccacgucaacggcgucuucuucaacggcaucauccucggccccgacggccacguccucauccccgagaugcaguccucccuccuccagcagcacauggagcuccucgaguccuccgucaucccccucaugcacccccucgccgaccccuccaccgucuucaaggacgacgacgaggccgaggacuucgucgagguccaccuccccgacguccacaagcaggucuccggcgucgaccucggccuccccuccuggggcaaguacguccucauguccgccggcguccucaccgcccucaugcucaugaucuuccucaugaccugcugccgccgcgccaaccgcgccgaguccgcccagcacucccucggcgagcgcggccgcaaggucuccgucaccucccaguccggccgcgucaucuccuccugggaguccuacaaguccggcggcgagaccaagcucuga

SEQ ID NO: 127928 - RNA, 1575 nt, Artificial Sequence; identical to SEQ ID NO: 126608
  derived and/or modified CDS sequence (opt2) from glycoprotein__RABV__LC018588.1

SEQ ID NO: 127929 - RNA, 1575 nt, Artificial Sequence
  derived and/or modified CDS sequence (opt2) from glycoprotein__RABV__LC018589.1
augaucccccaggcccuccucuucgucccccuccucgucuucucccucugcuucggcaaguuccccaucuacaccauccccgacaagcucggccccuggucccccaucgacauccaccaccucuccugccccaacaaccucgucgucgaggacgagggcugcaccaaccucuccggcuucuccuacauggagcucaaggucggcuacaucuccgccaucaaggucaacggcuucaccugcaccggcgucgucaccgaggccgagaccuacaccaacuucgucggcuacgucaccaccaccuucaagcgcaagcacuuccgccccacccccgacgccugccgcgccgccuacaacuggaagauggccggcgacccccgcuacgaggagucccuccacaaccccuaccccgacuaccacuggcuccgcaccgucaagaccaccaaggagucccucgucaucaucucccccuccgucgccgaccucgaccccuacgacaagucccuccacucccgcgucuuccccuccggcaagugcuccggcaucaccgucuccuccaccuacugcuccaccaaccacgacuacaccaucuggaugcccgagaacccccgccucggcaccuccugcgacaucuucaccaacucccgcggcaagcgcgccuccaagggcuccaagaccugcggcuucgucgacgagcgcggccucuacaagucccucaagggcgccugcaagcucaagcucugcggcguccucggccuccgccucauggacggcaccugggccgccauccagaccuccgacgagaccaaguggugcccccccgaccagcucgucaaccuccacgacuuccgcuccgacgagaucgagcaccucgucgucgaggagcucgucaagaagcgcgaggagugccucgacgcccucgaguccaucaugaccaccaaguccgucuccuuccgccgccucucccaccuccgcaagcucguccccggcuucggcaaggccuacaccaucuucaacaagacccucauggaggccgacgcccacuacaaguccguccgcaccuggaacgagaucauccccuccaagggcugccuccgcgucggcggccgcugccacccccacgucaacggcgucuucuucaacggcaucauccucggccccgacggccacguccucauccccgagaugcaguccucccuccuccagcagcacauggagcuccucgaguccuccgucaucccccucaugcacccccucgccgaccccuccaccgucuucaaggacgacgacgaggccgaggacuucgucgagguccaccuccccgacguccacaagcaggucuccggcgucgaccucggccuccccuccuggggcaaguacguccucauguccgccggcguccucaccgcccucaugcucaugaucuuccucaugaccugcugccgccgcgccaaccgcgccgaguccgcccgccacucccucggcgagcgcggccgcaaggucuccgucaccucccaguccggccgcgucaucuccuccugggaguccuacaaguccggcggcgagaccaagcucuga

SEQ ID NO: 127930 - RNA, 1575 nt, Artificial Sequence
  derived and/or modified CDS sequence (opt2) from glycoprotein__RABV__LC018590.1
augaucccccaggcccuccucuucgucccccuccucgucuucucccucugcuucggcaaguuccccaucuacaccauccccgacaagcucggccccuggucccccaucgacauccaccaccucuccugccccaacaaccucgucgucgaggacgagggcugcaccaaccucuccggcuucuccuacauggagcucaaggucggcuacaucuccgccaucaaggucaacggcuucaccugcaccggcgucgucaccgaggccgagaccuacaccaacuucgucggcuacgucaccaccaccuucaagcgcaagcacuuccgccccacccccgacgccugccgcgccgccuacaacuggaagauggccggcgacccccgcuacgaggagucccuccacaaccccuaccccgacuaccacuggcuccgcaccgucaagaccaccaaggagucccucgucaucaucucccccuccgucgccgaccucgaccccuacgacaagucccuccacucccgcgucuuccccuccggcaagugcuccggcaucaccgucuccuccaccuacugcuccaccaaccacgacuacaccaucuggaugcccgagaacccccgccucggcaccuccugcgacaucuucaucaacucccgcggcaagcgcgccuccaagggcuccaagaccugcggcuucgucgacgagcgcggccucuacaagucccucaagggcgccugcaagcucaagcucugcggcguccccggccuccgccucauggacggcaccugggccgccauccagaccuccgacgagaccaaguggugcccccccgaccagcucgucaaccuccacgacuuccgcuccgacgagaucgagcaccucgucgucgaggagcucgucaagaagcgcgaggagugccucgacgcccucgaguccaucaugaccaccaaguccgucuccuuccgccgccucucccaccuccgcaagcucguccccggcuucggcaaggccuacaccaucuucaacaagacccucauggaggccgacgcccacuacaaguccguccgcaccuggaacgagaucauccccuccaagggcugccuccgcgucggcggccgcugccacccccacgucaacggcgucuucuucaacggcaucauccucggccccgacggccacguccucauccccgagaugcaguccucccuccuccagcagcacauggagcuccucgaguccuccgucaucccccucaugcacccccucgccgaccccuccaccgucuucaaggacgacgacgaggccgaggacuucgucgagguccaccuccccgacguccacaagcaggucuccggcgucgaccucggccuccccuccuggggcaaguacguccucauguccgccggcguccucaccgcccucaugcucaugaucuuccucaugaccugcugccgccgcgccaaccgcgccgaguccgcccagcacucccucggcgagcgcggccgcaaggucuccgucaccucccaguccggccgcgucaucuccuccugggaguccuacaaguccggcggcgagaccaagcucuga

SEQ ID NO: 127931 - RNA, 1575 nt, Artificial Sequence
  derived and/or modified CDS sequence (opt2) from glycoprotein__RABV__LC071936.1
augaucccccaggcccuccuccucgucccccuccucgucuucccccucugcuucggcaaguuccccaucuacaccauccccgacaagcucggccccuggucccccaucgacauccaccaccucuccugccccaacaaccucgucgucgaggacgagggcugcaccaaccucuccggcuucuccuacauggagcucaaggucggcuacaucuccgccaucaaggucaacggcuucaccugcaccggcgucgucaccgaggccgagaccuacaccaacuucgucggcuacgucaccaccaccuucaagcgcaagcacuuccgccccacccccgacgccugccgcgccgccuacaacuggaagauggccggcgacccccgcuacgaggagucccuccacaaccccuaccccgacuaccacuggcuccgcaccgucaaggccaccaaggagucccucgucaucaucucccccuccgucuccgaccucgaccccuacgacaagucccuccacucccgcgucuuccccuccggcaagugcuccggcaucaccgucuccuccaccuacugccccaccucccacgacuacaccaucuggaugcccgagaacccccgccucggcaccuccugcgacaucuucaucaacucccgcggcaagcgcgccuccaagggcuccaagaccugcggcuucgucgacgagcgcggccucuacaagucccucaagggcgccugcaagcucaagcucugcggcguccucggccuccgccucauggacggcaccugggccgccauccagaccuccgacgaggccaaguggugcccccccgaccagcucgucaacauccacgacuuccacuccgacgagaucgagcaccucgucgucgaggagcucgucaagaagcgcgaggagugccucgacgcccucgaguccaucaugaccaccaaguccgucuccuuccgccgccucucccaccuccgcaagcucguccccggcuucggcaaggccuacaccaucuucaacaagacccucauggaggccgacgcccacuacaaguccguccgcaccuggaacgagaucauccccuccaagggcugccuccgcgucggcggccgcugccacccccacgucaacggcgucuucuucaacggcaucauccucggccccgacggccacguccucauccccgagaugcaguccucccuccuccagcagcacauggagcuccucgaguccuccgucaucccccucaugcacccccucgccgaccccuccaccgucuucaaggacggcgacgaggccgaggacuucgucgagguccaccuccccgacguccacaagcaggucuccggcgucgaccucggccuccccuccuggggcaaguacguccucauguccgucggcacccucaucgcccucauggucaugaucuuccucaugaccugcugccgcaaggccaacggcgucgaguccaugcgccaccgccucggcgagaccggccgcaaggucuccgucaccucccaguccggccgcgucaucuccuccugggaguccuacaaguccggcggcgagaccaagcucuga

SEQ ID NO: 127932 - RNA, 1575 nt, Artificial Sequence
  derived and/or modified CDS sequence (opt2) from glycoprotein__RABV__LC071937.1
augaucccccaggcccuccucuucgucccccuccucgucuucucccucugcuucggcaaguuccccaucuacaccauccccgacaagcucggccccuggucccccaucgacauccaccaccucuccugccccaacaaccucgucgucgaggacgagggcugcaccaaccucuccggcuucuccuacauggagcucaaggucggcuacaucuccgccaucaaggucaacggcuucaccugcaccggcgucgucaccgaggccgagaccuacaccaacuucgucggcuacgucaccaccaccuucaagcgcaagcacuuccgccccacccccgacgccugccgcgccgccuacaacuggaagauggccggcgacccccgcuacgaggagucccuccacaaccccuaccccgacuaccacuggcuccgcaccgucaagaccaccaaggagucccucgucaucaucucccccuccgucuccgaccucgaccccuacgacaagucccuccacucccgcgucuuccccuccggcaagugcuccggcaucaccgucuccuccaccuacugccccaccaaccacgacuacaccaucuggaugcccgagaacccccgccucggcaccuccugcgacaucuucaccaccucccgcggcaagcgcgccuccaagggcggcaagaccugcggcuucgucgacgagcgcggccucuacaagucccucaagggcgccugcaagcucaagcucugcggcguccucggccuccgccucauggacggcaccugggccgccauccagaccuccgacgaggccaaguggugcccccccgaccagcucgucaacauccacgacuuccgcuccgacgagaucgagcaccucgucgucgaggagcucgucaagaagcgcgaggagugccucgacgcccucgaguccaucaugaccaccaaguccgucuccuuccgccgccucucccaccuccgcaagcucguccccggcuucggcaaggccuacaccaucuucaacaagacccucauggaggccgacgcccacuacaaguccguccgcaccuggaacgagaucauccccuccaagggcugccuccgcgucggcggccgcugccacccccacgucaacggcgucuucuucaacggcaucauccucggccccgacggccacguccucauccccgagaugcaguccucccuccuccagcagcacauggagcuccucgaguccuccgucaucccccucaugcacccccucgccgaccccuccaccgucuucaaggacgacgacgaggccgaggacuucgucgagguccaccuccccgacguccacaagcaggucuccggcgucgaccucggccuccccuccuggggcaaguacguccucauguccgucggcgccaugaucgcccucaugcucaugaucuuccucaccaccugcugccgcaaggccaacggcgccgaguccaccccccaccgccucggcgagaccggccgcaaggucuccgucaccucccaguccggccgcgucaucuccuccugggaguccuacaaguccggcggcgagaccaagcucuga

SEQ ID NO: 127933 - RNA, 1575 nt, Artificial Sequence; identical to SEQ ID NO: 127932
  derived and/or modified CDS sequence (opt2) from glycoprotein__RABV__LC071938.1

SEQ ID NO: 127934 - RNA, 1575 nt, Artificial Sequence; identical to SEQ ID NO: 127932
  derived and/or modified CDS sequence (opt2) from glycoprotein__RABV__LC071939.1

SEQ ID NO: 127935 - RNA, 1575 nt, Artificial Sequence
  derived and/or modified CDS sequence (opt2) from glycoprotein__RABV__LC071940.1
augaucccccaggcccuccucuucgucccccuccucgucuucucccucugcuucggcaaguucuccaucuacaccauccccgacaagcucggccccuggucccccaucgacauccaccaccucuccugccccaacaaccucgucgucgaggacgagggcugcaccaaccucuccggcuucuccuacauggagcucaaggucggcuacaucuccgccaucaaggucaacggcuucaccugcaccggcgucgucaccgaggccgagaccuacaccaacuucgucggcuacgucaccaccaccuucaagcgcaagcacuuccgccccacccccgacgccugccgcgccgccuacaacuggaagauggccggcgacccccgcuacgaggagucccuccacaaccccuaccccgacuaccacuggcuccgcaccgucaagaccaccaaggagucccucgucaucaucucccccuccgucuccgaccucgaccccuacgacaagucccuccacucccgcgucuuccccuccggcaagugcuccggcaucaccgucuccuccaccuacugccccaccaaccacgacuacaccaucuggaugcccgagaacccccgccucggcaccuccugcgacaucuucaccaccucccgcggcaagcgcgccuccaagggcggcaagaccugcggcuucgucgacgagcgcggccucuacaagucccucaagggcgccugcaagcucaagcucugcggcguccucggccuccgccucauggacggcaccugggccgccauccagaccuccgacgaggccaaguggugcccccccgaccagcucgucaacauccacgacuuccgcuccgacgagaucgagcaccucgucgucgaggagcucgucaagaagcgcgaggagugccucgacgcccucgaguccaucaugaccaccaaguccgucuccuuccgccgccucucccaccuccgcaagcucguccccggcuucggcaaggccuacaccaucuucaacaagacccucauggaggccgacgcccacuacaaguccguccgcaccuggaacgagaucauccccuccaagggcugccuccgcgucggcggccgcugccacccccacgucaacggcgucuucuucaacggcaucauccucggccccgacggccacguccucauccccgagaugcaguccucccuccuccagcagcacauggagcuccucgaguccuccgucaucccccucaugcacccccucgccgaccccuccaccgucuucaaggacgacgacgaggccgaggacuucgucgagguccaccuccccgacguccacaagcaggucuccggcgucgaccucggccuccccuccuggggcaaguacguccucauguccgucggcgccaugaucgcccucaugcucaugaucuuccucaccaccugcugccgcaaggccaacggcgccgaguccacccagcaccgccucggcgagaccggccgcaaggucuccgucaccucccaguccggccgcgucaucuccucccgcgaguccuacaaguccggcggcgagaccaagcucuga

SEQ ID NO: 127936 - RNA, 1575 nt, Artificial Sequence
  derived and/or modified CDS sequence (opt2) from glycoprotein__RABV__LC071941.1
augaucccccaggcccuccucuucgucccccuccucgucuucucccucugcuucggcaaguuccccaucuacaccauccccgacaagcucggccccuggucccccaucgacauccaccaccucuccugccccaacaaccucgucgucgaggacgagggcugcaccaaccucuccggcuucuccuacauggagcucaaggucggcuacaucuccgccaucaaggucaacggcuucaccugcaccggcgucgucaccgaggccgagaccuacaccaacuucgucggcuacgucaccaccaccuucaagcgcaagcacuuccgccccacccccgacgccugccgcgccgccuacaacuggaagauggccggcgacccccgcuacgaggagucccuccacaaccccuaccccgacuaccacuggcuccgcaccgucaagaccaccaaggagucccucgucaucaucucccccuccgucuccgaccucgaccucuacgacaagucccuccacucccgcgucuuccccuccggcaagugcuccggcaucaccgucuccuccaccuacugccccaccaaccacgacuacaccaucuggaugcccgagaacccccgccucggcaccuccugcgacaucuucaccaccucccgcggcaagcgcgccuccaagggcggcaagaccugcggcuucgucgacgagcgcggccucuacaagucccucaagggcgccugcaagcucaagcucugcggcguccucggccuccgccucauggacggcaccugggccgccauccagaccuccgacgaggccaaguggugcccccccgaccagcucgucaacauccacgacuuccgcuccgacgagaucgagcaccucgucgucgaggagcucgucaagaagcgcgaggagugccucgacgcccucgaguccaucaugaccaccaaguccgucuccuuccgccgccucucccaccuccgcaagcucguccccggcuucggcaaggccuacaccaucuucaacaagacccucauggaggccgacgcccacuacaaguccguccgcaccuggaacgagaucauccccuccaagggcugccuccgcgucggcggccgcugccacccccacgucaacggcgucuucuucaacggcaucauccucggccccgacggccacguccucauccccgagaugcaguccucccuccuccagcagcacauggagcuccucgaguccuccgucaucccccucaugcacccccucgccgaccccuccaccgucuucaaggacgacgacgaggccgaggacuucgucgagguccaccuccccgacguccacaagcaggucuccggcgucgaccucggccuccccuccuggggcaaguacguccucauguccgucggcgccaugaucgcccucaugcucaugaucuuccucaccaccugcugccgcaaggccaacggcgccgaguccacccagcaccgccucggcgagaccggccgcaaggucuccgucaccucccaguccggccgcgucaucuccuccugggaguccuacaaguccggcggcgagaccaagcucuga

SEQ ID NO: 127937 - RNA, 1575 nt, Artificial Sequence
  derived and/or modified CDS sequence (opt2) from glycoprotein__RABV__LC071943.1
augaucccccaggcccuccucuucgucccccuccucgucuucucccucugcuucggcaaguuccccaucuacaccauccccgacaagcucggccccuggucccccaucgacauccaccaccucuccugccccaacaaccucgucgucgaggacgagggcugcaccaaccucuccggcuucuccuacauggagcucaaggucggcuacaucuccgccaucaaggucaacggcuucaccugcaccggcgucgucaccgaggccgagaccuacaccaacuucgucggcuacgucaccaccaccuucaagcgcaagcacuuccgccccacccccgacgccugcggcgccgccuacaacuggaagauggccggcgacccccgcuacgaggagucccuccacaaccccuaccccgacuaccacuggcuccgcaccgucaagaccaccaaggagucccucgucaucaucucccccuccgucuccgaccucgaccccuacgacaagucccuccacucccgcgucuuccccuccggcaagugcuccggcaucaccgucuccuccaccuacugccccaccaaccacgacuacaccaucuggaugcccgagaacccccgccucggcaccuccugcgacaucuucaccaccucccgcggcaagcgcgccuccaagggcggcaagaccugcggcuucgucgacgagcgcggccucuacaagucccucaagggcgccugcaagcucaagcucugcggcguccucggccuccgccucauggacggcaccugggccgccauccagaccuccgacgaggccaaguggugcccccccgaccagcucgucaacauccacgacuuccgcuccgacgagaucgagcaccucgucgucgaggagcucgucaagaagcgcgaggagugccucgacgcccucgaguccaucaugaccaccaaguccgucuccuuccgccgccucucccaccuccgcaagcucguccccggcuucggcaaggccuacaccaucuucaacaagacccucauggaggccgacgcccacuacaaguccguccacaccuggaacgagaucauccccuccaagggcugccuccgcgucggcggccgcugccacccccacgucaacggcgucuucuucaacggcaucauccucggccccgacggccacguccucauccccgagaugcaguccucccuccuccagcagcacauggagcuccucgaguccuccgucaucccccucaugcacccccucgccgaccccuccaccgucuucaaggacgacgacgaggccgaggacuucgucgagguccaccuccccgacguccacaagcaggucuccggcgucgaccucggccuccccuccuggggcaaguacguccucauguccgucggcgccaugaucgcccucaugcucaugaucuuccucaccaccugcugccgcaaggccaacggcgccgaguccacccagcaccgccucggcgagaccggccgcaaggucuccgucaccucccaguccggccgcgucaucuccuccugggaguccuacaaguccggcggcgagaccaagcucuga

SEQ ID NO: 127938 - RNA, 1575 nt, Artificial Sequence
  derived and/or modified CDS sequence (opt2) from glycoprotein__RABV__LC071944.1
augaucccccaggcccuccucuucgucccccuccucgucuucucccucugcuucggcaaguuccccaucuacaccauccccgacaagcucggccccuggucccccaucgacauccaccaccucuccugccccaacaaccucgucgucgaggacgagggcugcaccaaccucuccggcuucuccuacauggagcucaaggucggcuacaucuccgccaucaaggucaacggcuucaccugcaccggcgucgucaccgaggccgagaccuacaccaacuucgucggcuacgucaccaccaccuucaagcgcaagcacuuccgccccacccccgacgccugccgcgccgccuacaacuggaagauggccggcgacccccgcuacgaggucucccuccacaaccccuaccccgacuaccacuggcuccgcaccgucaagaccaccaaggagucccucgucaucaucucccccuccgucuccgaccucgaccccuacgacaagucccuccacucccgcgucuuccccuccggcaagugcuccggcaucaccgucuccuccaccuacugccccaccaaccacgacuacaccaucuggaugcccgagaacccccgccucggcaccuccugcgacaucuucaccaccucccgcggcaagcgcgccuccaagggcggcaagaccugcggcuucgucgacgagcgcggccucuacaagucccucaagggcgccugcaagcucaagcucugcggcguccucggccuccgccucauggacggcaccugggccgccauccagaccuccgacgaggccaaguggugcccccccgaccagcucgucaacauccacgacuuccgcuccgacgagaucgagcaccucgucgucgaggagcucgucaagaagcgcgaggagugccucgacgcccucgaguccaucaugaccaccaaguccgucuccuuccgccgccucucccaccuccgcaagcucguccccggcuucggcaaggccuacaccaucuucaacaagacccucauggaggccgacgcccacuacaaguccguccgcaccuggaacgagaucauccccuccaagggcugccuccgcgucggcggccgcugccacccccacgucaacggcgucuucuucaacggcaucauccucggccccgacggccacguccucauccccgagaugcaguccucccuccuccagcagcacauggagcuccucgaguccuccgucaucccccucaugcacccccucgccgaccccuccaccgucuucaaggacgacgacgaggccgaggacuucgucgagguccaccuccccgacguccacaagcaggucuccggcgucgaccucggccuccccuccuggggcaaguacguccucauguccgucggcgccaugaucgcccucaugcucaugaucuuccucaccaccugcugccgcaaggccaacggcgccgaguccacccagcaccgccucggcgagaccggccgcaaggucuccgucaccucccaguccggccgcgucaucuccuccugggaguccuacaaguccggcggcgagaccaagcucuga

SEQ ID NO: 127939 - RNA, 1575 nt, Artificial Sequence
  derived and/or modified CDS sequence (opt2) from glycoprotein__RABV__LC071945.1
augaucccccaggcccuccucuucgucucccuccucgucuucucccucugcuucggcaaguuccccaucuacaccauccccgacaagcucggccccuggucccccaucgacauccaccaccucuccugccccaacaaccucgucgucgaggacgagggcugcaccaaccucuccggcuucuccuacauggagcucaaggucggcuacaucuccgccaucaaggucaacggcuucaccugcaccggcgucgucaccgaggccgagaccuacaccaacuucgucggcuacgucaccaccaccuucaagcgcaagcacuuccgccccacccccgacgccugccgcgccgccuacaacuggaagauggccggcgacccccgcuacgaggagucccuccacaaccccuaccccgacuaccacuggcuccgcaccgucaagaccaccaaggagucccucgucaucaucucccccuccgucuccgaccucgaccccuacgacaagucccuccacucccgcguccuccccggcggcaagugcuccggcaucaccgucuccuccaccuacugccccaccaaccacgacuacaccaucuggaugcccgagaacccccgccucggcaccuccugcgacaucuucaccaccucccgcggcaagcgcgccuccaagggcggcaagaccugcggcuucgucgacgagcgcggccucuacaagucccucaagggcgccugcaagcucaagcucugcggcguccucggccuccgccucauggacggcaccugggccgccauccagaccuccgacgaggccaaguggugcccccccgaccagcucgucaacauccacgacuuccgcuccgacgagaucgagcaccucgucgucgaggagcucgucaagaagcgcgaggagugccucgacgcccucgaguccaucaugaccaccaaguccgucuccuuccgccgccucucccaccuccgcaagcucguccccggcuucggcaaggccuacaccaucuucaacaagacccucauggaggccgacgcccacuacaaguccguccgcaccuggaacgagaucauccccuccaagggcugccuccgcgucggcggccgcugccacccccacgucaacggcgucuucuucaacggcaucauccucggccccgacggccacguccucauccccgagaugcaguccucccuccuccagcagcacauggagcuccucgaguccuccgucaucccccucaugcacccccucgccgaccccuccaccgucuucaaggacgacgacgaggccgaggacuucgucgagguccaccuccccgacguccacaagcaggucuccggcgucgaccucggccuccccuccuggggcaaguacguccucauguccgucggcgccaugaucgcccucaugcucaugaucuuccucaccaccugcugccgcaaggccaacggcgccgaguccacccagcaccgccucggcgagaccggccgcaaggucuccgucaccucccaguccggccgcgucaucuccuccugggaguccuacaaguccggcggcgagaccaagcucuga

SEQ ID NO: 127940 - RNA, 1575 nt, Artificial Sequence
  derived and/or modified CDS sequence (opt2) from glycoprotein__RABV__LC071946.1
augaucccccaggcccuccucuucgucccccuccucgucuucucccucugcuucggcaaguuccccaucuacaccauccccgacaagcucggccccuggucccccaucgacauccaccaccucuccugccccaacaaccucgucgucgaggacgagggcugcaccaaccucuccggcuucuccuacauggagcucaaggucggcuacaucuccgccaucaaggucaacggcuucaccugcaccggcgucgucaccgaggccgagaccuacaccaacuucgucggcuacgucaccaccaccuucaagcgcaagcacuuccgccccacccccgacgccugccgcgccgccuacaacuggaagauggccggcgacccccgcuacgaggagucccuccacaaccccuaccccgacuaccacuggcuccgcaccgucaagaccaccaaggagucccucgucaucaucucccccuccgucuccgaccucgaccccuacgacaagucccuccacucccgcgucuuccccggcggcaagugcuccggcaucaccgucuccuccaccuacugccccaccaaccacgacuacaccaucuggaugcccgagaacccccgccucggcaccuccugcgacaucuucaccaccucccgcggcaagcgcgccuccaagggcggcaagaccugcggcuucgucgacgagcgcggccucuacaagucccucaagggcgccugcaagcucaagcucugcggcguccucggccuccgccucauggacggcaccugggccgccauccagaccuccgacgaggccaaguggugcccccccgaccagcucgucaacauccacgacuuccgcuccgacgagaucgagcaccucgucgucgaggagcucgucaagaagcgcgaggagugccucgacgcccucgaguccaucaugaccaccaaguccgucuccuuccgccgccucucccaccuccgcaagcucguccccggcuucggcaaggccuacaccaucuucaacaagacccucauggaggccgacgcccacuacaaguccguccgcaccuggaacgagaucauccccuccaagggcugccuccgcgucggcggccgcugccacccccacgucaacggcgucuucuucaacggcaucauccucggccccgacggccacguccucauccccgagaugcaguccucccuccuccagcagcacauggagcuccucgaguccuccgucaucccccucaugcacccccucgccgaccccuccaccgucuucaaggacgacgacgaggccgaggacuucgucgagguccaccuccccgacguccacaagcaggucuccggcgucgaccucggccuccccuccuggggcaagcacguccucauguccgucggcgccaugaucgcccucaugcucaugaucuuccucaccaccugcugccgcaaggccaacggcgccgaguccacccagcaccgccucggcgagaccggccgcaaggucuccgucaccucccaguccggccgcgucaucuccuccugggaguccuacaaguccggcggcgagaccaagcucuga

SEQ ID NO: 127941 - RNA, 1575 nt, Artificial Sequence
  derived and/or modified CDS sequence (opt2) from glycoprotein__RABV__LC071947.1
augaucccccaggcccuccucuucgucccccuccucgucuucucccucugcuucggcaaguuccccaucuacaccauccccgacaagcucggccccuggucccccaucgacauccaccaccucuccugccccaacaaccucgucgucgaggacgagggcugcaccaaccucuccggcuucuccuacauggagcucaaggucggcuacaucuccgccaucaaggucaacggcuucaccugcaccggcgucgucaccgaggccgagaccuacaccaacuucgucggcuacgucaccaccaccuucaagcgcaagcacuuccgccccacccccgacgccugccgcgccgccuacaacuggaagauggccggcgacccccgcuacgaggagucccuccacaaccccuaccccgacuaccacuggcuccgcaccgucaagaccaccaaggagucccucgucaucaucucccccuccgucuccgaccucgaccccuacgacaagucccuccacucccgcgucuuccccuccggcaagugcuccggcaucaccgucuccuccaccuacugccccaccaaccacgacuacaccaucuggaugcccgagaacccccgccucggcaccuccugcgacaucuucaccaccucccgcggcaagcgcgccuccaagggcggcaagaccugcggcuucgucgacgagcgcggccucuacaagucccucaagggcgccugcaagcucaagcucugcggcguccucggccuccgccucauggacggcaccugggccgccauccagaccuccgacgaggccaaguggugcccccccgaccagcucgucaacauccacgacuuccgcuccgacgagaucgagcaccucgucgucgaggagcucgucaagaagcgcgaggagugccucgacgcccucgaguccaucaugaccaccaaguccgucuccuuccgccgccucucccaccuccgcaagcucguccccggcuucggcaaggccuacaccaucuucaacaagacccucauggaggccgacgcccacuacaaguccguccgcaccuggaacgagaucauccccuccaagggcugccuccgcgucggcggccgcugccacccccacgucaacggcgucuucuucaacggcaucauccucggccccgacggccacguccucauccccgagaugcaguccucccuccuccagcagcacauggagcuccucgaguccuccgucaucccccucaugcacccccucgccgaccccuccaccgucuucaaggacgacgacgaggccgaggacuucgucgagguccaccuccccgacguccacaagcaggucuccggcgucgaccucggccuccccuccuggggcaaguacguccucauguccgucggcgccaugaucgcccucaugcucaugaucuuccucaccaccugcugccgcaaggccaacggcgccgaguccacccagcaccgccucggcgagaccggccgcaaggucuccgucaccucccaguccggccgcgucaucuccuccugggaguccuacaaguccggcggcgagaccaagcucuga

SEQ ID NO: 127942 - RNA, 1575 nt, Artificial Sequence
  derived and/or modified CDS sequence (opt2) from glycoprotein__RABV__LC071948.1
augaucccccaggcccuccucuucgucccccuccucgucuucucccucugcuucggcaaguuccccaucuacaccauccccgacaagcucggccccuggucccccaucgacauccaccaccucuccugccccaacaaccucgucgucgaggacgagggcugcaccaaccucuccggcuucuccuacauggagcucaaggucggcuacaucuccgccaucaaggucaacggcuucaccugcaccggcgucgucaccgaggccgagaccuacaccaacuucgucggcuacgucaccaccaccuucaagcgcaagcacuuccgccccacccccgacgccugccgcgccgccuacaacuggaagauggccggcgacccccgcuacgaggagucccuccacaaccccuaccccgacuaccacuggcuccgcaccgucaagaccaccaaggagucccucgucaucaucucccccuccgucuccgaccucgaccccuacgacaagucccuccacucccgcgucuuccccuccggcaagugcuccggcaucaccgucuccuccaccuacugccccaccaaccacgacuacaccaucuggaugcccgagaacccccgccucggcaccuccugcgacaucuucaccaccucccgcggcaagcgcgccuccaagggcggcaagaccugcggcuucgucgacgagcgcggccucuacaagucccucaagggcgccugcaagcucaagcucugcggcguccucggccuccgccucauggacggcaccugggccgccauccagaccuccgacgaggccaaguggugcccccccgaccagcucgucaacauccacgacuuccgcuccgacgagaucgagcaccucgucgucgaggagcucgucaagaagcgcgaggagugccucgacgcccucgaguccaucaugaccaccaaguccgucuccuuccgccgccucucccaccuccgcaagcucguccccggcuucggcaaggccuacaccaucuucaacaagacccucauggaggccgacgcccacuacaaguccguccgcaccuggaacgagaucauccccuccaagggcugccuccgcgucggcggccgcugccacccccacgucaacggcgucuucuucaacggcaucauccucggccccgacggccacguccucauccccgagaugcaguccucccuccuccagcagcacauggagcuccucgaguccuccgucaucccccucaugcacccccucgccgaccccuccaccgucuucaaggacgacgacgaggccgaggacuucgucgagguccaccuccccgacguccacaagcaggucuccggcgucgaccucggccuccccuccuggggcaaguacguccucauguccgucggcgccaugaucgcccucaugcucaugaucuuccucaugaccugcugccgcaaggccaacggcgccgaguccacccagcaccgccucggcgagaccggccgcaaggucuccgucaccucccaguccggccgcgucaucuccuccugggaguccuacaaguccggcggcgagaccaagcucuga

SEQ ID NO: 127943 - RNA, 1575 nt, Artificial Sequence; identical to SEQ ID NO: 127941
  derived and/or modified CDS sequence (opt2) from glycoprotein__RABV__LC071949.1

SEQ ID NO: 127944 - RNA, 1575 nt, Artificial Sequence
  derived and/or modified CDS sequence (opt2) from glycoprotein__RABV__LC071950.1
augaucccccaggcccuccucuucgucccccuccucgucuucucccucugcuucggcaaguuccccaucuacaccauccccgacaagcucggccccuggucccccaucgacauccaccaccucuccugccccaacaaccucgucgucgaggacgagggcugcaccucccucuccggcuucuccuacauggagcucaaggucggcuacaucuccgccaucaaggucaacggcuucaccugcaccggcgucgucaccgaggccgagaccuacaccaacuucgucggcuacgucaccaccaccuucaagcgcaagcacuuccgccccacccccgacgccugccgcgccgccuacaacuggaagauggccggcgacccccgcuacgaggagucccuccacaaccccuaccccgacuaccacuggcuccgcaccgucaagaccaccaaggagucccucgucaucaucucccccuccgucuccgaccucgaccccuacgacaagucccuccacucccgcgucuuccccuccggcaagugcuccggcaucaccgucuccuccaccuacugccccaccaaccacgacuacaccaucuggaugcccgagaagccccgccucggcaccuccugcgacaucuucaccaccucccgcggcaagcgcgccuccaagggcggcaagaccugcggcuucgucgacgagcgcggccucuacaagucccucaagggcgccugcaagcucaagcucugcggcguccucggccuccgccucauggacggcaccugggccgccauccagaccuccgacgaggccaaguggugcccccccgaccagcucgucaacauccacgacuuccgcuccgacgagaucgagcaccucgucgucgaggagcucgucaagaagcgcgaggagugccucgacgcccucgaguccaucaugaccaccaaguccgucuccuuccgccgccucucccaccuccgcaagcucguccccggcuucggcaaggccuacaccaucuucaacaagacccucauggaggccgacgcccacuacaaguccguccgcaccuggaacgagaucauccccuccaagggcugccuccgcgucggcggccgcugccacccccacgucaacggcgucuucuucaacggcaucauccucggccccgacggccacguccucauccccgagaugcaguccucccuccuccagcagcacauggagcuccucgaguccuccgucaucccccucaugcacccccucgccgaccccuccaccgucuucaaggacgacgacgaggccgaggacuucgucgagguccaccuccccgacguccacaagcaggucuccggcgucgaccucggccuccccuccuggggcaaguacguccucauguccgucggcgccaugaucgcccucaugcucaugaucuuccucaccaccugcugccgcaaggccaacggcgccgaguccacccagcaccgccucggcgagaccggccgcaaggucuccgucaccucccaguccggccgcgucaucuccuccugggaguccuacaaguccggcggcgagaccaagcucuga

SEQ ID NO: 127945 - RNA, 1575 nt, Artificial Sequence
  derived and/or modified CDS sequence (opt2) from glycoprotein__RABV__LC071951.1
augaucccccaggcccuccucuucgucccccuccucgucuucucccucugcuucggcaaguuccccaucuacaccauccccgacaagcucggccccuggucccccaucgacauccaccaccucuccugccccaacaaccucgucgucgaggacgagggcugcaccaaccucuccggcuucuccuacauggagcucaaggucggcuacaucuccgccaucaaggucaacggcuucaccugcaccggcgucgucaccgaggccgagaccuacaccaacuucgucggcuacgucaccaccaccuucaagcgcaagcacuuccgccccacccccgacgccugccgcgccgccuacaacuggaagauggccggcgacccccgcuacgaggagucccuccacaaccccuaccccgacuaccacuggcuccgcaccgucaagaccaccaaggagucccucgucaucaucucccccuccgucuccgaccucgaccccuacgacaagucccuccacucccgcgucuuccccuccggcaagugcuccggcaucaccgucuccuccaccuacugccccaccaaccacgacuacaccaucuggaugcccgagaacccccgccucggcaccuccugcgacaucuucaccaccucccgcggcaagcgcgccuccaagggcggcaagaccugcggcuucgucgacgagcgcggccucuacaagucccucaagggcgccugcaagcucaagcucugcggcguccucggccuccgccucauggacggcaccugggccgccauccagaccuccgacgaggccaaguggugcccccccgaccagcucgucaacauccacgacuuccgcuccgacgagaucgagcaccucgucgucgaggagcucgucaagaagcgcgaggagugccucgacgcccucgaguccaucaugaccaccaaguccgucuccuuccgccgccucucccaccuccgccgccucguccccggcuucggcaaggccuacaccaucuucaacaagacccucauggaggccgacgcccacuacaaguccguccgcaccuggaacgagaucauccccuccaagggcugccuccgcgucggcggccgcugccacccccacgucaacggcgucuucuucaacggcaucauccucggccccgacggccacguccucauccccgagaugcaguccucccuccuccagcagcacauggagcuccucgaguccuccgucaucccccucaugcacccccucgccgaccccuccaccgucuucaaggacgacgacgaggccgaggacuucgucgagguccaccuccccgacguccacaagcaggucuccggcgucgaccucggccuccccuccuggggcaaguacguccucauguccgucggcgccaugaucgcccucaugcucaugaucuuccucaccaccugcugccgcaaggccaacggcgccgaguccacccagcaccgccucggcgagaccggccgcaaggucuccgucaccucccaguccggccgcgucaucuccuccugggaguccuacaaguccggcggcgagaccaagcucuga

SEQ ID NO: 127946 - RNA, 1575 nt, Artificial Sequence; identical to SEQ ID NO: 127941
  derived and/or modified CDS sequence (opt2) from glycoprotein__RABV__LC071952.1

SEQ ID NO: 127947 - RNA, 1575 nt, Artificial Sequence
  derived and/or modified CDS sequence (opt2) from glycoprotein__RABV__LC071953.1
augaucccccaggcccuccucuucgucccccuccucgucuucucccucugcuucggcaaguuccccaucuacaccauccccgacaagcucggccccuggucccccaucgacauccaccaccucuccugccccaacaaccucgucgucgaggacgagggcugcaccaaccucuccggcuucuccuacauggagcucaaggucggcuacaucuccgccaucaaggucaacggcuucaccugcaccggcgucgucaccgaggccgagaccuacaccaacuucgucggcuacgucaccaccaccuucaagcgcaagcacuuccgccccacccccgacgccugccgcgccgccuacaacuggaagauggccggcgacccccgcuacgaggagucccuccacaaccccuaccccgacuaccacuggcuccgcaccgucaagaccaccaaggagucccucgucaucaucucccccuccgucuccgaccucgaccccuacgacaagucccuccacucccgcgucuuccccuccggcaagugcuccggcaucaccgucuccuccaccuacugccccaccaaccacgacuacaccaucuggaugcccgagaacccccgccucggcaccuccugcgacaucuucaccaccucccgcggcaagcgcgccuccaagggcggcaagaccugcggcuucgucgacgagcgcggccucuacaagucccucaagggcgccugcaagcucaagcucugcggcguccucggccuccgccucauggacggcaccugggccgccauccagaccuccgacgaggccaaguggugcccccccgaccagcucgucaacauccacgacuuccgcuccgacgagaucgagcaccucgucgucgaggagcucgucaagaagcgcgaggagugccucgacgcccucgaguccaucaugaccaccaaguccgucuccuuccgccgccucucccaccuccgcaagcucguccccggcuucggcaaggccuacaccaucuucaacaagacccucauggaggccgacgcccacuacaaguccguccgcaccuggaacgagaucauccccuccaagggcugccuccgcgucggcggccgcugccacccccacgucaacggcgucuucuucaacggcaucauccucggccccgacggccacguccucauccccgagaugcaguccucccuccuccagcagcacauggagcuccucgaguccuccgucaucccccucaugcacccccucgccgaccccuccaccgucuucaaggacgacgacgaggccgaggacuucgucgagguccaccuccccgacguccacaagcaggucuccggcgucgaccucggccuccccuccuggggcaaguacguccucauguccgucggcgccaugaucgcccucacccucaugaucuuccucaccaccugcugccgcaaggccaacggcgccgaguccacccagcaccgccucggcgagaccggccgcaaggucuccgucaccucccaguccggccgcgucaucuccuccugggaguccuacaaguccggcggcgagaccaagcucuga

SEQ ID NO: 127948 - RNA, 1575 nt, Artificial Sequence
  derived and/or modified CDS sequence (opt2) from glycoprotein__RABV__LC071954.1
augaucccccaggcccuccucuucgucccccuccucgucuucucccucugcuucggcaaguuccccaucuacaccauccccgacaagcucggccccuggucccccaucgacauccaccaccucuccugccccaacaaccucgucgucgaggacgagggcugcaccaaccucuccggcuucuccuacauggagcucaaggucggcuacaucuccgccaucaaggucaacggcuucaccugcaccggcgucgucgccgaggccgagaccuacaccaacuucgucggcuacgucaccaccaccuucaagcgcaagcacuuccgccccacccccgacgccugccgcgccgccuacaacuggaagauggccggcgacccccgcuacgaggagucccuccacaaccccuaccccgacuaccacuggcuccgcaccgucaagaccaccaaggagucccucgucaucaucucccccuccgucuccgaccucgaccccuacgacaagucccuccacucccgcgucuuccccuccggcaagugcuccggcaucaccgucuccuccaccuacugccccaccaaccacgacuacaccaucuggaugcccgagaacccccgccucggcaccuccugcgacaucuucaccaccucccgcggcaagcgcgccuccaagggcggcaagaccugcggcuucgucgacgagcgcggccucuacaagucccucaagggcgccugcaagcucaagcucugcggcguccucggccuccgccucauggacggcaccugggccgccauccagaccuccgacgaggccaaguggugcccccccgaccagcucgucaacauccacgacuuccgcuccgacgagaucgagcaccucgucgucgaggagcucgucaagaagcgcgaggagugccucgacgcccucgaguccaucaugaccaccaaguccgucuccuuccgccgccucucccaccuccgcaaguucguccccggcuucggcaaggccuacaccaucuucaacaagacccucauggaggccgacgcccacuacaaguccguccgcaccuggaacgagaucauccccuccaagggcugccuccgcgucggcggccgcugccacccccacgucaacggcgucuucuucaacggcaucauccucggccccgacggccacguccucauccccgagaugcaguccucccuccuccagcagcacauggagcuccucgaguccuccgucaucccccucaugcacccccucgccgaccccuccaccgucuucaaggacgacgacgaggccgaggacuucgucgagguccaccuccccgacguccacaagcaggucuccggcgucgaccucggccuccccuccuggggcaaguacguccucauguccgucggcgccaugaucgcccucaugcucaugaucuuccucaccaccugcugccgcaaggccaacggcgccgaguccacccagcaccgccucggcgagaccggccgcaaggucuccgucaccucccaguccggccgcgucaucuccuccugggaguccuacaaguccggcggcgagaccaagcucuga

SEQ ID NO: 127949 - RNA, 1575 nt, Artificial Sequence
  derived and/or modified CDS sequence (opt2) from glycoprotein__RABV__LC071955.1
augaucccccaggcccuccucuucgucccccuccucgucuucucccucugcuucggcaaguuccccaucuacaccauccccgacaagcucggccccuggucccccaucgacauccaccaccucuccugccccaacaaccucgucgucgaggacgagggcugcaccaaccucuccggcuucuccuacauggagcucaaggucggcuacaucuccgccaucaaggucaacggcuucaccugcaccggcgucgucaccgaggccgagaccuacaccaacuucgucggcuacgucaccaccaccuucaagcgcaagcacuuccgccccacccccgacgccugccgcgccgccuacaacuggaagauggccggcgacccccgcuacgaggagucccuccacaaccccuaccccgacuaccacuggcuccgcaccgucaagaccaccaaggagucccucgucaucaucucccccuccgucuccgaccucgaccccuacgacaagucccuccacucccgcgucuuccccuccggcaagugcuccggcaucaccgucuccuccaccuacugccccaccaaccacgacuacaccaucuggaugcccgagaacccccgccucggcaccuccugcgacaucuucaccaccucccgcggcaagcgcgccuccaagggcggcaagaccugcggcuucgucgacgagcgcggccucuacaagucccucaagggcgccugcaagcucaagcucugcggcguccucggccuccgccucauggacggcaccugggccgccauccagaccuccgacgaggccaaguggugcccccccgaccagcucgucaacauccacgacuuccgcuccgacgagaucgagcaccucgucgucgaggagcucgucaagaagcgcgaggagugccucgacgcccucgagcccaucaugaccaccaaguccgucuccuuccgccgccucucccaccuccgcaagcucguccccggcuucggcaaggccuacaccaucuucaacaagacccucauggaggccgacgcccacuacaaguccguccgcaccuggaacgagaucauccccuccaagggcugccuccgcgucggcggccgcugccacccccacgucaacggcgucuucuucaacggcaucauccucggccccgacggccacguccucauccccgagaugcaguccucccuccuccagcagcacauggagcuccucgaguccuccgucaucccccucaugcacccccucgccgaccccuccaccgucuucaaggacgacgacgaggccgaggacuucgucgagguccaccuccccgacguccacaagcaggucuccggcgucgaccucggccuccccuccuggggcaaguacguccucauguccgucggcgccaugaucgcccucaugcucaugaucuuccucaccaccugcugccgcaaggccaacggcgccgaguccacccagcaccgccucggcgagaccggccgcaaggucuccgucaccucccaguccggccgcgucaucuccuccugggaguccuacaaguccggcggcgagaccaagcucuga

SEQ ID NO: 127950 - RNA, 1575 nt, Artificial Sequence
  derived and/or modified CDS sequence (opt2) from glycoprotein__RABV__LC071956.1
augaucccccaggcccuccucuucgucccccuccucgucuucucccucugcuucggcaaguuccccaucuacaccauccccgacaagcucggccccuggucccccaucgacauccaccaccucuccugccccaacaaccucgucgucgaggacgagggcugcaccaaccucuccggcuucuccuacauggagcucaaggucggcuacaucuccgccaucaaggucaacggcuucaccugcaccggcgucgucaccgaggccgagaccuacaccaacuucgucggcuacgucaccaccaccuucaagcgcaagcacuuccgccccacccccgacgccugccgcgccgccuacaacuggaagauggccggcgacccccgcuacgaggagucccuccacaaccccuaccccgacuaccacuggcuccgcaccgucaagaccaccaaggagucccucgucaucaucucccccuccgucuccgaccucgaccccuacgacaagucccuccacuccaaggucuuccccuccggcaagugcuccggcaucaccgucuccuccaccuacugccccaccaaccacgacuacaccaucuggaugcccgagaacccccgccucggcaccuccugcgacaucuucaccaccucccgcggcaagcgcgccuccaagggcggcaagaccugcggcuucgucgacgagcgcggccucuacaagucccucaagggcgccugcaagcucaugcucugcggcguccucggccuccgccucauggacggcaccugggccgccauccagaccuccgacgaggccaaguggugcccccccgaccagcucgucaacauccacgacuuccgcuccgacgagaucgagcaccucgucgucgaggagcucgucaagaagcgcgaggagugccucgacgcccucgaguccaucaugaccaccaaguccgucuccuuccgccgccucucccaccuccgcaagcucguccccggcuucggcaaggccuacaccaucuucaacaagacccucauggaggccgacgcccacuacaaguccguccgcaccuggaacgagaucauccccuccaagggcugccuccgcgucggcggccgcugccacccccacgucaacggcgucuucuucaacggcaucauccucggccccgacggccacguccucauccccgagaugcaguccucccuccuccagcagcacauggagcuccucgaguccuccgucaucccccucaugcacccccucgccgaccccuccaccgucuucaaggacgacgacgaggccgaggacuucgucgagguccaccuccccgacguccacaagcaggucuccggcgucgaccucggccuccccuccuggggcaaguacguccucauguccgucggcgccaugaucgcccucaugcucaugaucuuccucaccaccugcugccgcaaggccaacggcgccgaguccacccagcaccgccucggcgagaccggccgcaaggucuccgucaccucccaguccggccgcgucaucuccuccugggaguccuacaaguccggcggcgagaccaagcucuga

SEQ ID NO: 127951 - RNA, 1575 nt, Artificial Sequence; identical to SEQ ID NO: 127950
  derived and/or modified CDS sequence (opt2) from glycoprotein__RABV__LC071957.1

SEQ ID NO: 127952 - RNA, 1575 nt, Artificial Sequence
  derived and/or modified CDS sequence (opt2) from glycoprotein__RABV__LC071958.1
augaucccccaggcccuccucuucgucccccuccucgucuucuccuccugcuucggcaaguuccccaucuacaccauccccgacaagcucggccccuggucccccaucgacauccaccaccucuccugccccaacaaccucgucgucggcgacgagggcugcaccaaccucuccggcuucuccuacauggagcucaaggucggcuacaucuccgccaucaaggucaacggcuucaccugcaccggcgucgucaccgaggccgagaccuacaccaacuucgucggcuacgucaccaccaccuucaagcgcaagcacuuccgccccacccccgacgccugccgcgccgccuacaacuggaagauggccggcgacccccgcuacgaggagucccuccacaaccccuaccccgacuaccacuggcuccgcaccgucaagaccaccaaggagucccucgucaucaucucccccuccgucuccgaccucgaccccuacgacaagucccuccacucccgcgucuuccccuccggcaagugcuccggcaucaccgucuccuccaccuacugccccaccaaccacgacuacaccaucuggaugcccgagaacccccgccucggcaccuccugcgacaucuucaccaccucccgcggcaagcgcgccuccaagggcggcaagaccugcggcuucgucgacgagcgcggccucuacaagucccucaagggcgccugcaagcucaugcucugcggcguccucggccuccgccucaccgacggcaccugggccgccauccagaccuccgacgaggccaaguggugcccccccgaccagcucgucaacauccacgacuuccgcuccgacgagaucgagcaccucgucgucgaggagcucgucaagaagcgcgaggagugccucgacgcccucgaguccaucaugaccaccaaguccgucuccuuccgccgccucucccaccuccgcaagcucguccccggcuucggcaaggccuacaccaucuucaacaagacccucauggaggccgacgcccacuacaaguccguccgcaccuggaacgagaucauccccuccaagggcugccuccgcgucggcggccgcugccacccccacgucaacggcgucuucuucaacggcaucauccucggccccgacggccacguccucauccccgagauccaguccucccuccuccagcagcacauggagcuccucgaguccuccgucaucccccucaugcacccccucgccgaccccuccaccgucuucaaggacgacgacgaggccgaggacuucgucgagguccaccuccccgacguccacaagcaggucuccggcgucgaccucggccuccccuccuggggcaaguacguccucauguccgucggcgccaugaucgcccucaugcucaugaucuuccucaccaccugcugccgcaaggccaacggcgccgaguccacccagcaccgccucggcgagaccggccgcaaggucuccgucaccucccaguccggccgcgucaucuccuccugggaguccuacaaguccggcggcgagaccaagcucuga

SEQ ID NO: 127953 - RNA, 1575 nt, Artificial Sequence; identical to SEQ ID NO: 127941
  derived and/or modified CDS sequence (opt2) from glycoprotein__RABV__LC071959.1

SEQ ID NO: 127954 - RNA, 1575 nt, Artificial Sequence
  derived and/or modified CDS sequence (opt2) from glycoprotein__RABV__LC071960.1
augaucccccaggcccuccucuucgucccccuccucgucuucucccucugcuucggcaaguuccccaucuacaccauccccgacaagcucggccccuggucccccaucgacauccaccaccucuccugccccaacaaccucgucgucgaggacgagggcugcaccaaccucuccggcuucuccuacauggagcucaaggucggcuacaucuccgccaucaaggucaacggcuucaccugcaccggcgucgucaccgaggccgagaccuacaccaacuucgucggcuacgucaccaccaccuucaagcgcaagcacuuccgccccacccccgacgccugccgcgccgccuacaacuggaagauggccggcgacccccgcuacgaggagucccuccacaaccccuaccccgacuaccacuggcuccgcaccgucaagaccaccaaggagucccucgucaucaucucccccuccgucuccgaccucgaccccuacgacaagucccuccacucccgcgucuuccccuccggcaagugcuccggcaucaccgucuccuccaccuacugccccaccaaccacgacuacaccaucuggaugcccgagaacccccgccucggcaccuccugcgacaucuucaccaccucccgcggcaagcgcgccuccaagggcggcaagaccugcggcuucgucgacgagcgcggccucuacaagucccucaagggcgccugcaagcucaagcucugcggcguccucggccuccgccucauggacggcaccuggggcgccauccagaccuccgacgaggccaaguggugcccccccgaccagcucgucaacauccacgacuuccgcuccgacgagaucgagcaccucgucgucgaggagcucgucaagaagcgcgaggagugccucgacgcccucgaguccaucaugaccaccaaguccgucuccuuccgccgccucucccaccuccgcaagcucguccccggcuucggcaaggccuacaccaucuucaacaagacccucauggaggccgacgcccacuacaaguccguccgcaccuggaacgagaucauccccuccaagggcugccuccgcgucggcggccgcugccacccccacgucaacggcgucuucuucaacggcaucauccucggccccgacggccacguccucauccccgagaugcaguccucccuccuccagcagcacauggagcuccucgaguccuccgucaucccccucaugcacccccucgccgaccccuccaccgucuucaaggacgacgacgaggccgaggacuucgccgagguccaccuccccgacguccacaagcaggucuccggcgucgaccucggccuccccuccuggggcaaguacguccucauguccgucggcgccaugaucgcccucaugcucaugaucuuccucaccaccugcugccgcaaggccaacggcgccgaguccacccagcaccgccucggcgagaccggccgcaaggucuccgucaccucccaguccggccgcgucaucuccuccugggaguccuacaaguccggcggcgagaccaagcucuga

SEQ ID NO: 127955 - RNA, 1575 nt, Artificial Sequence
  derived and/or modified CDS sequence (opt2) from glycoprotein__RABV__LC071961.1
augaucccccaggcccuccucuucgucccccuccucgucuucucccucugcuucggcaaguuccccaucuacaccauccccgacaagcucggccccuggucccccaucgacauccaccaccucuccugccccaacaaccucgucgucgaggacgagggcugcaccaaccucuccggcuucuccuacauggagcucaaggucggcuacaucuccgccaucaaggucaacggcuucaccugcaccggcgucgucaccgaggccgagaccuacaccaacuucgucggcuacgucaccaccaccuucaagcgcaagcacuuccgccccacccccgacgccugccgcgccgccuacaacuggaagauggccggcgacccccgcuacgaggagucccuccacaaccccuaccccgacuaccacuggcuccgcaccgucaagaccaccaaggagucccucgacaucaucucccccuccgucuccgaccucgaccccuacgacaagucccuccacucccgcgucuuccccuccggcaagugcuccggcaucaccgucuccuccaccuacugccccaccaaccacgacuacaccaucuggaugcccgagaacccccgccucggcaccuccugcgacaucuucaccaccucccgcggcaagcgcgccuccaagggcggcaagaccugcggcuucgucgacgagcgcggccucuacaagucccucaagggcgccugcaagcucaagcucugcggcguccucggccuccgccucauggacggcaccugggccgccauccagaccuccgacgaggccaaguggugcccccccgaccagcucgucaacauccacgacuuccgcuccgacgagaucgagcaccucgucgucgaggagcucgucaagaagcgcgaggagugccucgacgcccucgaguccaucaugaccaccaaguccgucuccuuccgccgccucucccaccuccgcaagcucguccccggcuucggcaaggccuacaccaucuucaacaagacccucauggaggccgacgcccacuacaaguccguccgcaccuggaacgagaucauccccuccaagggcugccuccgcgucggcggccgcugccacccccacgucaacggcgucuucuucaacggcaucauccucggccccgacggccacguccucauccccgagaugcaguccucccuccuccagcagcacauggagcuccucgaguccuccgucaucccccucaugcacccccucgccgaccccuccaccgucuucaaggacgacgacgaggccgaggacuucgucgagguccaccuccccgacguccacaagcaggucuccggcgucgaccucggccuccccuccuggggcaaguacguccucauguccgucggcgccaugaucgcccucaugcucaugaucuuccucaccaccugcugccgcaaggccaacggcgccgaguccacccagcaccgccucggcgagaccggccgcaaggucuccgucaccucccaguccggccgcgucaucuccuccugggaguccuacaaguccggcggcgagaccaagcucuga

SEQ ID NO: 127956 - RNA, 1575 nt, Artificial Sequence; identical to SEQ ID NO: 127941
  derived and/or modified CDS sequence (opt2) from glycoprotein__RABV__LC071962.1

SEQ ID NO: 127957 - RNA, 1575 nt, Artificial Sequence; identical to SEQ ID NO: 127941
  derived and/or modified CDS sequence (opt2) from glycoprotein__RABV__LC071963.1

SEQ ID NO: 127958 - RNA, 1575 nt, Artificial Sequence
  derived and/or modified CDS sequence (opt2) from glycoprotein__RABV__LC071965.1
augaucccccaggcccuccucuucgucccccuccucgucuucucccucugcuucggcaaguuccccaucuacaccauccccgacaagcucggccccuggucccccaucgacauccaccaccucuccugccccaacaaccucgucgucgaggacgagggcugcaccaaccucuccggcuucuccuacauggagcucaaggucggcuacaucuccgccaucaaggucaacggcuucaccugcaccggcgucgucaccgaggccgagaccuacaccaacuucgucggcuacgucaccaccaccuucaagcgcaagcacuuccgccccacccccgacgccugccgcgccgccuacaacuggaagauggccggcgacccccgcuacgaggagucccuccacaaccccuaccccgacuaccacuggcuccgcaccgucaagaccaccaaggagucccucgucaucaucucccccuccgucuccgaccucgaccccuacgacaagucccuccacucccgcgucuuccccuccggcaagugcuccggcaucaccgucuccuccaccuacugccccaccaaccacgacuacaccaucuggaugcccgagaacccccgccucggcaccuccugcgacaucuucaccaccucccgcggcaagcgcgccuccaagggcggcaagaccugcggcuucgucgacgagcgcggccucuacaagucccucaagggcgccugcaagcucaagcucugcggcguccucggccuccgccucauggacggcaccugggccgccauccagaccuccgacgaggccaaguggugcccccccgaccagcucgucaacauccacgacuuccgcuccgacgagaucgagcaccucgucgucgaggagcucgucaagaagcgcgaggagugccucgacgcccucgaguccaucaugaccaccaaguccgucuccuuccgccgccucucccaccuccgcaagcucguccccggcuucggcaaggccuacaccaucuucaacaagacccucauggaggccgacgcccacuacaaguccguccgcaccuggaacgagaucauccccuccaagggcugccuccgcgucggcggccgcugccacccccacgucaacggcgucuucuucaacggcaucauccucggccccgacggccacguccucauccccgagaugcaguccucccuccuccagcagcacauggagcuccucgaguccuccgucaucccccucaugcacccccucgccgaccccuccaccgucuucaaggacgacgacgaggccgaggacuucgucgagguccaccuccccgacguccacaagcaggucuccggcgucgaccucggccuccccuccuggggcaaguacguccucauguccgucggcgccaugaucgcccucaugcucaugaucuuccucaccaugugcugccgcaaggccaacggcgccgaguccacccagcaccgccucggcgagaccggccgcaaggucuccgucaccucccaguccggccgcgucaucuccuccugggaguccuacaaguccggcggcgagaccaagcucuga

SEQ ID NO: 127959 - RNA, 1575 nt, Artificial Sequence
  derived and/or modified CDS sequence (opt2) from glycoprotein__RABV__LC071966.1
augaucccccaggcccuccucuucgucccccuccucgucuucucccucugcuucggcaaguuccccaucuacaccauccccgacaagcucggccccuggucccccaucgacauccaccaccucuccugccccaacaaccucgucgucgaggacgagggcugcaccaaccucuccggcuucuccuacauggagcucaaggucggcuacaucuccgccaucaaggucaacggcuucaccugcaccggcgucgucaccgaggccgagaccuacaccaacuucgucggcuacgucaccaccaccuucaagcgcaagcacuuccgccccacccccgacgccugcuccgccgccuacaacuggaagauggccggcgacccccgcuacgaggagucccuccacaaccccuaccccgacuaccacuggcuccgcaccgucaagaccaccaaggagucccucgucaucaucucccccuccgucuccgaccucgaccccuacgacaagucccuccacucccgcgucuuccccuccggcaagugcuccggcaucaccgucuccuccaccuacugccccaccaaccacgacuacaccaucuggaugcccgagaacccccgccucggcaccuccugcgacaucuucaccaccucccgcggcaagcgcgccuccaagggcggcaagaccugcggcuucgccgacgagcgcggccucuacaagucccucaagggcgccugcaagcucaagcucugcggcguccucggccuccgccucauggacggcaccugggccgccauccagaccuccgacgaggccaaguggugcccccccgaccagcucgucaacauccacgacuuccgcuccgacgagaucgagcaccucgucgucgaggagcucgucaagaagcgcgaggagugccucgacgcccucgaguccaucaugaccaccaaguccgucuccuuccgccgccucucccaccuccgcaagcucguccccggcuucggcaaggccuacaccaucuucaacaagacccucauggaggccgacgcccacuacaaguccguccgcaccuggaacgagaucauccccuccaagggcugccuccgcgucggcggccgcugccacccccacgucaacggcgucuucuucaacggcaucauccucggccccgacggccacguccucauccccgagaugcaguccucccuccuccagcagcacauggagcuccucgaguccuccgucaucccccucaugcacccccucgccgaccccuccaccgucuucaaggacgacgacgaggccgaggacuucgucgagguccaccuccccgacguccacaagcaggucuccggcgucgaccucggccuccccuccuggggcaaguacguccucauguccgucggcgccaugaucgcccucaugcucaugaucuuccucaccaugugcugccgcaaggccaacggcgccgaguccacccagcaccgccucggcgagaccggccgcaaggucuccgucaccucccaguccggccgcgucaucuccuccugggaguccuacaaguccggcggcgagaccaagcucuga

SEQ ID NO: 127960 - RNA, 1575 nt, Artificial Sequence
  derived and/or modified CDS sequence (opt2) from glycoprotein__RABV__LC071967.1
augaucccccaggcccuccucuucgucccccuccucgucuucucccucugcuucggcaaguuccccaucuacaccauccccgacaagcucggccccuggucccccaucgacauccaccaccucuccugccccaacaaccucgucgucgaggacgagggcugcaccaaccucuccggcuucuccuacauggagcucaaggucggcuacaucuccgccaucaaggucaacggcuucaccugcaccggcgucgucaccgaggccgagaccuacaccaacuucgucggcuacgucaccaccaccuucaagcgcaagcacuuccgccccacccccgacgccugccgcgccgccuacaacuggaagauggccggcgacccccgcuacgaggagucccuccacaaccccuaccccgacuaccacuggcuccgcaccgucaagaccaccaaggagucccucgucaucaucucccccuccgucuccgaccucgaccccuacgacaagucccuccacucccgcgucuuccccuccggcaagugcuccggcaucaccgucuccuccaccuacugccccaccaaccacgacuacaccaucuggaugcccgagaacccccgccucggcaccuccugcgacaucuucaccaccucccgcggcaagcgcgccuccaagggcggcaagaccugcggcuucgucgacgagcgcggccucuacaagucccucaagggcgccugcaagcucaagcucugcggcguccucggccuccgccucauggacggcaccugggccgccauccagaccuccgacgaggccaaguggugcccccccgaccagcucgucaacauccacgacuuccgcuccgacgagaucgagcaccucgucgucgaggagcucgucaagaagcgcgaggagugccucgacgcccucgaguccaucaugaccaccaaguccgucuccuuccgccgcuucucccaccuccgcaagcucguccccggcuucggcaaggccuacaccaucuucaacaagacccucauggaggccgacgcccacuacaaguccguccgcaccuggaacgagaucauccccuccaagggcugccuccgcgucggcggccgcugccacccccacgucaacggcgucuucuucaacggcaucauccucggccccgacggccacguccucauccccgagaugcaguccucccuccuccagcagcacauggagcuccucgaguccuccgucaucccccucaugcacccccucgccgaccccuccaccgucuucaaggacgacgacgaggccgaggacuucgucgagguccaccuccccgacguccacaagcaggucuccggcgucgaccucggccuccccuccuggggcaaguacguccucauguccgucggcgccaugaucgcccucaugcucaugaucuuccucaccaugugcugccgcaaggccaacggcgccgaguccacccagcaccgccucggcgagaccggccgcaaggucuccgucaccucccaguccggccgcgucaucuccuccugggaguccuacaaguccggcggcgagaccaagcucuga

SEQ ID NO: 127961 - RNA, 1575 nt, Artificial Sequence; identical to SEQ ID NO: 127958
  derived and/or modified CDS sequence (opt2) from glycoprotein__RABV__LC071968.1

SEQ ID NO: 127962 - RNA, 1575 nt, Artificial Sequence
  derived and/or modified CDS sequence (opt2) from glycoprotein__RABV__LC071969.1
augaucccccaggcccuccucuucgucccccuccucgucuucuccuccugcuucggcaaguuccccaucugcaccauccccgacaagcucggccccuggucccccaucgacauccaccaccucuccugccccaacaaccucgucgucgaggacgagggcugcaccaaccucuccggcuucuccuacauggagcucaaggucggcuacaucuccgccaucaaggucaacggcuucaccugcaccggcgucgucaccgaggccgagaccuacaccaacuucgucggcuacgucaccaccaccuucaagcgcaagcacuuccgccccacccccgacgccugccgcgccgccuacaacuggaagauggccggcgacccccgcuacgaggagucccuccacaaccccuaccccgacuaccacuggcuccgcaccgucaagaccaccaaggagucccucgucaucaucucccccuccgucuccgaccucgaccccuacgacaagucccuccacucccgcgucuuccccuccggcaagugcuccggcaucaccgucuccuccaccuacugccccaccaaccacgacuacaccgucuggaugcccgagaacccccgccucggcaccuccugcgacaucuucaccaacucccgcggcaagcgcgccuccaagggcggcaagaccugcggcuucgucgacgagcgcggccucuacaagucccucaagggcgccugcaagcucaagcucugcggcguccucggccuccgccucauggacggcaccugggucgccauccagaccuccgacgaggccaaguggugcccccccgaccagcucgucaacauccacgacuuccgcuccgacgagaucgagcaccucgucgucgaggagcucgucaagaagcgcgaggagugccucgacgcccucgaguccaucaugaccaccaaguccgucuccuuccgccgccucucccaccuccgcaagcucguccccggcuucggcaaggccuacaccaucuucaacaagacccucauggaggccgacgcccacuacaaguccguccgcaccuggaacgagaucauccccuccaagggcugccuccgcgucggcggccgcugccacccccacgucaacggcgucuucuucaacggcaucauccucggccccgacggccacguccucauccccgagaugcaguccucccuccuccagcagcacauggagcuccucgaguccuccgucaucccccucaugcacccccucgccgaccccuccaccgucuucaaggacggcgacgaggccgaggacuucgucgagguccaccuccccgacguccacaagcaggucuccggcgucgaccucggccuccccuccuggggcaaguacguccucauguccgucggcgccaugaucgcccucaugcucaugaucuuccucaugaccugcugccgcaaggccaacggcgccgagaccauccagcaccgccucggcgagaccggccgcaaggucuccgucaccucccaguccggccgcgucaucuccuccugggaguccuacaaguccggcggcgagaccaagcucuga

SEQ ID NO: 127963 - RNA, 1575 nt, Artificial Sequence
  derived and/or modified CDS sequence (opt2) from glycoprotein__RABV__LC071970.1
augaucccccaggcccuccucuucgucccccuccucgucuucuccuccugcuucggcaaguuccccaucuacaccauccccgacaagcucggccccuggucccccaucgacauccaccaccucuccugccccaacaaccucgucgucgaggacgagggcugcaccaaccucuccggcuucuccuacauggagcucaaggucggcuacaucuccgccaucaaggucaacggcuucaccugcaccggcgucgucaccgaggccgagaccuacaccaacuucgucggcuacgucaccaccaccuucaagcgcaagcacuuccgccccacccccgacgccugccgcgccgccuacaacuggaagauggccggcgacccccgcuacgaggagucccuccacaaccccuaccccgacuaccacuggcuccgcaccgucaagaccaccaaggagucccucgucaucaucucccccuccgucuccgaccucgaccccuacgacaaguccuuccacucccgcgucuuccccuccggcaagugcuccggcaucaccgucuccuccaccuacugccccaccaaccacgacuacaccaucuggaugcccgagaacccccgccucggcaccuccugcgacaucuucaccaacucccgcggcaagcgcgccuccaagggcggcaagaccugcggcuucgucgacgagcgcggccucuacaagucccucaagggcgccugcaagcucaagcucugcggcguccucggccuccgccucauggacggcaccugggucgccauccagaccuccgacgaggccaaguggugcccccccgaccagcucgucaacauccacgacuuccgcuccgacgagaucgagcaccucgucgucgaggagcucgucaagaagcgcgaggagugccucgacgcccucgaguccaucaugaccaccaaguccgucuccuuccgccgccucucccaccuccgcaagcucguccccggcuucggcaaggccuacaccaucuucaacaagacccucauggaggccgacgcccacuacaaguccguccgcaccuggaacgagaucauccccuccaagggcugccuccgcgucggcggccgcugccacccccacgucaacggcgucuucuucaacggcaucauccucggccccgacggccacguccucauccccgagaugcaguccucccuccuccagcagcacauggagcuccucgaguccuccgucaucccccucaugcacccccucgccgaccccuccaccgucuucaaggacggcgacgaggccgaggacuucgucgagguccaccuccccgacguccacaagcaggucuccggcgucgaccucggccuccccuccuggggcaaguacguccucauguccgucggcgccaugaucgcccucaugcucaugaucuuccucaugaccugcugccgcaaggccaacggcgccgagaccauccagcaccgccucggcgagaccggccgcaaggucuccgucaccucccaguccggccgcgucaucuccuccugggaguccuacaaguccggcggcgagaccaagcucuga

SEQ ID NO: 127964 - RNA, 1575 nt, Artificial Sequence
  derived and/or modified CDS sequence (opt2) from glycoprotein__RABV__LC071971.1
augaucccccaggcccuccucuucgucccccuccucgucuucuccuccugcuucggcaaguuccccaucuacaccauccccgacaagcucggccccuggucccccaucgacauccaccaccucuccugccccaacaaccucgucgucgaggacgagggcugcaccaaccucuccggcuucuccuacauggagcucaaggucggcuacaucuccgccaucaaggucaacggcuucaccugcaccggcgucgucaccgaggccgagaccuacaccaacuucgucggcuacgucaccaccaccuucaagcgcaagcacuuccgccccacccccgacgccugccgcgccgccuacaacuggaagauggccggcgacccccgcuacgaggagucccuccacaaccccuaccccgacuaccacuggcuccgcaccgucaagaccaccaaggagucccucgucaucaucucccccuccgucuccgaccucgaccccuacgacaagucccuccacucccgcgucuuccccuccggcaagugcuccggcaucaccgucuccuccaccuacugccccaccaaccgcgacuacaccaucuggaugcccgagaacccccgccucggcaccuccugcgacaucuucaccaacucccgcggcaagcgcgccuccaagggcggcaagaccugcggcuucgucgacgagcgcggccucuacaagucccucaagggcgccugcaagcucaagcucugcggcguccucggccuccgccucauggacggcaccugggucgccauccagaccuccgacgaggccaaguggugcccccccgaccagcucgucaacauccacgacuuccgcuccgacgagaucgagcaccucgucgucgaggagcucgucaagaagcgcgaggagugccucgacgcccucgaguccaucaugaccaccaaguccgucuccuuccgccgccucucccaccuccgcaagcucguccccggcuucggcaaggccuacaccaucuucaacaagacccucauggaggccgacgcccacuacaaguccguccgcaccuggaacgagaucauccccuccaagggcugccuccgcgucggcggccgcugccacccccacgucaacggcgucuucuucaacggcaucauccucggccccgacggccacguccucauccccgagaugcaguccucccuccuccagcagcacauggagcuccucgaguccuccgucaucccccucaugcacccccucgccgaccccuccaccgucuucaaggacggcgacgaggccgaggacuucgucgagguccaccuccccgacguccacaagcaggucuccggcgucgaccucggccuccccuccuggggcaaguacguccucauguccgucggcgccaugaucgcccucaugcucaugaucuuccucaugaccugcugccgcaaggccaacggcgccgagaccauccagcaccgccucggcgagaccggccgcaaggucuccgucaccucccaguccggccgcgucaucuccuccugggaguccuacaaguccggcggcgagaccaagcucuga

SEQ ID NO: 127965 - RNA, 1575 nt, Artificial Sequence; identical to SEQ ID NO: 127064
  derived and/or modified CDS sequence (opt2) from glycoprotein__RABV__LC071972.1

SEQ ID NO: 127966 - RNA, 1575 nt, Artificial Sequence
  derived and/or modified CDS sequence (opt2) from glycoprotein__RABV__LC071973.1
augaucccccaggcccuccucuucgucccccuccucgucuucuccuccugcuucggcaaguuccccaucuacaccauccccgacaagcucggccccuggucccccaucgacauccaccaccucuccugccccaacaaccucgucgucgaggacgagggcugcaccaaccucuccggcuucuccuacauggagcucaaggucggcuacaucuccgccaucaaggucaacggcuucaccugcaccggcgucgucaccgaggccgagaccuacaccaacuucgucggcuacgucaccaccaccuucaagcgcaagcacuuccgccccacccccgacgccugccgcgccgccuacaacuggaagauggccggcgacccccgcuacgaggagucccuccacaaccccuaccccgacuaccacuggcuccgcaccgucaagaccaccaaggagucccucgucaucaucucccccuccgucuccgaccucgaccccuacgacaagucccuccacucccgcgucuuccccuccggcaagugcuccggcaucaccgucuccuccaccuacugccccaccaaccacgacuacaccaucuggaugcccgagaacccccgccucggcaccuccugcgacaucuucaccaacucccgcggcaagcgcgccuccaagggcggcaagaccugcggcuucgucgacgagcgcggccucuacaagucccucaagggcgccugcaagcucaagcucugcggcguccucggccuccgccucauggacggcaccugggucgccauccagaccuccgacgaggccaaguggugcccccccgaccagcucgucaacauccacgacuuccgcuccgacgagaucgagcaccucgucgucgaggagcucgucaagaagcgcgaggagugccucgacgcccucgaguccaucaugaccaccaaguccgucuccuuccgccgccucucccaccuccgcaagcucguccccggcuucggcaaggccuacaccaucuucaacaagacccucauggaggccgacgcccacuacaaguccguccgcaccuggaacgagaucauccccuccaagggcugccuccgcgucggcggccgcugccacccccacgucaacggcgucuucuucaacggcaucauccucggccccgacggccacguccucauccccgagaugcaguccucccuccuccagcagcacaugggccuccucgaguccuccgucaucccccucaugcacccccucgccgaccccuccaccgucuucaaggacggcgacgaggccgaggacuucgucgagguccaccuccccgacguccacaagcaggucuccggcgucgaccucggccuccccuccuggggcaaguacguccucauguccgucggcgccaugaucgcccucaugcucaugaucuuccucaugaccugcugccgcaaggccaacggcgccgagaccauccagcaccgccucggcgagaccggccgcaaggucuccgucaccucccaguccggccgcgucaucuccuccugggaguccuacaaguccggcggcgagaccaagcucuga

SEQ ID NO: 127967 - RNA, 1575 nt, Artificial Sequence
  derived and/or modified CDS sequence (opt2) from glycoprotein__RABV__LC071974.1
augaucccccaggcccuccucuucgucccccuccucgucuucuccuccugcuucggcaaguuccccaucuacaccauccccgacaagcucggccccuggucccccaucgacauccaccaccucuccugccccaacaaccucgucgucgaggacgagggcugcaccaaccucuccggcuucuccuacauggagcucaaggucggcuacaucuccgccaucaaggucaacggcuucaccugcaccggcgucgucaccgaggccgagaccuacaccaacuucgucggcuacgucaccaccaccuucaagcgcaagcacuuccgccccacccccgacgccugccgcgccgccuacaacuggaagauggccggcgacccccgcuacgaggagucccuccacaaccccuaccccgacuaccacuggcuccgcaccgucaagaccaccaaggagucccucgucaucaucucccccuccgucuccgaccucgaccccuacgacaagucccuccacucccgcgucuuccccuccggcaagugcuccggcaucaccgucuccuccaccuacugccccaccaaccacgacuacaccaucuggaugcccgagaacccccgccucggcaccuccugcgacaucuucaccaacucccgcggcaagcgcgccuccaagggcggcaagaccugcggcuucgucgacgagcgcggccucuacaagucccucaagggcgccugcaagcucaagcucugcggcguccucggccuccgccucauggacggcaccugggucgccauccagaccuccgacgaggccaaguggugcccccccgaccagcucgucaacauccacgacuuccgcuccgacgagaucgagcaccucgucgucgaggagcucgucaagaagcgcgaggagugccucgacgcccucgaguccaucaugaccaccaaguccgucuccuucggccgccucucccaccuccgcaagcucguccccggcuucggcaaggccuacaccaucuucaacaagacccucauggaggccgacgcccacuacaaguccguccgcaccuggaacgagaucauccccuccaagggcugccuccgcgucggcggccgcugccacccccacgucaacggcgucuucuucaacggcaucauccucggccccgacggccacguccucauccccgagguccaguccucccuccuccagcagcacauggagcuccucgaguccuccgucaucccccucaugcacccccucgccgaccccuccaccgucuucaaggacggcgacgaggccgaggacuucgucgagguccaccuccccgacguccacaagcaggucuccggcgucgaccucggccuccccuccuggggcaaguacguccucauguccgucggcgccaugaucgcccucaugcucaugaucuuccucaugaccugcugccgcaaggccaacggcgccgagaccauccagcaccgccucggcgagaccggccgcaaggucuccgucaccucccaguccggccgcgucaucuccuccugggaguccuacaaguccggcggcgagaccaagcucuga

SEQ ID NO: 127968 - RNA, 1575 nt, Artificial Sequence
  derived and/or modified CDS sequence (opt2) from glycoprotein__RABV__LC071975.1
augaucccccaggcccuccucuucgucccccuccucgucuucuccuccugcuucggcaaguuccccaucuacaccauccccgacaagcucggccccuggucccccaucgacauccaccaccucuccugccccaacaaccucgucgucgaggacgagggcugcaccaaccucuccggcuucuccuacauggagcucaaggucggcuacaucuccgccaucaaggucaacggcuucaccugcaccggcgucgucaccgaggccgagaccuacaccaacuucgucggcuacgucaccaccaccuucaagcgcaagcacuuccgccccacccccgacgccugccgcgccgccuacaacuggaagauggccggcgacccccgcuacgaggagucccuccacaaccccuaccccgacuaccacuggcuccgcaccgucaagaccaccaaggagucccucgucaucaucucccccuccgucuccgaccucgaccccuacgacaagucccuccacucccgcgucuuccccuccggcaagugcuccggcaucaccgucuccuccaccuacugccccaccaaccacgacuacaccaucuggaugcccgagaacccccgccucggcaccuccugcgacaucuucaccaacucccgcggcaagcgcgccuccaagggcggcaagaccugcggcuucgucgacgagcgcggccucuacaagucccucaagggcgccugcaagcucaagcucugcggcguccucggccuccgccucauggacggcaccugggucgccauccagaccuccgacgaggccaaguggugcccccccgaccagcucgucaacauccacgacuuccgcuccgacgagaucgagcaccucgucgucgaggagcucgucaagaagcgcgaggagugccucgacgcccucgaguccgucaugaccaccaaguccgucuccuuccgccgccucucccaccuccgcaagcucguccccggcuucggcaaggccuacaccaucuucaacaagacccucauggaggccgacgcccacuacaaguccguccgcaccuggaacgagaucauccccuccaagggcugccuccgcgucggcggccgcugccacccccacgucaacggcgucuucuucaacggcaucauccucggccccgacggccacguccucauccccgagaugcaguccucccuccuccagcagcacauggagcuccucgaguccuccgucaucccccucaugcacccccucgccgaccccuccaccgucuucaaggacggcgacgaggccgaggacuucgucgagguccaccuccccgacguccacaagcaggucuccggcgucgaccucggccuccccuccuggggcaaguacguccucauguccgucggcgccaugaucgcccucaugcucaugaucuuccucaugaccugcugccgcaaggccaacggcgccgagaccauccagcaccgccucggcgagaccggccgcaaggucuccgucaccucccaguccggccgcgucaucuccuccugggaguccuacaaguccggcggcgagaccaagcucuga

SEQ ID NO: 127969 - RNA, 1575 nt, Artificial Sequence; identical to SEQ ID NO: 127064
  derived and/or modified CDS sequence (opt2) from glycoprotein__RABV__LC071976.1

SEQ ID NO: 127970 - RNA, 1575 nt, Artificial Sequence
  derived and/or modified CDS sequence (opt2) from glycoprotein__RABV__LC071977.1
augaucccccaggcccuccucuucgucccccuccucgucuucuccuccugcuucggcaaguuccccaucuacaccauccccgacaagcucggccccuggucccccaucgacauccaccaccucuccugccccaacaaccucgucgucgaggacgagggcugcaccaaccucuccggcuucuccuacauggagcucaaggucggcuacaucuccgccaucaaggucaacggcuucaccugcaccggcgucgucaccgaggccgagaccuacaccaacuucgucggcuacgucaccaccaccuucaagcgcaagcacuuccgccccacccccgacgccugccgcgccgccuacaacuggaagauggccggcgacccccgcuacgaggagucccuccacaaccccuaccccgacuaccacuggcuccgcgccgucaagaccaccaaggagucccucgucaucaucucccccuccgucuccgaccucgaccccuacgacaagucccuccacucccgcgucuuccccuccggcaagugcuccggcaucaccgucuccuccaccuacugccccaccaaccacgacuacaccaucuggaugcccgagaacccccgccucggcaccuccugcgacaucuucaccaacucccgcggcaagcgcgccuccaagggcggcaagaccugcggcuucgucgacgagcgcggccucuacaagucccucaagggcgccugcaagcucaagcucugcggcguccucggccuccgccucauggacggcaccugggucgccauccagaccuccgacgaggccaaguggugcccccccgaccagcucgucaacauccacgacuuccgcuccgacgagaucgagcaccucgucgucgaggagcucgucaagaagcgcgaggagugccucgacgcccucgaguccaucaugaccaccaaguccgucuccuuccgccgccucucccaccuccgcaagcucguccccggcuucggcaaggccuacaccaucuucaacaagacccucauggaggccgacgcccacuacaaguccguccgcaccuggaacgagaucauccccuccaagggcugccuccgcgucggcggccgcugccacccccacgucaacggcgucuucuucaacggcaucauccucggccccgacggccacguccucauccccgagaugcaguccucccuccuccagcagcacauggagcuccucgaguccuccgucaucccccucaugcacccccucgccgaccccuccaccgucuucaaggacggcgacgaggccgaggacuucgucgagguccaccuccccgacguccacaagcaggucuccggcgucgaccucggccuccccuccuggggcaaguacguccucauguccgucggcgccaugaucgcccucaugcucaugaucuuccucaugaccugcugccgcaaggccaacggcgccgagaccauccagcaccgccucggcgagaccggccgcaaggucuccgucaccucccaguccggccgcgucaucuccuccugggaguccuacaaguccggcggcgagaccaagcucuga

SEQ ID NO: 127971 - RNA, 1575 nt, Artificial Sequence; identical to SEQ ID NO: 127064
  derived and/or modified CDS sequence (opt2) from glycoprotein__RABV__LC071978.1

SEQ ID NO: 127972 - RNA, 1575 nt, Artificial Sequence
  derived and/or modified CDS sequence (opt2) from glycoprotein__RABV__LC071979.1
augaucccccaggcccuccucuucgucccccuccucgucuucuccuccugcuucggcaaguuccccaucuacaccauccccgacaagcucggccccuggucccccaucgacauccaccaccucuccugccccaacaaccucgucgucgaggacgagggcugcaccaaccucuccggcuucuccuacauggagcucaaggucggcuacaucuccgccaucaaggucaacggcuucaccugcaccggcgucgucaccgaggccgagaccuacaccaacuucgucggcuacgucaccaccaccuucaagcgcaagcacuuccgccccacccccgacgccugccgcgccgccuacaacuggaagauggccggcgacccccgcuacgaggagucccuccacaaccccuaccccgacuaccacuggcuccgcaccgucaagaccaccaaggagucccucgucaucaucucccccuccgucuccgaccucgaccccuacgacaagucccuccacucccgcgucuuccccuccggcaagugcuccggcaucaccgucuccuccaccuacugccccaccaaccacgacuacaccaucuggaugcccgagaacccccgccucggcaccuccugcgacaucuucaccaacucccgcggcaagcgcgccuccaagggcggcaagaccugcggcuucgucgacgagcgcggccucuacaagucccucaagggcgccugcaagcucaagcucugcggcguccucggccuccgccucauggacggcaccugggucgccauccagaccuccgacgaggccaaguggugcccccccgaccagcucgucaacauccacgacuuccgcuccgacgagaucgagcaccucgucgucgaggagcucgucaagaagcgcgaggagugccucgacgcccucgaguccaucaugaccaccaaguccgucuccuuccgccgccucucccaccuccgcaagcucguccccggcuucggcgaggccuacaccaucuucaacaagacccucauggaggccgacgcccacuacaaguccguccgcaccuggaacgagaucauccccuccaagggcugccuccgcgucggcggccgcugccacccccacgucaacggcgucuucuucaacggcaucauccucggccccgacggccacguccucauccccgagaugcaguccucccuccuccagcagcacauggagcuccucgaguccuccgucaucccccucaugcacccccucgccgaccccuccaccgucuucaaggacggcgacgaggccgaggacuucgucgagguccaccuccccgacguccacaagcaggucuccggcgucgaccucggccuccccuccuggggcaaguacguccucauguccgucggcgccaugaucgcccucaugcucaugaucuuccucaugaccugcugccgcaaggccaacggcgccgagaccauccagcaccgccucggcgagaccggccgcaaggucuccgucaccucccaguccggccgcgucaucuccuccugggaguccuacaaguccggcggcgagaccaagcucuga

SEQ ID NO: 127973 - RNA, 1575 nt, Artificial Sequence; identical to SEQ ID NO: 127064
  derived and/or modified CDS sequence (opt2) from glycoprotein__RABV__LC071980.1

SEQ ID NO: 127974 - RNA, 1575 nt, Artificial Sequence
  derived and/or modified CDS sequence (opt2) from glycoprotein__RABV__LC071981.1
augaucccccaggcccuccucuucgucccccuccucgucuucuccuccugcuucggcaaguuccccaucuacaccauccccgacaagcucggccccuggucccccaucgacauccaccaccucuccugccccaacaaccucgucgucgaggacgagggcugcaccaaccucuccggcuucuccuacauggagcucaaggucggcuacaucuccgccaucaaggucaacggcuucaccugcaccggcgucgucaccgaggccgagaccuacaccaacuucgucggcuacgucaccaccaccuucaagcgcaagcacuuccgccccacccccgacgccugccgcgccgccuacaacuggaagauggccggcgacccccgcuacgaggagucccuccacaaccccuaccccgacuaccacuggcuccgcaccgucaagaccaccaaggagucccucgucaucaucucccccuccgucuccgaccucgaccccuacgacaagucccuccacucccgcgucuuccccuccggcaagcgcuccggcaucaccgucuccuccaccuacugccccaccaaccacgacuacaccaucuggaugcccgagaacccccgccucggcaccuccugcgacaucuucaccaacucccgcggcaagcgcgccuccaagggcggcaagaccugcggcuucgucgacgagcgcggccucuacaagucccucaagggcgccugcaagcucaagcucugcggcguccucggccuccgccucauggacggcaccugggucgccauccagaccuccgacgaggccaaguggugcccccccgaccagcucgucaacauccacgacuuccgcuccgacgagaucgagcaccucgucgucgaggagcucgucaagaagcgcgaggagugccucgacgcccucgaguccaucaugaccaccaaguccgucuccuuccgccgccucucccaccuccgcaagcucguccccggcuucggcaaggccuacaccaucuucaacaagacccucauggaggccgacgcccacuacaaguccguccgcaccuggaacgagaucauccccuccaagggcugccuccgcgucggcggccgcugccacccccacgucaacggcgucuucuucaacggcaucguccucggccccgacggccacguccucauccccgagaugcaguccucccuccuccagcagcacauggagcuccucgaguccuccgucaucccccucaugcacccccucgccgaccccuccaccgucuucaaggacggcgacgaggccgaggacuucgucgagguccaccuccccgacguccacaagcaggucuccggcgucgaccucggccuccccuccuggggcaaguacgcccucauguccgucggcgccaugaucgcccucaugcucaugaucuuccucaugaccugcugccgcaaggccaacggcgccgagaccaagcagcaccgccucggcgagaccggccgcaaggucuccgucaccucccaguccggccgcgucaucuccuccugggaguccuacaaguccggcggcgagaccaagcucuga

SEQ ID NO: 127975 - RNA, 1575 nt, Artificial Sequence
  derived and/or modified CDS sequence (opt2) from glycoprotein__RABV__LC071983.1
augaucccccaggcccuccucuucaucccccucuccgucuucucccucugcuucggcaaguuccccaucuacaccauccccgacaagcucggccccuggucccccaucgacauccaccaccucuccugccccaacaaccucgucgucgaggacgagggcugcaccaaccucuccggcuucuccuacauggagcucaaggucggcuacaucuccgccaucaaggucaacggcuucaccugcaccggcgucgucaccgaggccgagaccuacaccaacuucgucggcuacgucaccaccaccuucaagcgcaagcacuuccgccccacccccgacgccugccgcgccgccuacaacuggaagauggccggcgacccccgcuacgaggagucccuccacaaccccuaccccgacuaccacuggcuccgcaccgucaagaccaccaaggagucccucgucaucaucucccccuccgucuccgaccucgaccccuacgacaagucccuccacucccgcgucuuccccuccggcaagugcuccggcaucaccgucuccuccaccuacugccccaccaaccacgacuacaccaucuggaugcccgaguccccccgccucggcaccuccugcgacaucuucaccaacucccgcggcaagcgcgccuccaagggcuccaagaccugcggcuucgucgacgagcgcggccucuacaagucccucaagggcgccugcaagcucaagcucugcggcguccucggccuccgccucauggacggcaccugggccgccauccagacccccgacgaggucaaguggugcccccccgaccagcucgucaacauccacgacuuccgcuccgacgagaucgagcaccucgucgucgaggagcucgucaagaagcgcgaggagugccucgacgcccucgaguccaucaugaccaccaaguccgucuccuuccgccgccucucccaccuccgcaagcucguccccggcuucggcaaggccuacaccaucuucaacaagacccucauggaggccgacgcccacuacaaguccguccgcaccuggaacgagaucauccccuccaagggcugccuccgcgucggcggccgcugccacccccacgucaacggcgucuucuucaacggcaucauccucggccccgacggccacguccucauccccgagaugcaguccucccuccuccagcagcacauggagcuccucgaguccuccgucaucccccucaugcacccccucgccgaccccuccaccgucuucaaggacggcgacgaggccgaggacuucgucgagguccaccuccccgacguccacaagcaggucuccggcgucgaccucggccuccccuccuggggcaaguacguccucauguccgucggcgccaugaucgcccucaugcucaugaucuuccucaccaccugcugccgcaaggccaacggcgccgaguccauccagcaccgccgcggcgagaccggccgcaaggucuccgucaccucccaguccggccgcgucaucuccuccugggaguccuacaaguccggcggcgagaccaagcucuga

SEQ ID NO: 127976 - RNA, 1575 nt, Artificial Sequence
  derived and/or modified CDS sequence (opt2) from glycoprotein__RABV__LM645015.1
auggucccccaggcccuccucuucgucccccuccucgccuuccccaugugcuucggcaaguuccccaucuacaccauccccgacaagcucggccccuggucccccaucgacauccaccaccucuccugccccaacaaccucgucgucgaggacgagggcugcaccaaccucuccggcuucuccuacauggagcucaaggucggcuacaucuccgccaucaaggucaacggcuucaccugcaccggcgucgucaccgaggccgagaccuacaccaacuucgucggcuacgucaccaccaccuucaagcgcaagcacuuccgccccacccccgacgccugccgcgccgccuacaacuggaagauggccggcgacccccgcuacgaggagucccuccacaaccccuaccccgacuaccacuggcuccgcaccgucaagaccaccaaggagucccucaucaucaucucccccuccgucgccgaccucgaccccuacgacaagucccuccacucccgcgucuuccccuccggcaagugccucggcaucaccaucuccuccaccuacugcuccaccaaccacgacuacaccaucuggaugcccgagaacguccgccucggcaccuccugcgacaucuucaccaacucccgcggcaagcgcgccuccaagggcuccaagaccugcggcuucgucgacgagcgcggccucuacaagucccucaagggcgccugcaagcucaagcucugcggcguccucggccuccgccucauggacggcaccugggucgccaugcccaccuccgacgagaccaaguggugcccccccgaccagcucgucaaccuccacgacuuccgcuccgacgagaucgagcaccucgucgucgaggagcucguccgcaagcgcgaggagugccucgacgcccucgaguccaucaugaccaccaaguccgucuccuuccgccgccucucccaccuccgcaagcucguccccggcuucggcaaggccuacaccaucuucaacaagacccucauggaggccgacgcccacuacaaguccguccgcaccuggaacgagaucauccccuccaagggcugccuccgcgucggcggccgcugccacccccacgucaacggcgucuucuucaacggcaucauccucggccccgacggccacguccucauccccgagaugcaguccucccuccuccagcagcacauggagcuccucgaguccuccgucaucccccucaugcacccccucgccgaccccuccaccgucuucaaggacggcgacgaggccgaggacuucgucgagguccaccuccccgacguccacaagcaggucuccggcgucgaccucggccuccccaacuggggcaaguacguccucaucaucgccggcguccucaucgccaugauccucaccaucuuccucaugaccugcugcggccgcggcaaccgccccaaguccacccagcacucccucggcggcaucggccgcaaggucuccuccaccucccaguccggcaaggucaucuccuccugggaguccuacaaguccggcggcgagacccgccucuga

SEQ ID NO: 127977 - RNA, 1575 nt, Artificial Sequence
  derived and/or modified CDS sequence (opt2) from glycoprotein__RABV__LM645016.1
auggucccccaggcccuccucuucgucccccuccucgccuuccccaugugcuucggcaaguuccccaucuacaccauccccgacaagcucggccccuggucccccaucgacauccaccaccucuccugccccaacaaccucgucgucgaggacgagggcugcaccaaccucuccggcuucuccuacauggagcucaaggucggcuacaucuccgccaucaaggucaacggcuucaccugcaccggcgucgucaccgaggccgagaccuacaccaacuucgucggcuacgucaccaccaccuucaagcgcaagcacuuccgccccacccccgacgccugccgcgccgccuacaacuggaagauggccggcgacccccgcuacgaggagucccuccacaaccccuaccccgacuaccacuggcuccgcaccgucaagaccaccaaggagucccucaucaucaucucccccuccgucgccgaccucgaccccuacgacaagucccuccacucccgcgucuuccccuccggcaagugccucggcaucaccaucuccuccaccuacugcuccaccaaccacgacuacaccaucuggaugcccgagaacguccgccucggcaccuccugcgacaucuucaccaacucccgcggcaagcgcgccuccaagggcuccaagaccugcggcuucgucgacgagcgcggccucuacaagucccuccgcggcgccugcaagcucaagcucugcggcguccucggccuccgccucauggacggcaccugggucgccaugcccaccuccgacgagaccaaguggugcccccccgaccagcucgucaaccuccacgacuuccgcuccgacgagaucgagcaccucgucgucgaggagcucguccgcaagcgcgaggagugccucgacgcccucgaguccaucaugaccaccaaguccgucuccuuccgccgccucucccaccuccgcaagcucguccccggcuucggcaaggccuacaccaucuucaacaagacccucauggaggccgacgcccacuacaaguccguccgcaccuggaacgagaucauccccuccaagggcugccuccgcgucggcggccgcugccacccccacgucaacggcgucuucuucaacggcaucauccucggccccgacggccacguccucauccccgagaugcaguccucccuccuccagcagcacauggagcuccucgaguccuccgucaucccccucaugcacccccucgccgaccccuccaccgucuucaaggacggcgacgaggccgaggacuucgucgagguccaccuccccgacguccacaagcagaucuccggcgucgaccucggccuccccaacuggggcaaguacguccucaucaucgccggcguccucaucgccaugauccucaccaucuuccucaugaccugcugcggccgcggcaaccgccccaaguccacccagcacucccucggcggcaucggccgcaaggucuccuccaccucccaguccggcaaggucaucuccuccugggaguccuacaaguccggcggcgagacccgccucuga

SEQ ID NO: 127978 - RNA, 1575 nt, Artificial Sequence
  derived and/or modified CDS sequence (opt2) from glycoprotein__RABV__LM645018.1
auggucccccaggcccuccucuucgucccccuccucgccuuccccaugugcuucggcaaguuccccaucuacaccauccccgacaagcucggccccuggucccccaucgacauccaccaccucuccugccccaacaaccucgucgucgaggacgagggcugcaccaaccucuccggcuucuccuacauggagcucaaggucggcuacaucuccgccaucaaggucaacggcuucaccugcaccggcgucgucaccgaggccgagaccuacaccaacuucgucggcuacgucaccaccaccuucaagcgcaagcacuuccgccccacccccgacgccugccgcgccgccuacaacuggaagauggccggcgacccccgcuacgaggagucccuccacaaccccuaccccgacuaccacuggcuccgcaccgucaagaccaccaaggagucccucaucaucaucucccccuccgucgccgaccucgaccccuacgacaagucccuccacucccgcgucuuccccuccggcaagugccucggcaucaccaucuccuccaccuacugcuccaccaaccacgacuacaccaucuggaugcccgagaacguccgccucggcaccuccugcgacaucuucaccaacucccgcggcaagcgcgccuccaagggcuccaagaccugcggcuucgucgacgagcgcggccucuacaagucccucaagggcgccugcaagcucaagcucugcggcguccucggccuccgccucauggacggcaccugggucgccaugcccaccuccgacgagaccaaguggugcccccccgaccagcucgucaaccuccacgacuuccgcuccgacgagaucgagcaccucgucgucgaggagcucguccgcaagcgcgaggagugccucgacgcccucgaguccaucaugaccaccaaguccgucuccuuccgccgccucucccaccuccgcaagcucguccccggcuucggcaaggccuacaccaucuucaacaagacccucauggaggccgacgcccacuacaaguccguccgcaccuggaacgagaucauccccuccaagggcugccuccgcgucggcggccgcugccacccccacgucaacggcgucuucuucaacggcaucauccucggccccgacggccacguccucauccccgagaugcaguccucccuccuccagcagcacauggagcuccucgaguccuccgucaucccccucaugcacccccucgccgaccccuccaccgucuucaaggacggcgacgaggccgaggacuucgucgagguccaccuccccgacguccacaagcagaucuccggcgucgaccucggccuccccaacuggggcaaguacguccucaucaucaccggcguccucaucgccaugauccucaccaucuuccucaugaccugcugcggccgcggcaaccgccccaaguccaagcagcacucccucggcggcaucggccgcaaggucuccuccaccucccaguccggcaaggucaucuccuccugggaguccuacaaguccggcggcgagacccgccucuga

SEQ ID NO: 127979 - RNA, 1575 nt, Artificial Sequence; identical to SEQ ID NO: 127845
  derived and/or modified CDS sequence (opt2) from glycoprotein__RABV__LM645019.1

SEQ ID NO: 127980 - RNA, 1575 nt, Artificial Sequence
  derived and/or modified CDS sequence (opt2) from glycoprotein__RABV__LM645021.1
auggucccccaggcccuccucuucgucccccuccucgccuuccccaugugcuucggcaaguuccccaucuacaccauccccgacaagcucggccccuggucccccaucgacauccaccaccucuccugccccaacaaccucgucgucgaggacgagggcugcaccaaccucuccggcuucuccuacauggagcucaaggucggcuacaucuccgccaucaaggucaacggcuucaccugcaccggcgucgucaccgaggccgagaccuacaccaacuucgucggcuacgucaccaccaccuucaagcgcaagcacuuccgccccacccccgacgccugccgcgccgccuacaacuggaagauggccggcgacccccgcuacgaggagucccuccacaaccccuaccccgacuaccacuggcuccgcaccgucaagaccaccaaggagucccucaucaucaucucccccuccgucgccgaccucgaccccuacgacaagucccuccacucccgcgucuuccccuccggcaagugccucggcaucaccaucuccuccaccuacugcuccaccaaccacgacuacaccaucuggaugcccgagaacguccgccucggcaccuccugcgacaucuucaccaacucccgcggcaagcgcgccuccaagggcuccaagaccugcggcuucgucgacgagcgcggccucuacaagucccucaagggcgccugcaagcucaagcucugcggcguccucggccuccgccucauggacggcaccugggucgccaugcccaccuccgacgagaccaaguggugcucccccgaccagcucgucaaccuccacgacuuccgcuccgacgagaucgagcaccucgucgucgaggagcucguccgcaagcgcgaggagugccucgacgcccucgaguccaucaugaccaccaaguccgucuccuuccgccgccucucccaccuccgcaagcucguccccggcuucggcaaggccuacaccaucuucaacaagacccucauggaggccgacgcccacuacaaguccguccgcaccuggaacgagaucauccccuccaagggcugccuccgcgucggcggccgcugccacccccacgucaacggcgucuucuucaacggcaucauccucggccccgacggccacguccucauccccgagaugcaguccucccuccuccagcagcacauggagcuccucgaguccuccgucaucccccucaugcacccccucgccgaccccuccaccgucuucaaggacggcgacgaggccgaggacuucgucgagguccaccuccccgacguccacaagcagaucuccggcgucgaccucggccuccccaacuggggcaaguacguccucaucaucgccggcguccucaucgccaugauccucaccaucuuccucaugaccugcugcggccgcggcaaccgccccaaguccaagcagcacucccucggcggcaucggccgcaaggucuccuccaccucccaguccggcaaggucaucuccuccugggaguccuacaaguccggcggcgagacccgccucuga

SEQ ID NO: 127981 - RNA, 1575 nt, Artificial Sequence
  derived and/or modified CDS sequence (opt2) from glycoprotein__RABV__LM645022.1
auggucccccaggcccuccucuucgucccccuccucgccuuccccaugugcuucggcaaguuccccaucuacaccauccccgacaagcucggccccuggucccccaucgacauccaccaccucuccugccccaacaaccucgucgucgaggacgagggcugcaccaaccucuccggcuucuccuacauggagcucaaggucggcuacaucuccgccaucaaggucaacggcuucaccugcaccggcgucgucaccgaggccgagaccuacaccaacuucgucggcuacgucaccaccaccuucaagcgcaagcacuuccgccccacccccgacgccugccgcgccgccuacaacuggaagauggccggcgacccccgcuacgaggagucccuccacaaccccuaccccgacuaccacuggcuccgcaccgucaagaccaccaaggagucccucaucaucaucucccccuccgucgccgaccucgaccccuacgacaagucccuccacucccgcgucuuccccuccggcaagugccucggcaucaccaucuccuccaccuacugcuccaccaaccacgacuacaccaucuggaugcccgagaacguccgccuccgcaccuccugcgacaucuucaccaacucccgcggcaagcgcgccuccaagggcuccaagaccugcggcuucgucgacgagcgcggccucuacaagucccucaagggcgccugcaagcucaagcucugcggcguccucggccuccgccucauggacggcaccugggucgccaugcccaccuccgacgagaccaaguggugcccccccgaccagcucgucaaccuccacgacuuccgcuccgacgagaucgagcaccucgucgucgaggagcucguccgcaagcgcgaggagugccucgacgcccucgaguccaucaugaccaccaaguccgucuccuuccgccgccucucccaccuccgcaagcucguccccggcuucggcaaggccuacaccaucuucaacaagacccucauggaggccgacgcccacuacaaguccguccgcaccuggaacgagaucauccccuccaagggcugccuccgcgucggcggccgcugccacccccacgucaacggcgucuucuucaacggcaucauccucggccccgacggccacguccucauccccgagaugcaguccucccuccuccagcagcacauggagcuccucgaguccuccgucaucccccucaugcacccccucgccgaccccuccaccgucuucaaggacggcgacgaggccgaggacuucgucgagguccaccuccccgacguccacaagcagaucuccggcgucgaccucggccuccccaacuggggcaaguacguccucaucaucgccggcguccucaucgccaugauccucaccaucuuccucaugaccugcugcggccgcggcaaccgccccaaguccaagcagcacucccucggcggcaucggccgcaaggucuccuccaccucccaguccggcaaggucaucuccuccugggaguccuacaaguccggcggcgagacccgccucuga

SEQ ID NO: 127982 - RNA, 1575 nt, Artificial Sequence; identical to SEQ ID NO: 127845
  derived and/or modified CDS sequence (opt2) from glycoprotein__RABV__LM645024.1

SEQ ID NO: 127983 - RNA, 1575 nt, Artificial Sequence; identical to SEQ ID NO: 127845
  derived and/or modified CDS sequence (opt2) from glycoprotein__RABV__LM645026.1

SEQ ID NO: 127984 - RNA, 1575 nt, Artificial Sequence
  derived and/or modified CDS sequence (opt2) from glycoprotein__RABV__LM645027.1
auggucccccaggcccuccucuucgucccccuccucgccuuccccaugugcuucggcaaguuccccaucuacaccauccccgacaagcucggccccuggucccccaucgacauccaccaccucuccugccccaacaaccucgucgucgaggacgagggcugcaccaaccucuccggcuucuccuacauggagcucaaggucggcuacaucuccgccaucaaggucaacggcuucaccugcaccggcgucgucaccgaggccgagaccuacaccaacuucgucggcuacgucaccaccaccuucaagcgcaagcacuuccgccccacccccgacgccugccgcgccgccuacaacuggaagauggccggcgacccccgcuacgaggagucccuccacaaccccuaccccgacuaccacuggcuccgcaccgucaagaccaccaaggagucccucaucaucaucucccccuccgucgccgaccucgaccccuacgacaagucccuccacucccgcgucuuccccuccggcaagugccucggcaucaccaucuccuccaccuacugcuccaccaaccacgacuacaccaucuggaugcccgagaacguccgccucggcaccuccugcgacaucuucaccaacucccgcggcaagcgcgccuccaagggcuccaagaccugcggcuucgucgacgagcgcggccucuacaagucccucaagggcgccugcaagcucaagcucugcggcguccucggccuccgccucauggacggcaccugggucgccaugcccaccuccgacgagaccaaguggugcccccccgaccagcucgucaaccuccacgacuuccgcuccgacgagaucgagcaccucgucgucgaggagcucguccgcaagcgcgaggagugccucgacgcccucgaguccaucaugaccaccaaguccgucuccuuccgccgccucucccaccuccgcaagcucguccccggcuucggcaaggccuacaccaucuucaacaagacccucauggaggccgacgcccacuacaaguccguccgcaccuggaacgagaucauccccuccaagggcugccuccgcgucggcggccgcugccacccccacgucaacggcgucuucuucaacggcaucauccucggccccgacggccacguccucauccccgagaugcaguccucccuccuccagcagcacauggagcuccucgaguccuccgucaucccccucaugcacccccucgccgaccccuccaccgucuucaaggacggcgacgaggccgaggacuucgucgagguccaccuccccgacguccacaagcagaucuccggcgucgaccucggccuccccaacuggggcaaguacguccucaucaucgccggccuccucaucgccaugauccucaccaucuuccucaugaccugcugcggccgcggcaaccgccccaaguccacccagcacucccucggcggcaucggccgcaaggucuccuccaccucccaguccggcaaggucaucuccuccugggaguccuacaaguccggcggcgagacccgccucuga

SEQ ID NO: 127985 - RNA, 1575 nt, Artificial Sequence
  derived and/or modified CDS sequence (opt2) from glycoprotein__RABV__LM645029.1
auggucccccaggcccuccucuucgucccccuccucgccuuccccaugugcuucggcaaguuccccaucuacaccauccccgacaagcucggccccuggucccccaucgacauccaccaccucuccugccccaacaaccucgucgucgaggacgagggcugcaccaaccucuccggcuucuccuacauggagcucaaggucggcuacaucuccgccaucaaggucaacggcuucaccugcaccggcgucgucaccgaggccgagaccuacaccaacuucgucggcuacgucaccaccaccuucaagcgcaagcacuuccgccccacccccgacgccugccgcgccgccuacaacuggaagauggccggcgacccccgcuacgaggagucccuccacaaccccuaccccgacuaccacuggcuccgcaccgucaagaccaccaaggagucccucaucaucaucucccccuccgucgccgaccucgaccccuacgacaagucccuccacucccgcgucuuccccuccggcaagugccucggcaucaccaucuccuccaccuacugcuccaccaaccacgacuacaccaucuggaugcccgagaacguccgccucggcaccuccugcgacaucuucaccaacucccgcggcaagcgcgccuccaagggcuccaagaccugcggcuucgucgacgagcgcggccucuacaagucccucaagggcgccugcaagcucaagcucugcggcguccucggccuccgccucauggacggcaccugggucgccaugcccaccuccgacgagaccaaguggugcccccccgaccagcucgucaaccuccacgacuuccgcuccgacgagaucgagcaccucgucgucgaggagcucguccgcaagcgcgaggagugccucgacgcccucgaguccaucaucaccaccaaguccgucuccuuccgccgccucucccaccuccgcaagcucguccccggcuucggcaaggccuacaccaucuucaacaagacccucauggaggccgacgcccacuacaaguccguccgcaccuggaacgagaucauccccuccaagggcugccuccgcgucggcggccgcugccacccccacgucaacggcgucuucuucaacggcaucauccucggccccgacggccacguccucauccccgagaugcaguccucccuccuccagcagcacauggagcuccucgaguccuccgucaucccccucaugcacccccucgccgaccccuccaccgucuucaaggacggcgacgaggccgaggacuucgucgagguccaccuccccgacguccacaagcagaucuccggcgucgaccucggccuccccaacuggggcaaguacguccucaucaucgccggcguccucaucgccaugauccucaccaucuuccucaugaccugcugcggccgcggcaaccgccccaaguccaagcagcacucccucggcggcaucggccgcaaggucuccuccaccucccaguccggcaaggucaucuccuccugggaguccuacaaguccggcggcgagacccgccucuga

SEQ ID NO: 127986 - RNA, 1575 nt, Artificial Sequence
  derived and/or modified CDS sequence (opt2) from glycoprotein__RABV__LM645031.1
auggucccccaggcccuccucuucgucccccuccucgccuuccccaugugcuucggcaaguuccccaucuacaccauccccgacaagcucggccccuggucccccaucgacauccaccaccucuccugccccaacaaccucgucgucgaggacgagggcugcaccaaccucuccggcuucuccuacauggagcucaaggucggcuacaucuccgccaucaaggucaacggcuucaccugcaccggcgucgucaccgaggccgagaccuacaccaacuucgucggcuacgucaccaccaccuucaagcgcaagcacuuccgccccacccccgacgccugccgcgccgccuacaacuggaagauggccggcgacccccgcuacgaggagucccuccacaaccccuaccccgacuaccacuggcuccgcaccgucaagaccaccaaggagucccucaucaucaucucccccuccgucgccgaccucgaccccuacgacaagucccuccacucccgcgucuuccccuccggcaagugccucggcaucaccaucuccuccaccuacugcuccaccaaccacgacuacaccaucuggaugcccgagaacguccgccucggcaccuccugcgacaucuucaccaacucccgcggcaagcgcgccucccgcggcuccaagaccugcggcuucgucgacgagcgcggccucuacaagucccucaagggcgccugcaagcucaagcucugcggcguccucggccuccgccucauggacggcaccugggucgccaugcccaccuccgacgagaccaaguggugcccccccgaccagcucgucaaccuccacgacuuccgcuccgacgagaucgagcaccucgucgucgaggagcucguccgcaagcgcgaggagugccucgacgcccucgaguccaucaugaccaccaaguccgucuccuuccgccgccucucccaccuccgcaagcucguccccggcuucggcaaggccuacaccaucuucaacaagacccucauggaggccgacgcccacuacaaguccguccgcaccuggaacgagaucauccccuccaagggcugccuccgcgucggcggccgcugccacccccacgucaacggcgucuucuucaacggcaucauccucggccccgacggccacguccucauccccgagaugcaguccucccuccuccagcagcacauggagcuccucgaguccuccgucaucccccucaugcacccccucgccgaccccuccaccgucuucaaggacggcgacgaggccgaggacuucgucgagguccaccuccccgacguccacaagcagaucuccggcgucgaccucggccuccccaacuggggcaaguacguccucaucaucgccggcguccucaucgccaugauccucaccaucuuccucaugaccugcugcggccgcggcaaccgccccaaguccaagcagcacucccucggcggcaucggccgcaaggucuccuccaccucccaguccggcaaggucaucuccuccugggaguccuacaaguccggcggcgagacccgccucuga

SEQ ID NO: 127987 - RNA, 1575 nt, Artificial Sequence; identical to SEQ ID NO: 127845
  derived and/or modified CDS sequence (opt2) from glycoprotein__RABV__LM645034.1

SEQ ID NO: 127988 - RNA, 1575 nt, Artificial Sequence; identical to SEQ ID NO: 127845
  derived and/or modified CDS sequence (opt2) from glycoprotein__RABV__LM645035.1

SEQ ID NO: 127989 - RNA, 1575 nt, Artificial Sequence
  derived and/or modified CDS sequence (opt2) from glycoprotein__RABV__LM645036.1
auggucccccaggcccuccucuucgucccccuccucgccuuccccaugugcuucggcaaguuccccaucuacaccauccccgacaagcucggccccuggucccccaucgacauccaccaccucuccugccccaacaaccucgucgucgaggacgagggcugcaccaaccucuccggcuucuccuacauggagcucaaggucggcuacaucuccgccaucaaggucaacggcuucaccugcaccggcgucgucaccgaggccgagaccuacaccaacuucgucggcuacgucaccaccaccuucaagcgcaagcacuuccgccccacccccgacgccugccgcgccgccuacaacuggaagauggccggcgacccccgcuacgaggagucccuccacaaccccuaccccgacuaccacuggcuccgcaccgucaagaccaccaaggagucccucaucaucaucucccccuccgucgccgaccucgaccccuacgacaagucccuccacucccgcgucuuccccuccggcaagugccucggcaucaccaucuccuccaccuacugccucaccaaccacgacuacaccaucuggaugcccgagaacguccgccucggcaccuccugcgacaucuucaccaacucccgcggcaagcgcgccuccaagggcuccaagaccugcggcuucgucgacgagcgcggccucuacaagucccucaagggcgccugcaagcucaagcucugcggcguccucggccuccgccucauggacggcaccugggucgccaugcccaccuccgacgagaccaaguggugcccccccgaccagcucgucaaccuccacgacuuccgcuccgacgagaucgagcaccucgucgucgaggagcucguccgcaagcgcgaggagugccucgacgcccucgaguccaucaugaccaccaaguccgucuccuuccgccgccucucccaccuccgcaagcucguccccggcuucggcaaggccuacaccaucuucaacaagacccucauggaggccgacgcccacuacaaguccguccgcaccuggaacgagaucauccccuccaagggcugccuccgcgucggcggccgcugccacccccacgucaacggcgucuucuucaacggcaucauccucggccccgacggccacguccucauccccgagaugcaguccucccuccuccagcagcacauggagcuccucgaguccuccgucaucccccucaugcacccccucgccgaccccuccaccgucuucaaggacggcgacgaggccgaggacuucgucgagguccaccuccccgacguccacaagcagaucuccggcgucgaccucggccuccccaacuggggcaaguacguccucaucaucgccggcguccucaucgccaugauccucaccaucuuccucaugaccugcugcggccgcggcaaccgccccaaguccaagcagcacucccucggcggcaucggccgcaaggucuccuccaccccccaguccggcaaggucaucuccuccugggaguccuacaaguccggcggcgagacccgccucuga

SEQ ID NO: 127990 - RNA, 1575 nt, Artificial Sequence; identical to SEQ ID NO: 127510
  derived and/or modified CDS sequence (opt2) from glycoprotein__RABV__LM645037.1

SEQ ID NO: 127991 - RNA, 1575 nt, Artificial Sequence
  derived and/or modified CDS sequence (opt2) from glycoprotein__RABV__LM645039.1
auggucccccaggcccuccucuucgucccccuccucgccuuccccaugugcuucggcaaguuccccaucuacaccauccccgacaagcucggccccuggucccccaucgacauccaccaccucuccugccccaacaaccucgucgucgaggacgagggcugcaccaaccucuccggcuucuccuacauggagcucaaggucggcuacaucuccgccaucaaggucaacggcuucaccugcaccggcgucgucaccgaggccgagaccuacaccaacuucgucggcuacgucaccaccaccuucaagcgcaagcacuuccuccccacccccgacgccugccgcgccgccuacaacuggaagauggccggcgacccccgcuacgaggagucccuccacaaccccuaccccgacuaccacuggcuccgcaccgucaagaccaccaaggagucccucaucaucaucucccccuccgucgccgaccucgaccccuacgacaagucccuccacucccgcgucuuccccuccggcaagugccucggcaucaccaucuccuccaccuacugcuccaccaaccacgacuacaccaucuggaugcccgagaacguccgccucggcaccuccugcgacaucuucaccaacucccgcggcaagcgcgccuccaagggcuccaagaccugcggcuucgucgacgagcgcggccucuacaagucccucaagggcgccugcaagcucaagcucugcggcguccucggccuccgccucauggacggcaccugggucgccaugcccaccuccgacgagaccaaguggugcccccccgaccagcucgucaaccuccacgacuuccgcuccgacgagaucgagcaccucgucgucgaggagcucguccgcaagcgcgaggagugccucgacgcccucgaguccaucaugaccaccaaguccgucuccuuccgccgccucucccaccuccgcaagcucguccccggcuucggcaaggccuacaccaucuucaacaagacccucauggaggccgacgcccacuacaaguccguccgcaccuggaacgagaucauccccuccaagggcugccuccgcgucggcggccgcugccacccccacgucaacggcgucuucuucaacggcaucauccucggccccgacggccacguccucauccccgagaugcaguccucccuccuccagcagcacauggagcuccucgaguccuccgucaucccccucaugcacccccucgccgaccccuccaccgucuucaaggacggcgacgaggccgaggacuucgucgagguccaccuccccgacguccacaagcagaucuccggcgucgaccucggccuccccaacuggggcaaguacguccucaucaucgccggcguccucaucgccaugauccucaccaucuuccucaugaccugcugcggccgcggcaaccgccccaaguccacccagcacucccucggcggcaucggccgcaaggucuccuccaccucccaguccggcaaggucaucuccuccugggaguccuacaaguccggcggcgagacccgccucuga

SEQ ID NO: 127992 - RNA, 1575 nt, Artificial Sequence; identical to SEQ ID NO: 127510
  derived and/or modified CDS sequence (opt2) from glycoprotein__RABV__LM645041.1

SEQ ID NO: 127993 - RNA, 1575 nt, Artificial Sequence
  derived and/or modified CDS sequence (opt2) from glycoprotein__RABV__LM645042.1
auggucccccaggcccuccucuucgucccccuccucgccuuccccaugugcuucggcaaguuccccaucuacaccauccccgacaagcucggccccuggucccccaucgacauccaccaccucuccugccccaacaaccucgucgucgaggacgagggcugcaccaaccucuccggcuucuccuacauggagcucaaggucggcuacaucuccgccaucaaggucaacggcuucaccugcaccggcgucgucaccgaggccgagaccuacaccaacuucgucggcuacgucaccaccaccuucaagcgcaagcacuuccuccccacccccgacgccugccgcgccgccuacaacuggaagauggccggcgacccccgcuacgaggagucccuccacaaccccuaccccgacuaccacuggcuccgcaccgucaagaccaccaaggagucccucaucaucaucucccccuccgucgccgaccucgaccccuacgacaagucccuccacucccgcgucuuccccuccggcaagugccucggcaucaccaucuccuccaccuacugcuccaccaaccacgacuacaccaucuggaugcccgagaacguccgccucggcaccuccugcgacaucuucaccaacucccgcggcaagcgcgccuccaagggcuccaagaccugcggcuucgucgacaagcgcggccucuacaagucccucaagggcgccugcaagcucaagcucugcggcguccucggccuccgccucauggacggcaccugggucgccaugcccaccuccgacgagaccaaguggugcccccccgaccagcucgucaaccuccacgacuuccgcuccgacgagaucgagcaccucgucgucgaggagcucguccgcaagcgcgaggagugccucgacgcccucgaguccaucaugaccaccaaguccgucuccuuccgccgccucucccaccuccgcaagcucguccccggcuucggcaaggccuacaccaucuucaacaagacccucauggaggccgacgcccacuacaaguccguccgcaccuggaacgagaucauccccuccaagggcugccuccgcgucggcggccgcugccacccccacgucaacggcgucuucuucaacggcaucauccucggccccgacggccacguccucauccccgagaugcaguccucccuccuccagcagcacauggagcuccucgaguccuccgucaucccccucaugcacccccucgccgaccccuccaccgucuucaaggacggcgacgaggccgaggacuucgucgagguccaccuccccgacguccacaagcagaucuccggcgucgaccucggccuccccaacuggggcaaguacguccucaucaucgccggcguccucaucgccaugauccucaccaucuuccucaugaccugcugcggccgcggcaaccgccccaaguccacccagcacucccucggcggcaucggccgcaaggucuccuccaccucccaguccggcaaggucaucuccuccugggaguccuacaaguccggcggcgagacccgccucuga

SEQ ID NO: 127994 - RNA, 1575 nt, Artificial Sequence; identical to SEQ ID NO: 127510
  derived and/or modified CDS sequence (opt2) from glycoprotein__RABV__LM645043.1

SEQ ID NO: 127995 - RNA, 1575 nt, Artificial Sequence
  derived and/or modified CDS sequence (opt2) from glycoprotein__RABV__LM645045.1
auggucccccaggcccuccucuucgucccccuccucgccuuccccaugugcuucggcaaguuccccaucuacaccauccccgacaagcucggccccuggucccccaucgacauccaccaccucuccugccccaacaaccucgucgucgaggacgagggcugcaccaaccucuccggcuucuccuacauggagcucaaggucggcuacaucuccgccaucaaggucaacggcuucaccugcaccggcgucgucaccgaggccgagaccuacaccaacuucgucggcuacgucaccaccaccuucaagcgcaagcacuuccgccccacccccgacgccugccgcgccgccuacaacuggaagauggccggcgacccccgcuacgaggagucccuccacaaccccuaccccgacuaccacuggcuccgcaccgucaagaccaccaaggagucccucaucaucaucucccccuccgucgccgaccucgaccccuacgacaagucccuccacucccgcgucuuccccuccggcaagugccucggcaucaccaucuccuccaccuacugcuccaccaaccacgacuacaccaucuggaugcccgagaacguccgccucggcaccuccugcgacaucuucaccaacucccgcggcaagcgcgccuccaagggcuccaagaccugcggcuucgucgacgagcgcggccucuacaagucccucaagggcgccugcaagcucaagcucugcggcguccucggccuccgccucauggacggcaccugggucgccaugcccaccuccgacgagaccaaguggugcccccccgaccagcucgucaaccuccacgacuuccgcuccgacgagaucgagcaccucgucgucgaggagcucguccgcaagcgcgaggagugccucgacgcccucgaguccaucaugaccaccaaguccgucuccuuccgccgccucucccaccuccgcaagcucguccccggcuucggcaaggccuacaccaucuucaacaagacccucauggaggccgacgcccacuacaaguccguccgcaccuggaacgagaucauccccuccaagggcugccuccgcgucggcggccgcugccacccccacgucaacggcgucuucuucaacggcaucauccucggccccgacggccacguccucauccccgagaugcaguccucccuccuccagcagcacauggagcuccucgaguccuccgucaucccccucaugcacccccucgccgaccccuccaccgucuucaaggacggcgacgaggccgaggacuucgucgagguccacuuccccgacguccacaagcagaucuccggcgucgaccucggccuccccaacuggggcaaguacguccucaucaucgccggcguccucaucgccaugauccucaccaucuuccucaugaccugcugcggccgcggcaaccgccccaaguccacccagcacucccucggcggcaucggccgcaaggucuccuccaccucccaguccggcaaggucaucuccuccugggaguccuacaaguccggcggcgagacccgccucuga

SEQ ID NO: 127996 - RNA, 1575 nt, Artificial Sequence; identical to SEQ ID NO: 127995
  derived and/or modified CDS sequence (opt2) from glycoprotein__RABV__LM645049.1

SEQ ID NO: 127997 - RNA, 1575 nt, Artificial Sequence; identical to SEQ ID NO: 127510
  derived and/or modified CDS sequence (opt2) from glycoprotein__RABV__LM645052.1

SEQ ID NO: 127998 - RNA, 1575 nt, Artificial Sequence; identical to SEQ ID NO: 127510
  derived and/or modified CDS sequence (opt2) from glycoprotein__RABV__LM645053.1

SEQ ID NO: 127999 - RNA, 1575 nt, Artificial Sequence; identical to SEQ ID NO: 127510
  derived and/or modified CDS sequence (opt2) from glycoprotein__RABV__LM645056.1

SEQ ID NO: 128000 - RNA, 1575 nt, Artificial Sequence
  derived and/or modified CDS sequence (opt2) from glycoprotein__RABV__LN713547.1
auggucccccaggcccuccucuucgucccccuccucgucuucccccucugcuucggcaaguuccccaucuacaccauccccgacaagcucggccccuggucccccaucgacauccaccaccucuccugccccaacaaccucgucgucgaggacgagggcugcaccaaccucuccggcuucuccuacauggagcucaaggucggcaacauccucgccaucaagaugaacggcuucaccugcaccggcgucgucaccgaggccgagaccuacaccaacuucgucggcuacgucaccaccaccuucaagcgcaagcacuuccgccccacccccgacgccugccgcgccgccuacaacuggaagauggccggcgacccccgcuacgaggagucccuccacaaccccuaccccgacuaccgcuggcuccgcaccgucaagaccaccaaggagucccucgucaucaucucccccuccgucgccgaccucgaccccuacgaccgcucccuccacucccgcgucuuccccuccggcaagugcuccggcgucgccgucuccuccaccuacugcuccaccaaccacgacuacaccaucuggaugcccgaguccccccgccucggcauguccugcgacaucuucaccaacucccgcggcaagcgcgccuccaagggcuccgagaccugcggcuucgucgacgagcgcggccucuacaagucccucaagggcgccugcaagcucaagcucugcggcguccucggccuccgccucauggacggcaccugggucuccaugcagaccuccaacgagaccaaguggugcccccccgaccagcucgucaaccuccacgacuuccgcuccgacgagaucgagcaccucgucgucgaggagcucguccgcaagcgcgaggagugccucgacgcccucgaguccaucaugaccaccaaguccgucuccuuccgccgccucucccaccuccgcaagcucguccccggcuucggcaaggccuacaccauccucaacaagacccucauggaggccgacgcccacuacaaguccguccgcaccuggaacgagauccuccccuccaagggcugccuccgcgucggcggccgcugccacccccacgucaacggcgucuucuucaacggcaucauccucggccccgacggcaacguccucauccccgagaugcaguccucccuccuccagcagcacauggagcuccucgaguccuccgucaucccccucguccacccccucgccgaccccuccaccgucuucaaggacggcgacgaggccgaggacuucgucgagguccaccuccccgacguccacaaccaggucuccggcgucgaccucggccuccccaacuggggcaaguacguccuccucuccgccggcgcccucaccgcccucaugcucaucaucuuccucaugaccugcugccgccgcgucaaccgcuccgagcccacccagcacaaccuccgcggcaccggccgcgaggucuccgucaccccccaguccggcaagaucaucuccuccugggagucccacaaguccggcggcgagacccgccucuga

SEQ ID NO: 128001 - RNA, 1575 nt, Artificial Sequence; identical to SEQ ID NO: 128000
  derived and/or modified CDS sequence (opt2) from glycoprotein__RABV__LN713552.1

SEQ ID NO: 128002 - RNA, 1575 nt, Artificial Sequence
  derived and/or modified CDS sequence (opt2) from glycoprotein__RABV__LN713556.1
auggucccccaggcccuccucuucgucccccuccucgucuucccccucugcuucggcaaguuccccaucuacaccauccccgacaagcucggccccuggucccccaucgacauccaccaccucuccugccccaacaaccucgucgucgaggacgagggcugcaccaaccucuccggcuucuccuacauggagcucaaggucggcaacauccucgccaucaagaugaacggcuucaccugcaccggcgucgucaccgaggccgagaccuacaccaacuucgucggcuacgucaccaccaccuucaagcgcaagcacuuccgccccacccccgacgccugccgcgccgccuacaacuggaagauggccggcgacccccgcuacgaggagucccuccacaaccccuaccccgacuaccgcuggcuccgcaccgucaagaccaccaaggagucccucgucaucaucucccccuccgucgccgaccucgaccccuacgaccgcucccuccacucccgcgucuuccccuccggcaagugcuccggcgucgccgucuccuccaccuacugcuccaccaaccacgacuacaccaucuggaugcccgagaacccccgccucggcauguccugcgacaucuucaccaacucccgcggcaagcgcgccuccaagggcuccgagaccugcggcuucgucgacgagcgcggccucuacaagucccucaagggcgccugcaagcucaagcucugcggcguccucggccuccgccucauggacggcaccugggucuccaugcagaccuccaacgagaccaaguggugcccccccgacaagcucgucaaccuccacgacuuccgcuccgacgagaucgagcaccucgucgucgaggagcucguccgcaagcgcgaggagugccucgacgcccucgaguccaucaugaccaccaaguccgucuccuuccgccgccucucccaccuccgcaagcucguccccggcuucggcaaggccuacaccauccucaacaagacccucauggaggccgacgcccacuacaaguccguccgcaccuggaacgagauccuccccuccaagggcugccuccgcgucggcggccgcugccacccccacgucaacggcgucuucuucaacggcaucauccucggccccgacggcaacguccucauccccgagaugcaguccucccuccuccagcagcacauggagcuccucgaguccuccgucaucccccucguccacccccucgccgaccccuccaccgucuucaaggacggcgacgaggccgaggacuucgucgagguccaccuccccgacguccacaaccaggucuccggcgucgaccucggccuccccaacuggggcaaguacguccuccucuccgccggcgcccucaccgcccucaugcucaucaucuuccucaugaccugcugccgccgcgucaaccgcuccgagcccacccagcacaaccuccgcggcaccggccgcgaggucuccgucaccccccaguccggcaagaucaucuccuccugggagucccacaaguccggcggcgagacccgccucuga

SEQ ID NO: 128003 - RNA, 1575 nt, Artificial Sequence; identical to SEQ ID NO: 128000
  derived and/or modified CDS sequence (opt2) from glycoprotein__RABV__LN713559.1

SEQ ID NO: 128004 - RNA, 1575 nt, Artificial Sequence
  derived and/or modified CDS sequence (opt2) from glycoprotein__RABV__LN713560.1
auggucccccaggcccuccucuucgucccccuccucgucuucccccucugcuucggcaaguuccccaucuacaccauccccgacaagcucggccccuggucccccaucgacauccaccaccucuccugccccaacaaccucgucgucgaggacgagggcugcaccaaccucuccggcuucuccuacauggagcucaaggucggcaacauccucgccaucaaggucaacggcuucaccugcaccggcgucgucaccgaggccgagaccuacaccaacuucgucggcuacgucaccaccaccuucaagcgcaagcacuuccgccccacccccgacgccugccgcgccgccuacaacuggaagauggccggcgacccccgcuacgaggagucccuccacaaccccuaccccgacuaccgcuggcuccgcaccgucaagaccaccaaggagucccucgucaucaucucccccuccgucgccgaccucgaccccuacgaccgcucccuccacucccgcgucuuccccuccggcaagugcuccggcgucgccgucuccuccaccuacugcuccaccaaccacgacuacaccaucuggaugcccgaguccccccgccucggcauguccugcgacaucuucaccaacucccgcggcaagcgcgccuccaagggcuccgagaccugcggcuucgucgacgagcgcggccucuacaagucccucaagggcgccugcaagcucaagcucugcggcguccucggccuccgccucauggacggcaccugggucuccaugcagaccuccaacgagaccaaguggugcccccccgaccagcucgucaaccuccacgacuuccgcuccgacgagaucgagcaccucgucgucgaggagcucguccgcaagcgcgaggagugccucgacgcccucgaguccaucaugaccaccaaguccgucuccuuccgccgccucucccaccuccgcaagcucguccccggcuucggcaaggccuacaccauccucaacaagacccucauggaggccgacgcccacuacaaguccguccgcaccuggaacgagauccuccccuccaagggcugccuccgcgucggcggccgcugccacccccacgucaacggcgucuucuucaacggcaucauccucggccccgacggcaacguccucauccccgagaugcaguccucccuccuccagcagcacauggagcuccucgaguccuccgucaucccccucguccacccccucgccgaccccuccaccgucuucaaggacggcgacgaggccgaggacuucgucgagguccaccuccccgacguccacaaccaggucuccggcgucgaccucggccuccccaacuggggcaaguacguccuccucuccgccggcgcccucaccgcccucaugcucaucaucuuccucaugaccugcugccgccgcgucaaccgcuccgagcccacccagcacaaccuccgcggcaccggccgcgaggucuccgucaccccccaguccggcaagaucaucuccuccugggagucccacaaguccggcggcgagacccgccucuga

SEQ ID NO: 128005 - RNA, 1575 nt, Artificial Sequence
  derived and/or modified CDS sequence (opt2) from glycoprotein__RABV__LN713572.1
auggucccccaggcccuccucuucgucccccuccucgucuucccccucugcuucggcaaguuccccaucuacaccauccccgacaagcucggccccuggucccccaucgacauccaccaccucuccugccccaacaaccucgucgucgaggacgagggcugcaccaaccucuccggcuucuccuacauggagcucaaggucggcuacauccucgccaucaaggucaacggcuucaccugcaccggcgucgucaccgaggccgagaccuacaccaacuucgucggcuacgucaccaccaccuucaagcgcaagcacuuccgccccacccccgacgccugccgcgccgccuacaacuggaagauggccggcgacccccgcuacgaggagucccuccacaaccccuaccccgacuaccgcuggcuccgcaccgucaagaccaccaaggagucccucgucaucaucucccccuccgucgccgaccucgaccccuacgaccgcucccuccacucccgcgucuuccccuccggcaagugcuccggcgucgccgucuccuccaccuacugcuccaccaaccacgacuacaccaucuggaugcccgagaacccccgccucggcauguccugcgacaucuucaccaacucccgcggcaagcgcgccuccaagggcuccgagaccugcggcuucgucgacgagcgcggccucuacaagucccucaagggcgccugcaagcucaagcucugcggcguccucggccuccgccucauggacggcaccugggucuccaugcagaccuccaacgagaccaaguggugcccccccgacaagcucgucaaccuccacgacuuccgcuccgacgagaucgagcaccucgucgucgaggagcucguccgcaagcgcgaggagugccucgacgcccucgaguccaucaugaccaccaaguccgucuccuuccgccgccucucccaccuccgcaagcucguccccggcuucggcaaggccuacaccauccucaacaagacccucauggaggccgacgcccacuacaaguccguccgcaccuggaacgagauccuccccuccaagggcugccuccgcgucggcggccgcugccacccccacgucaacggcgucuucuucaacggcaucauccucggccccgacggcaacguccucauccccgagaugcaguccucccuccuccagcagcacauggagcuccucgaguccuccgucaucccccucguccacccccucgccgaccccuccaccgucuucaaggacggcgacgaggccgaggacuucgucgagguccaccuccccgacguccacaaccaggucuccggcgucgaccucggccuccccaacuggggcaaguacguccuccucuccgccggcgcccucaccgcccucaugcucaucaucuuccucaugaccugcugccgccgcgucaaccgcuccgagcccacccagcacaaccuccgcggcaccggccgcgaggucuccgucaccccccaguccggcaagaucaucuccuccugggagucccacaaguccggcggcgagacccgccucuga

SEQ ID NO: 128006 - RNA, 1575 nt, Artificial Sequence
  derived and/or modified CDS sequence (opt2) from glycoprotein__RABV__LN713578.1
auggucccccaggcccuccucuucgucccccuccucgucuucccccucugcuucggcaaguuccccaucuacaccauccccgacaagcucggccccuggucccccaucgacauccaccaccucuccugccccaacaaccucgucgucgaggacgagggcugcaccaaccucuccggcuucuccuacauggagcucaaggucggcuacauccucgccaucaagaugaacggcuucaccugcaccggcgucgucaccgaggccgagaccuacaccaacuucgucggcuacgucaccaccaccuucaagcgcaagcacuuccgccccacccccgacgccugccgcgccgccuacaacuggaagauggccggcgacccccgcuacgaggagucccuccacaaccccuaccccgacuaccgcuggcuccgcaccgucaagaccaccaaggagucccucgucaucaucucccccuccgucgccgaccucgaccccuacgaccgcucccuccacucccgcgucuuccccuccggcaagugcuccggcgucgccgucuccuccaccuacugcuccaccaaccacgacuacaccaucuggaugcccgagaacccccgccucggcauguccugcgacaucuucaccaacucccgcggcaagcgcgccuccaagggcuccgagaccugcggcuucgucgacgagcgcggccucuacaagucccucaagggcgccugcaagcucaagcucugcggcguccucggccuccgccucauggacggcaccugggucuccaugcagaccuccaacgagaccaaguggugcccccccgacaagcucgucaaccuccacgacuuccgcuccgacgagaucgagcaccucgucgucgaggagcucguccgcaagcgcgaggagugccucgacgcccucgaguccaucaugaccaccaaguccgucuccuuccgccgccucucccaccuccgcaagcucguccccggcuucggcaaggccuacaccaucuucaacaagacccucauggaggccgacgcccacuacaaguccguccgcaccuggaacgagauccuccccuccaagggcugccuccgcgucggcggccgcugccacccccacgucaacggcgucuucuucaacggcaucauccucggccccgacggcaacguccucauccccgagaugcaguccucccuccuccagcagcacauggagcuccucgaguccuccgucaucccccucguccacccccucgccgaccccuccaccgucuucaaggacggcgacgaggccgaggacuucgucgagguccaccuccccgacguccacaaccaggucuccggcgucgaccucggccuccccaacuggggcaaguacguccuccucuccgccggcgcccucaccgcccucaugcucaucaucuuccucaugaccugcugccgccgcgucaaccgcuccgagcccacccagcacaaccuccgcggcaccggccgcgaggucuccgucaccccccaguccggcaagaucaucuccuccugggagucccacaaguccggcggcgagacccgccucuga

SEQ ID NO: 128007 - RNA, 1575 nt, Artificial Sequence; identical to SEQ ID NO: 128004
  derived and/or modified CDS sequence (opt2) from glycoprotein__RABV__LN713589.1

SEQ ID NO: 128008 - RNA, 1575 nt, Artificial Sequence; identical to SEQ ID NO: 128000
  derived and/or modified CDS sequence (opt2) from glycoprotein__RABV__LN713600.1

SEQ ID NO: 128009 - RNA, 1575 nt, Artificial Sequence
  derived and/or modified CDS sequence (opt2) from glycoprotein__RABV__LN713602.1
auggucccccaggcccuccucuucgucccccuccucgucuucccccucugcuucggcaaguuccccaucuacaccauccccgacaagcucggccccuggucccccaucgacauccaccaccucuccugccccaacaaccucgucgucgaggacgagggcugcaccaaccucuccggcuucuccuacauggagcucaaggucggcaacauccucgccaucaagaugaacggcuucaccugcaccggcgucgucaccgaggccgagaccuacaccaacuucgucggcuacgucaccaccaccuucaagcgcaagcacuuccgccccacccccgacgccugccgcgccgccuacaacuggaagauggccggcgacccccgcuacgaggagucccuccacaaccccuaccccgacuaccgcuggcuccgcaccgucaagaccaccaaggagucccucgucaucaucucccccuccgucgccgaccucgaccccuacgaccgcucccuccacucccgcgucuuccccuccggcaagugcuccggcgucgccgucuccuccaccuacugcuccaccaaccacgacuacaccaucuggaugcccgagaacccccgccucggcauguccugcgacaucuucaccaacucccgcggcaagcgcgccuccaagggcuccgagaccugcggcuucgucgacgagcgcggccucuacaagucccucaagggcgccugcaagcucaagcucugcggcguccucggccuccgccucauggacggcaccugggucuccaugcagaccuccaacgagaccaaguggugcccccccgaccagcucgucaaccuccacgacuuccgcuccgacgagaucgagcaccucgucgucgaggagcucguccgcaagcgcgaggagugccucgacgcccucgaguccaucaugaccaccaaguccgucuccuuccgccgccucucccaccuccgcaagcucguccccggcuucggcaaggccuacaccauccucaacaagacccucauggaggccgacgcccacuacaaguccguccgcaccuggaacgagauccuccccuccaagggcugccuccgcgucggcggccgcugccacccccacgucaacggcgucuucuucaacggcaucauccucggccccgacggcaacguccucauccccgagaugcaguccucccuccuccagcagcacauggagcuccucgaguccuccgucaucccccucguccacccccucgccgaccccuccaccgucuucaaggacggcgacgaggccgaggacuucgucgagguccaccuccccgacguccacaaccaggucuccggcgucgaccucggccuccccaacuggggcaaguacguccuccucuccgccggcgcccucaccgcccucaugcucaucaucuuccucaugaccugcugccgccgcgucaaccgcuccgagcccacccagcacaaccuccgcggcaccggccgcgaggucuccgucaccccccaguccggcaagaucaucuccuccugggagucccacaaguccggcggcgagacccgccucuga

SEQ ID NO: 128010 - RNA, 1575 nt, Artificial Sequence
  derived and/or modified CDS sequence (opt2) from glycoprotein__RABV__LN713608.1
auggucccccaggcccuccucuucgucccccuccucgucuucccccucugcuucggcaaguuccccaucuacaccauccccgacaagcucggccccuggucccccaucgacauccaccaccucuccugccccaacaaccucgucgucgaggacgagggcugcaccaaccucuccggcuucuccuacauggagcucaaggucggcuacauccucgccaucaaggucaacggcuucaccugcaccggcgucgucaccgaggccgagaccuacaccaacuucgucggcuacgucaccaccaccuucaagcgcaagcacuuccgccccacccccgacgccugccgcgccgccuacaacuggaagauggccggcgacccccgcuacgaggagucccuccacaaccccuaccccgacuaccgcuggcuccgcaccgucaagaccaccaaggagucccucgucaucaucucccccuccgucgccgaccucgaccccuacgaccgcucccuccacucccgcgucuuccccuccggcaagugcuccggcgucgccgucuccuccaccuacugcuccaccaaccacgacuacaccaucuggaugcccgagaacccccgccucggcauguccugcgacaucuucaccaacucccgcggcaagcgcgccuccaagggcuccgagaccugcggcuucgucgacgagcgcggccucuacaagucccucaagggcgccugcaagcucaagcucugcggcguccucggccuccgccucauggacggcaccugggucuccaugcagaccuccaacgagaccaaguggugcccccccgaccagcucgucaaccuccacgacuuccgcuccgacgagaucgagcaccucgucgucgaggagcucguccgcaagcgcgaggagugccucgacgcccucgaguccaucaugaccaccaaguccgucuccuuccgccgccucucccaccuccgcaagcucguccccggcuucggcaaggccuacaccaucuucaacaagacccucauggaggccgacgcccacuacaaguccguccgcaccuggaacgagauccuccccuccaagggcugccuccgcgucggcggccgcugccacccccacgucaacggcgucuucuucaacggcaucauccucggccccgacggcaacguccucauccccgagaugcaguccucccuccuccagcagcacauggagcuccucgaguccuccgucaucccccucguccacccccucgccgaccccuccaccgucuucaaggacggcgacgaggccgaggacuucgucgagguccaccuccccgacguccacaaccaggucuccggcgucgaccucggccuccccaacuggggcaaguacguccuccucuccgccggcgcccucaccgcccucaugcucaucaucuuccucaugaccugcugccgccgcgucaaccgcuccgagcccacccagcacaaccuccgcggcaccggccgcgaggucuccgucaccccccaguccggcaagaucaucuccuccugggagucccacaaguccggcggcgagacccgccucuga

SEQ ID NO: 128011 - RNA, 1575 nt, Artificial Sequence
  derived and/or modified CDS sequence (opt2) from glycoprotein__RABV__LN713628.1
auggucccccaggcccuccucuucgucccccuccucgucuucccccucugcuucggcaaguuccccaucuacaccauccccgacaagcucggccccuggucccccaucgacauccaccaccucuccugccccaacaaccucgucgucgaggacgagggcugcaccaaccucuccggcuucuccuacauggagcucaaggucggcuacauccucgccaucaagaugaacggcuucaccugcaccggcgucgucaccgaggccgagaccuacaccaacuucgucggcuacgucaccaccaccuucaagcgcaagcacuuccgccccacccccgacgccugccgcgccgccuacaacuggaagauggccggcgacccccgcuacgaggagucccuccacaaccccuaccccgacuaccgcuggcuccgcaccgucaagaccaccaaggagucccucgucaucaucucccccuccgucgccgaccucgaccccuacgaccgcucccuccacucccgcgucuuccccuccggcaagugcuccggcgucgccgucuccuccaccuacugcuccaccaaccacgacuacaccaucuggaugcccgagaacccccgccucggcauguccugcgacaucuucaccaacucccgcggcaagcgcgccuccaagggcuccgagaccugcggcuucgucgacgagcgcggccucuacaagucccucaagggcgccugcaagcucaagcucugcggcguccucggccuccgccucauggacggcaccugggucuccaugcagaccuccaacgagaccaaguggugcccccccgaccagcucgucaaccuccacgacuuccgcuccgacgagaucgagcaccucgucgucgaggagcucguccgcaagcgcgaggagugccucgacgcccucgaguccaucaugaccaccaaguccgucuccuuccgccgccucucccaccuccgcaagcucguccccggcuucggcaaggccuacaccaucuucaacaagacccucauggaggccgacgcccacuacaaguccguccgcaccuggaacgagauccuccccuccaagggcugccuccgcgucggcggccgcugccacccccacgucaacggcgucuucuucaacggcaucauccucggccccgacggcaacguccucauccccgagaugcaguccucccuccuccagcagcacauggagcuccucgaguccuccgucaucccccucguccacccccucgccgaccccuccaccgucuucaaggacggcgacgaggccgaggacuucgucgagguccaccuccccgacguccacaaccaggucuccggcgucgaccucggccuccccaacuggggcaaguacguccuccucuccgccggcgcccucaccgcccucaugcucaucaucuuccucaugaccugcugccgccgcgucaaccgcuccgagcccacccagcacaaccuccgcggcaccggccgcgaggucuccgucaccccccaguccggcaagaucaucuccuccugggagucccacaaguccggcggcgagacccgccucuga

SEQ ID NO: 128012 - RNA, 1575 nt, Artificial Sequence
  derived and/or modified CDS sequence (opt2) from glycoprotein__RABV__LN713639.1
auggucccccaggcccuccucuucgucccccuccucgucuucccccucugcuucggcaaguuccccaucuacaccauccccgacaagcucggccccuggucccccaucgacauccaccaccucuccugccccaacaaccucgucgucgaggacgagggcugcaccaaccucuccggcuucuccuacauggagcucaaggucggcuacauccucgccaucaaggucaacggcuucaccugcaccggcgucgucaccgaggccgagaccuacaccaacuucgucggcuacgucaccaccaccuucaagcgcaagcacuuccgccccacccccgacgccugccgcgccgccuacaacuggaagauggccggcgacccccgcuacgaggagucccuccacaaccccuaccccgacuaccgcuggcuccgcaccgucaagaccaccaaggagucccucgucaucaucucccccuccgucgccgaccucgaccccuacgaccgcucccuccacucccgcgucuuccccuccggcaagugcuccggcgucgccgucuccuccaccuacugcuccaccaaccacgacuacaccaucuggaugcccgagaacccccgccucggcauguccugcgacaucuucaccaacucccgcggcaagcgcgccuccaagggcuccgagaccugcggcuucgucgacgagcgcggccucuacaagucccucaagggcgccugcaagcucaagcucugcggcguccucggccuccgccucauggacggcaccugggucuccaugcagaccuccaacgagaccaaguggugcccccccgaccagcucgucaaccuccacgacuuccgcuccgacgagauggagcaccucgucgucgaggagcucguccgcaagcgcgaggagugccucgacgcccucgaguccaucaugaccaccaaguccgucuccuuccgccgccucucccaccuccgcaagcucguccccggcuucggcaaggccuacaccauccucaacaagacccucauggaggccgacgcccacuacaaguccguccgcaccuggaacgagauccuccccuccaagggcugccuccgcgucggcggccgcugccacccccacgucaacggcgucuucuucaacggcaucauccucggccccgacggcaacguccucauccccgagaugcaguccucccuccuccagcagcacauggagcuccucgaguccuccgucaucccccucguccacccccucgccgaccccuccaccgucuucaaggacggcgacgaggccgaggacuucgucgagguccaccuccccgacguccacaaccaggucuccggcgucgaccucggccuccccaacuggggcaaguacguccuccucuccgccggcgcccucaccgcccucaugcucaucaucuuccucaugaccugcugccgccgcgucaaccgcuccgagcccacccagcacaaccuccgcggcaccggccgcgaggucuccgucaccccccaguccggcaagaucaucuccuccugggagucccacaaguccggcggcgagacccgccucuga

SEQ ID NO: 128013 - RNA, 1575 nt, Artificial Sequence
  derived and/or modified CDS sequence (opt2) from glycoprotein__RABV__LN713660.1
auggucccccaggcccuccucuucgucccccuccucgucuucccccucugcuucggcaaguuccccaucuacaccauccccgacaagcucggccccuggucccccaucgacauccaccaccucuccugccccaacaaccucgucgucgaggacgagggcugcaccaaccucuccggcuucuccuacauggagcucaaggucggcuacaucuccgccaucaagaugaacggcuucaccugcaccggcgucgucaccgaggccgagaccuacaccaacuucgucggcuacgucaccaccaccuucaagcgcaagcacuuccgccccacccccgacgccugccgcgccgccuacaacuggaagauggccggcgacccccgcuacgaggagucccuccacaaccccuaccccgacuaccgcuggcuccgcaccgucaagaccaccaaggagucccucgucaucaucucccccuccgucgccgaccucgaccccuacgaccgcucccuccacucccgcgucuuccccuccggcaagugcuccggcgucgccgucuccuccaccuacugcuccaccaaccacgacuacaccaucuggaugcccgagaacccccgccucggcauguccugcgacaucuucaccaacucccgcggcaagcgcgccuccaagggcuccgagaccugcggcuucgucgacgagcgcggccucuacaagucccucaagggcgccugcaagcucaagcucugcggcguccucggccuccgccucauggacggcaccugggucgccaugcagaccuccaacgagaccaaguggugcccccccgaccagcucgucaaccuccacgacuuccgcuccgacgagaucgagcaccucgucgucgaggagcucguccgcaagcgcgaggagugccucgacgcccucgaguccaucaugaccaccaaguccgucuccuuccgccgccucucccaccuccgcaagcucguccccggcuucggcaaggccuacaccaucuucaacaagacccucauggaggccgacgcccacuacaaguccguccgcaccuggaacgagauccuccccuccaagggcugccuccgcgucggcggccgcugccacccccacgucaacggcgucuucuucaacggcaucauccucggccccgacggcaacguccucauccccgagaugcaguccucccuccuccagcagcacauggagcuccucgaguccuccgucaucccccucaugcacccccucgccgaccccuccaccgucuucaaggacggcgacgaggccgaggacuucgucgagguccaccuccccgacguccacgagcaggucuccggcgucgaccucggccuccccaacuggggcaaguacguccuccucuccgccggcgcccucaccgcccucaugcucaucaucuuccucaugaccugcugccgccgcgucaaccgcuccgagcccacccagcacaaccuccgcggcaccggccgcgaggucuccgucaccccccaguccggcaagaucaucuccuccugggaguccuacaaguccggcggcgagacccgccucuga

SEQ ID NO: 128014 - RNA, 1575 nt, Artificial Sequence
  derived and/or modified CDS sequence (opt2) from glycoprotein__RABV__LN713663.1
auggucccccaggcccuccucuucgucccccuccucgucuucccccucugcuucggcaaguuccccaucuacaccauccccgacaagcucggccccuggucccccaucgacauccaccaccucuccugccccaacaaccucgucgucgaggacgagggcugcaccaaccucuccggcuucuccuacauggagcucaaggucggcuacauccucgccaucaaggucaacggcuucaccugcaccggcgucgucaccgaggccgagaccuacaccaacuucgucggcuacgucaccaccaccuucaagcgcaagcacuuccgccccacccccgacgccugccgcgccgccuacaacuggaagauggccggcgacccccgcuacgaggagucccuccacaaccccuaccccgacuaccgcuggcuccgcaccgucaagaccaccaaggagucccucgucaucaucucccccuccgucgccgaccucgaccccuacgaccgcucccuccacucccgcgucuuccccuccggcaagugcuccggcgucgccgucuccuccaccuacugcuccaccaaccacgacuacaccaucuggaugcccgagaacccccgccucggcauguccugcgacaucuucaccaacucccgcggcaagcgcgccuccaagggcuccgagaccugcggcuucgucgacgagcgcggccucuacaagucccucaagggcgccugcaagcucacccucugcggcguccucggccuccgccucauggacggcaccugggucuccaugcagaccuccaacgagaccaaguggugcccccccgacaagcucgucaaccuccacgacuuccgcuccgacgagaucgagcaccucgucgucgaggagcucguccgcaagcgcgaggagugccucgacgcccucgaguccaucaugaccaccaaguccgucuccuuccgccgccucucccaccuccgcaagcucguccccggcuucggcaaggccuacaccaucuucaacaagacccucauggaggccgacgcccacuacaaguccgucgagaccuggaacgagauccuccccuccaagggcugccuccgcgucggcggccgcugccacccccacgucaacggcgucuucuucaacggcaucauccucggccccgacggcaacguccucauccccgagaugcaguccucccuccuccagcagcacauggagcuccucgaguccuccgucaucccccucguccacccccucgccgaccccuccaccgucuucaaggacggcgacgaggccgaggacuucgucgagguccaccuccccgacguccacaaccaggucuccggcgucgaccucggccuccccaacuggggcaaguacguccuccucuccgccggcgcccucaccgcccucaugcucaucaucuuccucaugaccugcugccgccgcgucaaccgcuccgagcccacccagcacaaccuccgcggcaccggccgcgaggucuccgucaccccccaguccggcaagaucaucuccuccugggagucccacaaguccggcggcgagaccauccucuga

SEQ ID NO: 128015 - RNA, 1575 nt, Artificial Sequence
  derived and/or modified CDS sequence (opt2) from glycoprotein__RABV__LN713666.1
auggucccccaggcccuccucuucgucccccuccucgucuucccccucugcuucggcaaguuccccaucuacaccauccccgacaagcucggccccuggucccccaucgacauccaccaccucuccugccccaacaaccucgucgucgaggacgagggcugcaccaaccucuccggcuucuccuacauggagcucaaggucggcuacauccucgccaucaaggucaacggcuucaccugcaccggcgucgucaccgaggccgagaccuacaccaacuucgucggcuacgucaccaccaccuucaagcgcaagcacuuccgccccacccccgacgccugccgcgccgccuacaacuggaagauggccggcgacccccgcuacgaggagucccuccacaaccccuaccccgacuaccgcuggcuccgcaccgucaagaccaccaaggagucccucgucaucaucucccccuccgucgccgaccucgaccccuacgaccgcucccuccacucccgcgucuuccccuccggcaagugcuccggcgucgccgucuccuccaccuacugcuccaccaaccacgacuacaccaucuggaugcccgagaacccccgccucggcauguccugcgacaucuucaccaacucccgcggcaagcgcgccuccaagggcuccgagaccugcggcuucgucgacgagcgcggccucuacaagucccucaagggcgccugcaagcucaugcucugcggcguccucggccuccgccucauggacggcaccugggucuccaugcagaccuccaacgagaccaaguggugcccccccgacaagcucgucaaccuccacgacuuccgcuccgacgagaucgagcaccucgucgucgaggagcucguccgcaagcgcgaggagugccucgacgcccucgaguccaucaugaccaccaaguccgucuccuuccgccgccucucccaccuccgcaagcucguccccggcuucggcaaggccuacaccaucuucaacaagacccucauggaggccgacgcccacuacaaguccgucgagaccuggaacgagauccuccccuccaagggcugccuccgcgucggcggccgcugccacccccacgucaacggcgucuucuucaacggcaucauccucggccccgacggcaacguccucauccccgagaugcaguccucccuccuccagcagcacauggagcuccucgaguccuccgucaucccccucguccacccccucgccgaccccuccaccgucuucaaggacggcgacgaggccgaggacuucgucgagguccaccuccccgacguccacaaccaggucuccggcgucgaccucggccuccccaacuggggcaaguacguccuccucuccgccggcgcccucaccgcccucaugcucaucaucuuccucaugaccugcugccgccgcgucaaccgcuccgagcccacccagcacaaccuccgcggcaccggccgcgaggucuccgucaccccccaguccggcaagaucaucuccuccugggagucccacaaguccggcggcgagaccauccucuga

SEQ ID NO: 128016 - RNA, 1575 nt, Artificial Sequence
  derived and/or modified CDS sequence (opt2) from glycoprotein__RABV__LN879481.2
auggucccccaggcccuccucuucgucccccuccucggcuucucccucugcgucggcaaguuccccaucuacaccauccccgacaagcucggccccuggucccccaucgacauccaccaccucuccugccccaacaaccucgucgucgaggacgagggcugcaccaaccucuccggcuucuccuacauggagcucaaggucggcuacaucuccgccaucaaggucaacggcuucaccugcaccggcgucgucaccgaggccgagaccuacaccaacuucgucggcuacgucaccaccaccuucaagcgcaagcacuuccgccccacccccgacgccugccgcgccgccuacaacuggaagauggccggcgacccccgcuacgaggagucccuccacaaccccuaccccgacuaccacuggcuccgcaccgucaagaccaccaaggagucccucgucaucaucucccccuccgucgccgaccucgaccccuacgacaagucccuccacucccgcgucuuccccggcggcaagugcuccggcaucaccgucuccuccaccuacugcuccaccaaccacgacuacaccaucuggcuccccgagaacccccgccucggcaccuccugcgacaucuucaccaacucccgcggcaagcgcgccuccaagggcuccaagaccugcggcuucgucgacgagcgcggccucuacaagucccucaagggcgccugcaagcucaagcucugcggcguccucggccuccgccucaucgacggcaccugggucgccaugcagaccuccaacgagaccaaguggugcccccccgaccagcucgucaaccuccacgacuuccgcuccgacgagaucgagcaccucgucgucgaggagcucgucaagaagcgcgaggagugccucgacgcccucgaguccaucaugaccaccaaguccgucuccuuccgccgccucucccaccuccgcaagcucguccccggcuucggcaaggccuacaccaucuucaacaagacccucauggaggccgacgcccacuacaaguccguccgcaccuggaacgagaucauccccuccaagggcugccuccgcgucggcggccgcugccaccaccacgucaacggcgucuucuucaacggcaucauccucggccccgacggccacguccucauccccgagaugcaguccucccuccuccagcagcacauggagcuccucgaguccuccgucaucccccucaugcacccccucgccgaccccuccaccgucuucaaggacggcgacgaggccgaggacuucgucgagguccaccuccccgacguccacaagcaggucuccggcgucgaccucggccuccccaacuggggcaaguacguccuccucuccgccggcgcccucaucgcccucaugcucaucaucuuccucaugaccugcugccgccgcgucaaccgccccgaguccacccagcccuccuuccgcggcaccgagcgcaaggucuccaucaccccccaguccggcaaggucaucuccuccugggaguccuacaaguccggcggcgagacccgccucuga

SEQ ID NO: 128017 - RNA, 1575 nt, Artificial Sequence; identical to SEQ ID NO: 127510
  derived and/or modified CDS sequence (opt2) from glycoprotein__RABV__LT598537.1

SEQ ID NO: 128018 - RNA, 1575 nt, Artificial Sequence; identical to SEQ ID NO: 127817
  derived and/or modified CDS sequence (opt2) from glycoprotein__RABV__LT598538.1

SEQ ID NO: 128019 - RNA, 1575 nt, Artificial Sequence
  derived and/or modified CDS sequence (opt2) from glycoprotein__RABV__LT598540.1
auggucccccaggcccuccucuucgucccccuccucgccuuccccaugugcuucggcaaguuccccaucuacaccauccccgacaagcucggccccuggucccccaucgacauccaccaccucuccugccccaacaaccucgucgucgaggacgagggcugcaccaaccucuccggcuucuccuacauggagcucaaggucggcuacaucuccgccaucaaggucaacggcuucaccugcaccggcgucgucaccgaggccgagaccuacaccaacuucgucggcuacgucaccaccaccuucaagcgcaagcacuuccgccccacccccgacgccugccgcgccgccuacaacuggaagauggccggcgacccccgcuacgaggagucccuccacaaccccuaccccgacuaccacuggcuccgcaccgucaagaccaccaaggagucccucaucaucaucucccccuccgucgccgaccucgaccccuacgacaagucccuccacucccgcgucuuccccuccggcaagugccucggcaucaccaucuccuccaccuacugcuccaccaaccacgacuacaccaucuggaugcccgagaacguccgccucggcaccuccugcgacaucuucaccaacucccgcggcaagcgcgccuccaagggcuccaagaccugcggcuucgucgacgagcgcggccucuacaagucccucaagggcgccugcaagcucaagcucugcggcguccucggccuccgccucauggacggcaccugggucgccaugcccaccuccgacgagaccaaguggugcccccccgaccagcucgucaaccuccacgacuuccgcuccgacgagaucgagcaccucgucgucgaggagcucguccgcaagcgcgaggagugccucgacgcccucgaguccaucaugaccaccaaguccgucuccuuccgccgccucucccaccuccgcaagcucguccccggcuucggcaaggccuacaccaucuucaacaagacccucauggaggccgacgcccacuacaaguccguccgcaccuggaacgagaucauccccuccaagggcugccuccgcgucggcggccgcugccacccccacgucaacggcgucuucuucaacggcaucauccucggccccgacggccacguccucauccccgagaugcaguccucccuccuccagcagcacauggagcuccucgaguccuccgucaucccccucaugcacccccucgccgaccccuccaccgucuucaaggacggcgacgaggccgaggacuucgucgagguccaccuccccgacguccacaagcagaucuccggcgucgaccucggccuccccaacuggggcaaguacguccucaugaucgccggcguccucaucgccaugauccucaccaucuuccucaugaccugcugcggccgcggcaaccgccucaaguccacccagcacucccucggcggcaucggccgcaaggucuccuccaccucccaguccggcaaggucaucuccuccugggaguccuacaaguccggcggcgagacccgccucuga

SEQ ID NO: 128020 - RNA, 1575 nt, Artificial Sequence
  derived and/or modified CDS sequence (opt2) from glycoprotein__RABV__LT598541.1
auggucccccaggcccuccucuucgucccccuccucgccuuccccaugugcuucggcaaguuccccaucuacaccauccccgacaagcucggccccuggucccccaucgacauccaccaccucuccugccccaacaaccucgucgucgaggacgagggcugcaccaaccucuccggcuucuccuacauggagcucaaggucggcuacaucuccgccaucaaggucaacggcuucaccugcaccggcgucgucaccgaggccgagaccuacaccaacuucgucggcuacgucaccaccaccuucaagcgcaagcacuuccgccccacccccgacgccugccgcgccgccuacaacuggaagauggccggcgacccccgcuacgaggagucccuccacaaccccuaccccgacuaccacuggcuccgcaccgucaagaccaccaaggagucccucaucaucaucucccccuccgucgccgaccucgaccccuacgacaagucccuccacucccgcgucuuccccuccggcaagugccucggcaucaccaucuccuccaccuacugcuccaccaaccacgacuacaccaucuggaugcccgagaacguccgccucggcaccuccugcgacaucuucaccaacucccgcggcaagcgcgccuccaagggcuccaagaccugcggcuucgucgacgagcgcggccucuacaagucccucaagggcgccugcaagcucaagcucugcggcguccucggccuccgccucauggacggcaccugggucuccaugcccaccuccgacgagaccaaguggugcccccccgaccagcucgucaaccuccacgacuuccgcuccgacgagaucgagcaccucgucgucgaggagcucguccgcaagcgcgaggagugccucgacgcccucgaguccaucaugaccaccaaguccgucuccuuccgccgccucucccaccuccgcaagcucguccccggcuucggcaaggccuacaccaucuucaacaagacccucauggaggccgacgcccacuacaaguccguccgcaccuggaacgagaucauccccuccaagggcugccuccgcgucggcggccgcugccacccccacgucaacggcgucuucuucaacggcaucauccucggccccgacggccacguccucauccccgagaugcaguccucccuccuccagcagcacauggagcuccucgaguccuccgucaucccccucaugcacccccucgccgaccccuccaccgucuucaaggacggcgacgaggccgaggacuucgucgagguccaccuccccgacguccacaagcagaucuccggcgucgaccucggccuccccaacuggggcaaguacguccucaucaucgccggcguccucaucgccaugauccucaccaucuuccucaccaccugcugcggccgcggcaaccgccccaaguccacccagcacucccucggcggcaucggccgcaaggucuccuccaccucccaguccggcaaggucaucuccuccugggaguccuacaaguccggcggcgagacccgccucuga

SEQ ID NO: 128021 - RNA, 1575 nt, Artificial Sequence; identical to SEQ ID NO: 127845
  derived and/or modified CDS sequence (opt2) from glycoprotein__RABV__LT598543.1

SEQ ID NO: 128022 - RNA, 1575 nt, Artificial Sequence; identical to SEQ ID NO: 127467
  derived and/or modified CDS sequence (opt2) from glycoprotein__RABV__M13215.1

SEQ ID NO: 128023 - RNA, 1575 nt, Artificial Sequence
  derived and/or modified CDS sequence (opt2) from glycoprotein__RABV__M32751.1
auggucccccagguccuccucuucgccccccuccucgucuucccccucugcuucggcaaguuccccaucuacaccauccccgacaagcucggccccuggucccccaucgaccuccaccaccucuccugccccaacaaccucgucgucgaggacgagggcugcaccaaccucuccggcuucuccuacauggagcucaaggucggcuacaucuccgccaucaaggucaacggcuucaccugcaccggcgucgucaccgaggccgagaccuacaccaacuucgucggcuacgucaccaccaccuucaagcgcaagcacuuccgccccacccccgacgccugccgcgccgccuacaacuggaagauggccggcgacccccgcuacgaggagucccuccacaaccccuaccccgacuaccacuggcuccgcaccgucaagaccaccaaggagucccucgucaucaucucccccuccgucaccgaccucgaccccuacgacaagucccuccacucccgcgucuuccccggcggcaacugcuccggcaucaccgucuccuccaccuacugcuccaccaaccacgacuacaccaucuggaugcccgagaaccuccgccucggcaccuccugcgacaucuucacccacucccgcggcaagcgcgccuccaagggcgacaagaccugcggcuucgucgacgagcgcggccucuacaagucccucaagggcgccugcaagcucaagcucugcggcguccucggccuccgccucauggacggcaccugggucgccaugcagaccuccgacgagaccaaguggugcccccccggccagcucgucaaccuccacgacuuccgcuccgacgagaucgagcaccucgucgaggaggagcucgucaagaagcgcgaggagugccucgacgcccucgaguccaucaugaccaccaaguccgucuccuuccgccgccucucccaccuccgcaagcucguccccggcuucggcaaggccuacaccaucuucaacaagacccucauggaggccgacgcccacuacaaguccguccagaccuggaacgagaucauccccuccaagggcugccuccgcgucggcgagcgcugccacccccacgucaacggcgucuucuucaacggcaucauccucggcuccgacggccacguccucauccccgagaugcaguccucccuccuccagcagcacauggagcuccucgaguccuccgucaucccccucaugcacccccucgccgaccccuccaccgucuucaaggacggcgacgaggucgaggacuucgucgagguccaccuccccgacguccacaagcaggucuccggcgucgaccucggccuccccaaguggggcaaguacguccucaugaucgccggcgcccucaucgcccucaugcucaucaucuuccucaugaccugcugccgccgcgucaaccgccccgaguccacccaguccaaccucggcggcaccggccgcaacgucuccguccccucccaguccggcaaggucaucuccuccugggaguccuacaaguccggcggcgagacccgccucuga

SEQ ID NO: 128024 - RNA, 1575 nt, Artificial Sequence
  derived and/or modified CDS sequence (opt2) from glycoprotein__RABV__M81058.1
auggucccccaggcccuccucuucgucccccuccucgucuucccccucugcuucggcaaguuccccaucuacaccauccccgacaagcucggccccuggucccccaucgacauccaccaccuccgcugccccaacaaccucgucgucgaggacgagggcugcaccaaccucuccggcuucuccuacauggagcucaaggucggcuacaucuccgccaucaaggucaacggcuucaccugcaccggcgucgucaccgaggccgagaccuacaccaacuucgucggcuacgucaccaccaccuucaagcgcaagcacuuccgccccacccccgacgccugccgcgccgccuacaacuggaagauggccggcgacccccgcuacgaggagucccuccacaaccccuaccccgacuaccacuggcuccgcaccgucaagaccaccaaggagucccucgucaucaucucccccuccgucgccgaccucgaccccuacgacaagucccuccacucccgcgucuuccccuccggcaacugcuccggcaucaccgucuccuccaccuacugcuccaccaaccacgacuacaccaucuggaugcccgagaacccccgccucgagaccuccugcgacaucuucaccaacucccgcggcaagcgcgccuccaagggcuccaagaccugcggcuucgucgacgagcgcggccucuacaagucccucaagggcgccugcaagcucaagcucugcggcguccucggccuccgccucauggacggcaccugggucgccaugcagaccuccgacgagaccaaguggugcccccccgaccagcucgucaaccuccacgacuuccgcuccgacgagaucgagcaccucgucgucgaggagcucgucaagaagcgcgaggagugccucgacgcccucgaguccaucaugaccaccaaguccgucuccuuccgccgccucucccaccuccgcaagcucguccccggcuucggcaaggccuacaccaucuucaacaagacccucauggaggccgacgcccacuacaaguccguccgcaccuggaacgagaucauccccuccaagggcugccuccgcgucggcggccgcugccacccccacgucaacggcgucuucuucaacggcaucauccucggccccgacggccacguccucauccccgagaugcaguccucccuccuccagcagcacauggagcuccucgaguccuccgucaucccccucaugcacccccucgccgaccccuccaccgucuucaaggacggcgacgaggccgaggacuucgucgagguccaccuccccgacguccacaagcaggucuccggcgucgaccucggccuccccaacuggggcaaguacguccuccucuccgccggcacccucaucgcccucaugcucaucaucuuccucaugaccugcugccgccgcgucaaccgccccaaguccaccgagcgcucccucggcgagaccggccgcaaggucuccgucaccucccaguccggcaaggucaucuccuccugggaguccuacaaguccggcggcgagacccgccgcuga

SEQ ID NO: 128025 - RNA, 1575 nt, Artificial Sequence
  derived and/or modified CDS sequence (opt2) from glycoprotein__RABV__M81059.1
auggucccccaggcccuccucuucgucccccuccucgucuucccccucugcuucggcaaguuccccaucuacaccauccccgacaagcucggccccuggucccccaucgacauccaccaccuccgcugccccaacaaccucgucgucgaggacgagggcugcaccaaccucuccggcuucuccuacauggagcucaaggucggcuacaucuccgccaucaaggucaacggcuucaccugcaccggcgucgucaccgaggccgagaccuacaccaacuucgucggcuacgucaccaccaccuucaagcgcaagcacuuccgccccacccccgacgccugccgcgccgccuacaacuggaagauggccggcgacccccgcuacgaggagucccuccacaaccccuaccccgacuaccacuggcuccgcaccgucaagaccaccaaggagucccucgucaucaucucccccuccgucgccgaccucgaccccuacgacaagucccuccacucccgcgucuuccccuccggcaacugcuccggcaucaccgucuccuccaccuacugcuccaccaaccacgacuacaccaucuggaugcccgagaacccccgccucgagaccuccugcgacaucuucaccaacucccgcggcaagcgcgccuccaagggcuccaagaccugcggcuucgucgacgagcgcggccucuacaagucccucaagggcgccugcaagcucaagcucugcggcguccucggccuccgccucauggacggcaccugggucgccaugcagaccuccgacgagaccaaguggugcccccccgaccagcucgucaaccuccacgacuuccgcuccgacgagaucgagcaccucgucgucgaggagcucgucaagaagcgcgaggagugccucgacgcccucgaguccaucaugaccaccaaguccgucucccuccgccgccucucccaccuccgcaagcucguccccggcuucggcaaggccuacaccaucuucaacaagacccucauggaggccgaggcccacuacaaguccguccagaccuggaacgagaucauccccuccaagggcugccuccgcgucggcggccgcugccacccccacgucaacggcgucuucuucaacggcaucauccucggccccgacggccacguccucauccccgagaugcaguccucccuccuccagcagcacauggagcuccucgaguccuccgucaucccccucaugcacccccucgccgaccccuccaccgucuucaaggacggcgacgaggccgaggacuucgucgagguccaccuccccgacguccacaagcaggucuccggcgucgaccucggccuccccaacuggggcaaguacguccuccucuccgccggcacccucaucgcccucaugcucaucaucuuccucaugaccugcugccgccgcgucaaccgccccaaguccaccgagcgcucccucggcgagaccggccgcaaggucuccgucaccucccaguccggcaaggucaucuccuccugggaguccuacaaguccggcggcgagacccgccgcuga

SEQ ID NO: 128026 - RNA, 1575 nt, Artificial Sequence
  derived and/or modified CDS sequence (opt2) from glycoprotein__RABV__M81060.1
auggucccccaggcccuccucuucgucccccuccucgucuucucccucugcuucggcaaguuccccaucuacaccauccccgacaagcucggccccuggucccccaucgacauccaccaccucuccugccccaacaaccucgucgucgaggacgagggcugcaccaaccucuccggcuucuccuacauggagcucaaggucggcuacaucuccgccaucaaggucaacggcuucaccugcaccggcgucgucaccgaggccgagaccuacaccaacuucgucggcuacgucaccaccaccuucaagcgcaagcacuuccgccccacccccgacgccugccgcgccgccuacaacuggaagauggccggcgacccccgcuacgaggagucccuccacaaccccuaccccgacuaccacuggcuccgcaccgucaagaccaccaaggagucccucgucaucaucucccccuccgucgccgaccucgaccccuacgacaagucccuccacucccgcgucuuccccuccggcaacugcuccggcaucaccgucuccuccaccuacugcuccaccaaccacgacuacaccaucuggaugcccgagaacccccgccucgagaccuccugcgacaucuucaccaacucccgcggcaagcgcgccuccaagggcuccaagaccugcggcuucgucgacgagcgcggccucuacaagucccucaagggcgccugcaagcucaagcucugcggcguccucggccuccgccucauggacggcaccugggucgccaugcagaccuccgacgagaccaaguggugcccccccgaccagcucgucaaccuccacgacuuccgcuccgacgagaucgagcaccucgucgucgaggagcucgucaagaagcgcgaggagugccucgacgcccucgaguccaucaugaccaccaaguccgucuccuuccgccgccucucccaccuccgcaagcucguccccggcuucggcaaggccuacaccaucuucaacaagacccucauggaggccgacgcccacuacaaguccguccgcaccuggaacgagaucauccccuccaagggcugccuccgcgucggcggccgcugccacccccacgucaacggcgucuucuucaacggcaucauccucggccccgacggccacguccucauccccgagaugcaguccucccuccuccagcagcacauggagcuccucgaguccuccgucaucccccucaugcacccccucgccgaccccuccaccgucuucaaggacggcgacgagggcgaggacuucgucgagguccaccuccccgacguccacaagcaggucuccggcgucgaccucggccuccccaacuggggcaaguacguccuccucuccgccggcacccucaucgcccucaugcucaucaucuuccucaugaccugcugccgccgcgucaaccgccccaaguccaccgagcgcucccucggcgagaccggccgcgaggucuccgucaccucccaguccggcaagaucaucuccuccugggaguccuacaaguccggcggcgagacccgccgcuga

SEQ ID NO: 128027 - RNA, 1575 nt, Artificial Sequence
  derived and/or modified CDS sequence (opt2) from glycoprotein__RABV__S72465.1
auggucccccaggcccuccuccucguccccauccucggcuucuccuccugcuucggcaaguuccccaucuacaccauccccgacacccucggccccuggucccccaucgacauccaccaccucuccugccccaacaaccucgucgucgaggacgagggcugcaccaaccucuccggcuucuccuacauggagcucaaggucggccacaucuccgccaucaaggucaacggcuucaccugcaccggcgucgucaccgaggccgagaccuacaccaacuucgucggcuacgucaccaccaccuucaagcgcaagcacuuccgccccacccccgacgccugccgcgccgccuacaacuggaagauggccggcgacccccgcuacgaggagucccuccacucccccuaccccgacuaccacuggcuccgcaccgucaagaccaccaaggagucccucgucaucaucucccccuccgucgccgaccucgaccccuacgacaacucccuccacucccgcgucuuccccuccggcaagugcuccggcaucaccgucuccuccgucuacugcuccaccaaccacgacuacaccgucuggaugcccgagucccuccgccucggcaccuccugcgacaucuucaccaacucccgcggcaagcgcgucuccaagggcuccaagaccugcggcuucgucgacgagcgcggccucuacaagucccucaagggcgccugcaagcucaagcucugcggcguccgcggccuccgccucauggacggcaccugggucgccaugcagaccuccaacgagaccaaguggugcccccccgaccagcucgucaaccuccacgaccuccgcuccgacgagaucgagcaccucgucaucgaggagcucgucaagaagcgcgaggagugccucgacgcccucgaguccaucaucaccaccaaguccgucuccuuccgccgccucuccuaccuccgcaagcucguccccggcuucggcaaggccuacaccaucuucaacaagacccucauggaggccgaggcccacuacaaguccguccgcaccuggaacgagaucauccccuccaagggcugccuccgcgucggcggccgcugccacccccacgucaacggcgucuucuucaacggcaucauccucggccccgacggccacguccucauccccgagaugcaguccucccuccuccagcagcacaucgagcuccucgaguccuccgucaucccccucaugcacccccucgccgaccccuucaccgucuucaaggacggcgacgagaccgaggacuucaucgagguccaccuccccgacguccacgagcaggucuccggcgucgaccucggccuccccaacuggggcgaguacguccuccucuccgccggcacccucaucgcccucaugcucaucaucuuccucaugaccugcugccgcaaggucgaccgccccgaguccacccagcgcucccuccgcggcaccggccgcaacgucuccgucaccucccaguccggcaaguucauccccuccugggaguccuacaaguccggcggcgagaccggccucuga

SEQ ID NO: 128028 - RNA, 1575 nt, Artificial Sequence
  derived and/or modified CDS sequence (opt2) from glycoprotein__RABV__U03764.1
auggucccccaggcccuccucuucgucccccuccucgccuuccccaugugcuucggcaaguuccccaucuacaccauccccgacaagcucggccccuggucccccaucgacauccaccaccucuccugccccaacaaccucgucgucgaggacgagggcugcaccaaccucuccggcuucuccuacauggagcucaaggucggcuacaucuccgccaucaaggucaacggcuucaccugcaccggcgucgucaccgaggccgagaccuacaccaacuucgucggcuacgucaccaccaccuucaagcgcaagcacuuccgccccacccccgacgccugccgcgccgccuacaacuggaagauggccggcgacccccgcuacgaggagucccuccacaaccccuaccccgacuaccacuggcuccgcaccgucaagaccaccaaggagucccucaucaucaucucccccuccgucgccgaccucgaccccuacgacaagucccuccacucccgcgucuuccccuccggcaagugccucggcaucaccaucuccuccaccuacugcuccaccaaccacgacuacaccaucuggaugcccgagaaccuccgccucggcaccuccugcgacaucuucaccaacucccgcggcaagcgcgccuccaagggcuccaagaccugcggcuucgucgacgagcgcggccucuacaagucccucaagggcgccugcaagcucaagcucugcggcguccucggccuccgccucauggacggcaccugggucgccaugcagaccuccgacgagaccaaguggugcccccccgaccagcucgucaaccuccacgacuuccgcuccgacgagaucgagcaccucgucgucgaggagcucgucaagaagcgcgaggagugccucgacgcccucgaguccaucaugaccaccaaguccgucuccuuccgccgccucucccaccuccgcaagcucguccccggcuucggcaaggccuacaccaucuucaacaagacccucauggaggccgacgcccacuacaaguccguccgcaccuggaacgagaucauccccuccaagggcugccuccgcgucggcggccgcugccacccccacgucaacggcgucgucuucaacggcaucauccucggccccgacggccacguccucauccccgagaugcaguccucccuccuccagcagcacauggagcuccucgaguccuccgucaucccccucaugcacccccucgccgaccccuccaccgucuucaaggacggcgacgaggccgaggacuucgucgagguccaccuccccgacguccacaagcagaucuccggcgucgaccucggccuccccaacuggggcaaguacguccucaucaucgccggcguccucaucgccaugauccucaccaucuuccucaugaccugcugcggccgcggcaaccgccccaaguccacccagcacucccucggcggcaucggccgcaaggucuccgccaccucccaguccggcaaggucaucuccuccugggaguccuacaaguccggcggcgagacccgccucuga

SEQ ID NO: 128029 - RNA, 1575 nt, Artificial Sequence
  derived and/or modified CDS sequence (opt2) from glycoprotein__RABV__U03765.1
auggucccccaggcccuccucuucgucccccuccucgccuuccccaugugcuucggcaaguuccccaucuacaccauccccgacaagcucggccccuggucccccaucgacauccaccaccucuccugccccaacaaccucgucgucgaggacgagggcugcaccaaccucuccggcuucuccuacauggagcucaaggucggcuacaucuccgccaucaaggucaacggcuucaccugcaccggcgucgucaccgaggccgagaccuacaccaacuucgucggcuacgucaccaccaccuucaagcgcaagcacuuccgccccacccccgacgccugccgcgccgccuacaacuggaagauggccggcgacccccgcuacgaggagucccuccacaaccccuaccccgacuaccacuggcuccgcaccgucaagaccaccaaggagucccucaucaucaucucccccuccgucgccgaccucgaccccuacgacaagucccuccacucccgcgucuuccccuccggcaagugccucggcaucaccaucuccuccaccuacugcuccaccaaccacgacuacaccaucuggaugcccgagaacguccgccucggcaccuccugcgacaucuucaccaacucccgcggcaagcgcgccuccaagggcuccaagaccugcggcuucgucgacgagcgcggccucuacaagucccucaagggcgccugcaagcucaagcucugcggcguccucggccuccgccucauggacggcaccugggucgccaugcccaccuccgacgagaccaaguggugcccccccgaccagcucgucaaccuccacgacuuccgcuccgacgagaucgagcaccucgucgucgaggagcucguccgcaagcgcgaggagugccucgacgcccucgaguccaucaugaccaccaaguccgucuccuuccgccgccucucccaccuccgcaagcucguccccggcuucggcaaggccuacaccaucuucaacaagacccucauggaggccgacgcccacuacaaguccguccgcaccuggaacgagaucauccccuccaagggcugccuccgcgucggcggccgcugccacccccacgucaacggcgucgucuucaacggcaucauccucggccccgacggccacguccucauccccgagaugcaguccucccuccuccagcagcacauggagcuccucgaguccuccgucaucccccucaugcacccccucgccgaccccuccaccgucuucaaggacggcgacgaggccgaggacuucgucgagguccaccuccccgacguccacaagcagaucuccggcgucgaccucggccuccccaacuggggcaaguacguccucaccaucgccggcguccucaucgccaugauccucaccaucuuccucaugaccugcugcggccgcggcaaccgccccaaguccacccagcacucccucggcggcaucggccgcaaggucuccuccaccucccaguccggcaaggucaucuccuccugggaguccuacaaguccggcggcgagacccgccucuga

SEQ ID NO: 128030 - RNA, 1575 nt, Artificial Sequence
  derived and/or modified CDS sequence (opt2) from glycoprotein__RABV__U03766.1
auggucccccaggcccuccucuucgucccccuccucgccuuccccaugugcuucggcaaguuccccaucuacaccauccccgacaagcucggccccuggucccccaucgacauccaccaccucuccugccccaacaaccucgucgucgaggacgagggcugcaccaaccucuccggcuucuccuacauggagcucaaggucggcuacaucuccgccaucaaggucaacggcuucaccugcaccggcgucgucaccgaggccgagaccuacaccaacuucgucggcuacgucaccaccaccuucaagcgcaagcacuuccgccccacccccgacgccugccgcgccgccuacaacuggaagauggccggcgacccccgcuacgaggagucccuccacaaccccuaccccgacuaccacuggcuccgcaccgucaagaccaccaaggagucccucaucaucaucucccccuccgucgccgaccucgaccccuacgacaagucccuccacucccgcgucuuccccuccggcaagugccucggcaucaccaucuccuccaccuacugcuccaccaaccacgacuacaccaucuggaugcccgagaacguccgccucggcaccuccugcgacaucuucaccaacucccgcggcaagcgcgccuccaagggcuccaagaccugcggcuucgucgacgagcgcggccucuacaagucccucaagggcgccugcaagcucaagcucugcggcguccucggccuccgccucauggacggcaccugggucgccaugcccaccuccgacgagaccaaguggugcccccccgaccagcucgucaaccuccacgacuuccgcuccgacgagaucgagcaccucgucgucgaggagcucguccgcaagcgcgaggagugccucgacgcccucgaguccaucaugaccaccaaguccgucuccuuccgccgccucucccaccuccgcaagcucguccccggcuucggcaaggccuacaccaucuucaacaagacccucauggaggccgacgcccacuacaaguccguccgcaccuggaacgagaucauccccuccaagggcugccuccgcgucggcggccgcugccacccccacgucaacggcgucgucuucaacggcaucauccucggccccgacggccacguccucauccccgagaugcaguccucccuccuccagcagcacauggagcuccucgaguccuccgucaucccccucaugcacccccucgccgaccccuccaccgucuucaaggacggcgacgaggccgaggacuucgucgagguccaccuccccgacguccacaagcagaucuccggcgucgaccucggccuccccaacuggggcaaguacguccucaucaucgccggcguccucaucgccaugauccucaccaucuuccucaugaccugcugcggccgcggcaaccgccccaaguccacccagcacucccucggcggcaucggccgcaaggucuccuccaccucccaguccggcaaggucaucuccuccugggaguccuacaaguccggcggcgagacccgccucuga

SEQ ID NO: 128031 - RNA, 1575 nt, Artificial Sequence
  derived and/or modified CDS sequence (opt2) from glycoprotein__RABV__U03767.1
auggucccccaggcccuccucuucgucccccuccucgccuuccccaugugcuucggcaaguuccccaucuacaccauccccgacaagcucggccccuggucccccaucgacauccaccaccucuccugccccaacaaccucgucgucgaggacgagggcugcaccaaccucuccggcuucuccuacauggagcucaaggucggcuacaucuccgccaucaaggucaacggcuucaccugcaccggcgucgucaccgaggccgagaccuacaccaacuucgucggcuacgucaccaccaccuucaagcgcaagcacuuccgccccacccccgacgccugccgcgccgccuacaacuggaagauggccggcgacccccgcuacgaggagucccuccacaaccccuaccccgacuaccacuggcuccgcaccgucaagaccaccaaggagucccucaucaucaucucccccuccgucgccgaccucgaccccuacgacaagucccuccacucccgcgucuuccccuccggcaagugccucggcaucaccaucuccuccaccuacugcuccaccaaccacgacuacaccaucuggaugcccgacaacguccgccucggcaccuccugcgacaucuucaccaacucccgcggcaagcgcgccuccaagggcuccaagaccugcggcuucgucgacgagcgcggccucuacaagucccucaagggcgccugcaagcucaagcucugcggcguccucggccuccgccucauggacggcaccugggucgccaugcccaccuccgacgagaccaaguggugcccccccggccagcucgucaaccuccacgacuuccgcuccgacgagaucgagcaccucgucgucgaggagcucguccgcaagcgcgaggagugccucgacgcccucgaguccaucaugaccaccaaguccgucuccuuccgccgccucucccaccuccgcaagcucguccccggcuucggcaaggccuacaccaucuucaacaagacccucauggaggccgacgcccacuacaaguccguccgcaccuggaacgagaucauccccuccaagggcugccuccgcgucggcggccgcugccacccccacgucaacggcgucgucuucaacggcaucauccucggccccgacggccacguccucauccccgagaugcaguccucccuccuccagcagcacauggagcuccucgaguccuccgucaucccccucaugcacccccucgccgaccccuccaccgucuucaaggacggcgacgaggccgaggacuucgucgagguccaccuccccgacguccacaagcagaucuccggcgucgaccucggccuccccaacuggggcaaguacguccucaucaucgccggcguccucaucgccaugauccucaccaucuuccucaugaccugcugcggccgcggcaaccgccccaaguccacccagcacucccucggcggcaucggccgcaaggucuccuccaccucccaguccggcaaggucaucuccuccugggaguccuacaaguccggcggcgagacccgccucuga

SEQ ID NO: 128032 - RNA, 1575 nt, Artificial Sequence
  derived and/or modified CDS sequence (opt2) from glycoprotein__RABV__U11736.2
auggucccccaggcccuccuccucgucccccuccucgccuuccccaugugcuucggcaaguuccccaucuacaccauccccgacaagcucggccccuggucccccaucgacauccaccaccucuccugccccaacaaccucgucgucgaggacgagggcugcaccaaccucuccggcuucuccuacauggagcucaaggucggcuacaucuccgccaucaaggucaacggcuucaccugcaccggcgucgucaccgaggccgagaccuacaccaacuucgucggcuacgucaccaccaccuucaagcgcaagcacuuccgccccacccccgacgccugccgcgccgccuacaacuggaagauggccggcgacccccgcuacgaggagucccuccacaaccccuaccccgacuaccacuggcuccgcaccgucaagaccaugaaggagucccucaucaucaucucccccuccgucgccgaccucgaccccuacgacaagucccuccacucccgcgucuuccccuccggcaagugccucggcaucaccaucuccuccaccuacugcuccaccaaccacgacuacaccaucuggaugcccgagaaccuccgccucggcaccuccugcgacaucuucaccaacucccgcggcaagcgcgccuccaagggcuccaagaccugcggcuucgucgacgagcgcggccucuacaagucccucaagggcgccugcaagcucaagcucugcggcguccucggccuccgccucauggacggcaccugggucgccaugcagaccuccgacgagaccaaguggugcccccccgaccagcucgucaaccuccacgacuuccgcuccgacgagaucgagcaccucgucgucgaggagcucgucaagaagcgcgaggagugccucgacgcccucgaguccaucaugaccaccaaguccgucuccuuccgccgccucucccaccuccgcaagcucguccccggcuucggcaaggccuacaccaucuucaacaagacccucauggaggccgacgcccacuacaaguccguccgcaccuggaacgagaucauccccuccaagggcugccuccgcgucggcggccgcugccacccccacgucaacggcgucgucuucaacggcaucauccucggccccgacggccacguccucauccccgagaugcaguccucccuccuccagcagcacauggagcuccucgaguccuccgucaucccccucaugcacccccucgccgaccccuccaccgucuucaaggacggcgacgaggccgaggacuucgucgagguccaccuccccgacguccacaagcagaucuccggcgucgaccucggccuccccaacuggggcaaguacguccucaucaucgccggcguccucaucgccaugauccucaccaucuuccucaugaccugcugcggccgcggcaaccgcuccaaguccacccagcacucccucggcggcaucggccgcaaggucuccgccaccucccaguccggcaaggucaucuccuccugggaguccuacaaguccggcuccgagacccgccucuga

SEQ ID NO: 128033 - RNA, 1575 nt, Artificial Sequence
  derived and/or modified CDS sequence (opt2) from glycoprotein__RABV__U11743.2
auggucccccaggcccuccucuucgucccccuccucgccuuccccaugugcuucggcaaguuccccaucuacaccauccccgacaagcucggccccuggucccccaucgacauccaccaccucuccugccccaacaaccucgucgucgaggacgagggcugcaccaaccucuccggcuucuccuacauggagcucaaggucggcuacaucuccgccaucaaggucaacggcuucaccugcaccggcgucgucaccgaggccgagaccuacaccaacuucgucggcuacgucaccaccaccuucaagcgcaagcacuuccgccccacccccgacgccugccgcgccgccuacaacuggaagauggccggcgacccccgcuacgaggagucccuccacaaccccuaccccgacuaccacuggcuccgcaccgucaagaccaccaaggagucccucaucaucaucucccccuccgucgccgaccucgaccccuacgacaagucccuccacucccgcgucuuccccuccggcaagugccucggcaucaccaucuccuccaccuacugcuccaccaaccacgacuacaccaucuggaugcccgagaaccuccgccucggcaccuccugcgacaucuucaccaacucccgcggcaagcgcgccuccaagggcuccaagaccugcggcuucgucgacgagcgcggccucuacaagucccucaagggcgccugcaagcucaagcucugcggcguccucggccuccgccucauggacggcaccugggucgccaugcagaccuccgacgagaccaaguggugcccccccgaccagcucgucaaccuccacgacuuccgcuccgacgagaucgagcaccucgucgucgaggagcucgucaagaagcgcgaggagugccucgacgcccucgaguccaucaugaccaccaaguccgucuccuuccgccgccucucccaccuccgcaagcucguccccggcuucggcaaggccuacaccaucuucaacaagacccucauggaggccgacgcccacuacaaguccguccgcaccuggaacgagaucauccccuccaagggcugccuccgcgucggcggccgcugccacccccacgucaacggcgucgucuucaacggcaucauccucggccccgacggccacguccucauccccgagaugcaguccucccuccuccagcagcacauggagcuccucgaguccuccgucaucccccucaugcacccccucgccgaccccuccaccgucuucaaggacggcgacgaggccgaggacuucgucgagguccaccuccccgacguccacaagcagaucuccggcgucgaccucggccuccccaacuggggcaaguacguccucaucaucgccggcguccucaucgccaugauccucaccaucuuccucaugaccugcugcggccgcggcaaccgccccaaguccacccagcacucccucggcggcaucggccgcaaggucuccgccaccucccagucccgcaaggucaucuccuccugggaguccuacaaguccggcggcgagacccgccucuga

SEQ ID NO: 128034 - RNA, 1575 nt, Artificial Sequence; identical to SEQ ID NO: 128033
  derived and/or modified CDS sequence (opt2) from glycoprotein__RABV__U11747.2

SEQ ID NO: 128035 - RNA, 1575 nt, Artificial Sequence; identical to SEQ ID NO: 128028
  derived and/or modified CDS sequence (opt2) from glycoprotein__RABV__U11748.2

SEQ ID NO: 128036 - RNA, 1575 nt, Artificial Sequence
  derived and/or modified CDS sequence (opt2) from glycoprotein__RABV__U11750.2
auggucccccaggcccuccucuucgucccccuccucgccuuccccaugugcuucggcaaguuccccaucuacaccauccccgacaagcucggccccuggucccccaucgacauccaccaccucuccugccccaacaaccucgucgucgaggacgagggcugcaccaaccucuccggcuucuccuacauggagcucaaggucggcuacaucuccgccaucaaggucaacggcuucaccugcaccggcgucgucaccgaggccgagaccuacaccaacuucgucggcuacgucaccaccaccuucaagcgcaagcacuuccgccccacccccgacgccugccgcgccgccuacaacuggaagauggccggcgacccccgcuacgaggagucccuccacaaccccuaccccgacuaccacuggcuccgcaccgucaagaccaccaaggagucccucaucaucaucucccccuccgucgccgaccucgaccccuacgacaagucccuccacucccgcgucuuccccuccggcaagugccucggcaucaccaucuccuccaccuacugcuccaccaaccacgacuacaccaucuggaugcccgagaaccuccgccucggcaccuccugcgacaucuucaccaacucccgcggcaagcgcgccuccaagggcuccaagaccugcggcuucgucgacgagcgcggccucuacaagucccucaagggcgccugcaagcucaagcucugcggcguccucggccuccgccucauggacggcaccugggucgccaugcagaccuccgaggagaccaaguggugcccccccgaccagcucgucaaccuccacgacuuccgcuccgacgagaucgagcaccucgucgucgaggagcucgucaagaagcgcgaggagugccucgacgcccucgaguccaucaugaccaccaaguccgucuccuuccgccgccucucccaccuccgcaagcucguccccggcuucggcaaggccuacaccaucuucaacaagacccucauggaggccgacgcccacuacaaguccguccgcaccuggaacgagaucauccccuccaagggcugccuccgcgucggcggccgcugccacccccacgucaacggcgucgucuucaacggcaucauccucggccccgacggccgcguccucauccccgagaugcaguccucccuccuccagcagcacauggagcuccucgaguccuccgucaucccccucaugcacccccucgccgaccccuccaccgucuucaaggacggcgacgaggccgaggacuucgucgagguccaccuccccgacguccacaagcagaucuccggcgucgaccucggccuccccaacuggggcaaguacguccucaucaucgccggcguccucaucgccaccauccucaccaucuuccucauggccugcugcggccgcggcaaccgccccaaguccacccagcacucccucggcggcaucggccgcaaggucuccgccaccucccaguccggcaaggucaucuccuccugggaguccuacaaguccggcggcgagacccgccucuga

SEQ ID NO: 128037 - RNA, 1575 nt, Artificial Sequence
  derived and/or modified CDS sequence (opt2) from glycoprotein__RABV__U11752.2
auggucccccaggcccuccucuucgucccccuccucgccuuccccaugugcuucggcaaguuccccaucuacaccauccccgacaagcucggccccuggucccccaucgacauccaccaccucuccugccccaacaaccucgucgucgaggacgagggcugcaccaaccucuccggcuucuccuacauggagcucaaggucggcuacaucuccgccaucaaggucaacggcuucaccugcaccggcgucgucaccgaggccgagaccuacaccaacuucgucggcuacgucaccaccaccuucaagcgcaagcacuuccgccccacccccgacgccugccgcgccgccuacaacuggaagauggccggcgacccccgcuacgaggagucccuccacaaccccuaccccgacuaccacuggcuccgcaccgucaagaccaccaaggagucccucaucaucaucucccccuccgucgccgaccucgaccccuacgacaagucccuccacucccgcgucuuccccuccggcaagugccucggcaucaccaucuccuccaccuacugcuccaccaaccacgacuacaccaucuggaugcccgagaaccuccgccucggcaccuccugcgacaucuucaccaacucccgcggcaagcgcgccuccaagggcuccaagaccugcggcuucgucgacgagcgcggccucuacaagucccucaagggcgccugcaagcucaagcucugcggcguccucggccuccgccucauggacggcaccugggucgccaugcagaccuccgacgagaccaaguggugcccccccgaccagcucgucaaccuccacgacuuccgcuccgacgagaucgagcaccucgucgucgaggagcucgucaagaagcgcgaggagugccucgacgcccucgaguccaucaugaccaccaaguccgucuccuuccgccgccucucccaccuccgcaagcucguccccggcuucggcaaggccuacaccaucuucaacaagacccucauggaggccgacgcccacuacaaguccguccgcaccuggaacgagaucauccccuccaagggcugccuccgcgucggcggccgcugccacccccacgucaacggcgucgucuucaacggcaucauccucggccccgacggccacguccucauccccgagaugcaguccucccuccuccagcagcacauggagcuccucgaguccuccgucaucccccucaugcacccccucgccgaccccuccaccgucuucaaggacggcgacgaggccgaggacuucgucgagguccaccuccccgacguccacaagcagaucuccggcgucgaccucggccuccccaacuggggcaaguacguccucaucaucgccggcguccucaucgucaugauccucaccaucuuccucaugaccugcugcggccgcggcaaccgccccaaguccacccagcacucccucggcggcaucggccgcaaggucuccgccaccucccaguccggcaaggucaucuccuccugggaguccuacaaguccggcggcgagacccgccucuga

SEQ ID NO: 128038 - RNA, 1575 nt, Artificial Sequence
  derived and/or modified CDS sequence (opt2) from glycoprotein__RABV__U11753.1
auggucccccaggcccuccucuucgucccccuccucgccuuccccaugugcuucggcaaguuccccaucuacaccauccccgacaagcucggccccuggucccccaucgacauccaccaccucuccugccccaacaaccucgucgucgaggacgagggcugcaccaaccucuccggcuucuccuacauggagcucaaggucggcuacaucuccgccaucaaggucaacggcuucaccugcaccggcgucgucaccgaggccgagaccuacaccaacuucgucggcuacgucaccaccaccuucaagcgcaagcacuuccgccccacccccgacgccugccgcgccgccuacaacuggaagauggccggcgacccccgcuacgaggagucccuccacaaccccuaccccgacuaccacuggcuccgcaccgucaagaccaccaaggagucccucaucaucaucucccccuccgucgccgaccucgaccccuacgacaagucccuccacucccgcgucuuccccuccggcaagugccucggcaucaccaucuccuccaccuacugcuccaccaaccacgacuacaccaucuggaugcccgagaaccuccgccucggcaccuccugcgacaucuucaccaacucccgcggcaagcgcgccuccaagggcuccaagaccugcggcuucgucgacgagcgcggccucuacaagucccucaagggcgccugcaagcucaagcucugcggcguccucggccuccgccucauggacggcaccugggucgccaugcagaccuccgacgagaccaaguggugcccccccgaccagcucgucaaccuccacgacuuccgcuccgacgagaucgagcaccucgucgucgaggagcucgucaagaagcgcgaggagugccucgacgcccucgaguccaucaugaccaccaaguccgucuccuuccgccgccucucccaccuccgcaagcucguccccggcuucggcaaggccuacaccaucuucaacaagacccucauggaggccgacgcccacuacaaguccguccgcaccuggaacgagaucauccccuccaagggcugccuccgcgucggcggcaagugccacccccacgucaacggcgucuucuucaacggcaucauccucggccccgacggccacguccucauccccgagaugcaguccucccuccuccagcagcacauggagcuccucgaguccuccgucaucccccucaugcacccccucgccgaccccuccaccgucuucaaggacggcgacgaggccgaggacuucgucgagguccaccuccccgacguccacaagcagaucuccggcgucgaccucggccuccccaacuggggcaaguacguccucaucaucgccggcguccucaucgccaugauccucaccaucuuccucaugaccugcugcggccgcggcaaccgccccaaguccacccagcacucccucggcggcaucggccgcaaggucuccgccaccucccaguccggcaaggucaucuccuccugggaguccuacaaguccggcggcgagacccgccucuga

SEQ ID NO: 128039 - RNA, 1575 nt, Artificial Sequence
  derived and/or modified CDS sequence (opt2) from glycoprotein__RABV__U11754.1
auggucccccaggcccuccucuucgucccccuccucgccuuccccaugugcuucggcaaguuccccaucuacaccauccccgacaagcucggccccuggucccccaucgacauccaccaccucuccugccccaacaaccucgucgucgaggacgagggcugcaccaaccucuccggcuucuccuaccucgagcucaaggucggcuacaucuccgccaucaaggucaacggcuucaccugcaccggcgucgucaccgaggccgagaccuacaccaacuucgucggcuacgucaccaccaccuucaagcgcaagcacuuccgccccacccccgacgccugccgcgccgccuacaacuggaagauggccggcgacccccgcuacgaggagucccuccacaaccccuaccccgacuaccacuggcuccgcaccgucaagaccaccaaggagucccccaucaucaucucccccuccgucgccgaccucgaccccuacgacaagucccuccacucccgcgucuuccccuccggcaagugccucggcaucaccaucuccuccaccuacugcuccaccaaccacgacuacaccaucuggaugcccgagaaccuccgccucggcaccuccugcgacaucuucaccaacucccgcggcaagcgcgccuccaagggcuccaaggccugcggcuucgucgacgagcgcggccucuacaagucccucaagggcgccugcaagcucaagcucugcggcguccucggccuccgccucauggacggcaccugggucgccaugcagaccuccgacgagaccaaguggugcccccccgaccagcucgucaaccuccacgacuuccgcuccgacgagaucgagcaccucgucgucgaggagcucgucaagaagcgcgaggagugccucgacgcccucgaguccaucaugaccaccaaguccgucuccuuccgccgccucucccaccuccgcaagcucguccccggcuucggcaaggccuacaccaucuucaacaagacccucauggaggccgacgcccacuacaaguccguccgcaccuggaacgagaucauccccuccaagggcugccuccgcgucggcggccgcugccacccccacgucaacggcgucuucuucaacggcaucauccucggccccgacggccacguccucauccccgagaugcaguccucccuccuccagcagcacauggagcuccucgaguccuccgucaucccccucaugcacccccucgccgaccccuccaccgucuucaaggacggcgacgaggccgaggacuucgucgagguccaccuccccgacguccacaagcagaucuccggcgucgaccucggccuccccaacuggggcaaguacguccucaucaucgccggcguccucaucgccaugcuccucaccgucuuccucaugaccugcugcggcaagggcaaccgccccaaguccauccagcacucccucggcggcaucggccgcaaggucuccgccaccucccaguccggcaaggucaucuccuccugggaguccuacaaguccggcggcgagacccgccucuga

SEQ ID NO: 128040 - RNA, 1575 nt, Artificial Sequence
  derived and/or modified CDS sequence (opt2) from glycoprotein__RABV__U11755.1
auggucccccaggcccuccuccucgucccccuccucgccuuccccaugugcuucggcaaguuccccaucuacaccauccccgacaagcucggccccuggucccccaucgacauccaccaccucuccugccccaacaaccucgucgucgaggacgagggcugcaccaaccucuccggcuucuccuacauggagcucaaggucggcuacaucuccgccaucaaggucaacggcuucaccugcaccggcgucgucaccgaggccgagaccuacaccaacuucgucggcuacgucaccaccaccuucaagcgcaagcacuuccgccccacccccgacgccugccgcgccgccuacaacuggaagauggccggcgacccccgcuacgaggagucccuccacaaccccuaccccgacuaccacuggcuccgcaccgucaagaccaccaaggagucccucaucaucaucucccccuccgucgccgaccucgaccccuacgacaagucccuccacucccgcgucuuccccuccggcaagugccucggcaucaccaucuccuccaccuacugcuccaccaaccacgacuacaccaucuggaugcccgagaaccuccgccucggcaccuccugcgacaucuucaccaacucccgcggcaagcgcgccuccaagggcuccaagaccugcggcuucgucgacgagcgcggccucuacaagucccucaagggcgccugcaagcucaagcucugcggcguccucggccuccgccucauggacggcaccugggucgccaugcagaccuccgacgagaccaaguggugcccccccgaccagcucgucaaccuccacgacuuccgcuccgacgagaucgagcaccucgucgucgaggagcucgucaagaagcgcgaggagugccucgacgcccucgaguccaucaugaccaccaaguccgucuccuuccgccgccucucccaccuccgcaagcucguccccggcuucggcaaggccuacaccaucuucaacaagacccucauggaggccgacgcccacuacaaguccguccgcaccuggaacgagaucauccccuccaagggcugccuccgcgucggcggccgcugccacccccacgucaacggcgucgucuucaacggcaucauccucggccccgacggccacguccucauccccgagaugcaguccucccuccuccagcagcacauggagcuccucgaguccuccgucaucccccucaugcacccccucgccgaccccuccaccgucuucaaggacggcgacgaggccgaggacuucgucgagguccaccuccccgacguccacaagcagaucuccggcgucgaccucggccuccccaacuggggcaaguacguccucaucaucgccggcguccucaucgccaugauccucaccaucuuccucaugaccugcugcggccgcggcaaccgccccaaguccacccagcacucccucggcggcaucggccgcaaggucuccgccaccucccaguccggcaaggucaucuccuccugggaguccuacaaguccggcuccgagacccgccucuga

SEQ ID NO: 128041 - RNA, 1575 nt, Artificial Sequence
  derived and/or modified CDS sequence (opt2) from glycoprotein__RABV__U11756.1
auggucccccaggcccuccucuucgucccccuccucgccuuccccaugugcuucggcaaguuccccaucuacaccauccccgacaagcucggccccuggucccccaucgacauccaccaccucuccugccccaacaaccucgucgucgaggacgagggcugcaccaaccucuccggcuucuccuacauggagcucaaggucggcuacaucuccgccaucaaggucaacggcuucaccugcaccggcgucgucaccgaggccgagaccuacaccaacuucgucggcuacgucaccaccaccuucaagcgcaagcacuuccgccccacccccgacgccugccgcgucgccuacaacuggaagauggccggcgacccccgcuacgaggagucccuccacaaccccuaccccgacuaccacuggcuccgcaccgucaagaccaccaaggagucccucaucaucaucucccccuccgucgccgaccucgaccccuacgacaagucccuccacucccgcgucuuccccuccggcaagugccucggcaucaccaucuccuccaccuacugcuccaccaaccacgacuacaccaucuggaugcccgagaaccuccgccucggcaccuccugcgacaucuucaccaacucccgcggcaagcgcgccuccaagggcuccaagaccugcggcuucgucgacgagcgcggccucuacaagucccucaagggcgccugcaagcucaagcucugcggcguccucggccuccgccucauggacggcaccugggucgccaugcagaccuccgacgagaccaaguggugcccccccgaccagcucgucaaccuccacgacuuccgcuccgacgagaucgagcaccucgucgucgaggagcucgucaagaagcgcgaggagugccucgacgcccucgaguccaucaugaccaccaaguccgucuccuuccgccgccucucccaccuccgcaagcucguccccggcuucggcaaggccuacaccaucuucaacaagacccucauggaggccgacgcccacuacaaguccguccgcaccuggaacgagaucauccccuccaagggcugccuccgcgucggcggcaagugccacccccacgucaacggcgucgucuucaacggcaucauccucggccccgacggccacguccucauccccgagaugcaguccucccuccuccagcagcacauggagcuccucgaguccuccgucaucccccucaugcacccccucgccgaccccuccaccgucuucaaggacggcgacgaggccgaggacuucgucgagguccaccuccccgacguccacaagcagaucuccggcgucgaccucggccuccccaacuggggcaaguacguccucaucaucgccggcguccucaucgccaugauccucaccaucuuccucaugaccugcugcggccgcggcaaccgccccaaguccacccagcacucccucggcggcaucggccgcaaggucuccgccaccucccaguccggcaaggucaucuccuccugggaguccuacaaguccggcggcgagacccgccucuga

SEQ ID NO: 128042 - RNA, 1575 nt, Artificial Sequence
  derived and/or modified CDS sequence (opt2) from glycoprotein__RABV__U11757.1
auggucccccaggcccuccucuucgucccccuccucgccuuccccaugugcuucggcaaguuccccaucuacaccauccccgacaagcucggccccuggucccccaucgacauccaccaccucuccugccccaacaaccucgucgucgaggacgagggcugcaccaaccucuccggcuucuccuacauggagcucaaggucggcuacaucuccgccaucaaggucaacggcuucaccugcaccggcgucgucaccgaggccgagaccuacaccaacuucgucggcuacgucaccaccaccuucaagcgcaagcacuuccgccccacccccgacgccugccgcgccgccuacaacuggaagauggccggcgacccccgcuacgaggagucccuccacaaccccuaccccgacuaccacuggcuccgcaccgucaagaccaccaaggagucccucaucaucaucucccccuccgucgccgaccucgaccccuacgacaagucccuccacucccgcgucuuccccuccggcaagugccucggcaucaccaucuccuccaccuacugcuccaccaaccacgacuacaccaucuggaugcccgagaaccuccgccucggcaccuccugcgacaucuucaccaacucccgcggcaagcgcgccuccaagggcuccaagaccugcggcuucgucgacgagcgcggccucuacaagucccucaagggcgccugcaagcucaagcucugcggcguccucggccuccgccucauggacggcaccugggucgccaugcagaccuccgacgagaccaaguggugcccccccgaccagcucgucaaccuccacgacuuccgcuccgacgagaucgagcaccucgucgucgaggagcucgucaagaagcgcgaggagugccucgacgcccucgaguccaucaugaccaccaaguccgucuccuuccgccgccucucccaccuccgcaagcucguccccggcuucggcaaggccuacaccaucuucaacaagacccucauggaggccgacgcccacuacaaguccguccgcaccuggaacgagaucauccccuccaagggcugccuccgcgucggcggccgcugccacccccacgucaacggcgucgucuucaacggcaucauccucggccccgacggccacguccucauccccgagaugcaguccucccuccuccagcagcacauggagcuccucgaguccuccgucaucccccucaugcacccccucgccgaccccuccaccgucuucaaggacggcgacgaggccgaggacuucgucgagguccaccuccccgacguccacaagcagaucuccggcgucgaccucggccuccccaacuggggcaaguacguccucaucaucgccggcguccucaucgccaugauccucaccgucuuccucaugaccugcugcggccgcggcaaccgccccaaguccauccagcacucccucggcggcaucggccgcaaggucuccgccaccucccaguccggcaaggucaucuccuccugggaguccuacaaguccggcggcgagacccgccucuga

SEQ ID NO: 128043 - RNA, 1575 nt, Artificial Sequence; identical to SEQ ID NO: 128028
  derived and/or modified CDS sequence (opt2) from glycoprotein__RABV__U11758.1

SEQ ID NO: 128044 - RNA, 1575 nt, Artificial Sequence
  derived and/or modified CDS sequence (opt2) from glycoprotein__RABV__U27214.1
augguccccugggcccuccucuucguccccuuccucaucuccucccucugcuucggcaaguuccccaucuacaccauccccgacaagcucggccccuggucccccaucgacauccaccaccucuccugccccaacaaccucgucgucgaggacgagggcugcaacucccucuccggcuucuccuacauggagcucaaggucggcuacaucuccgccaucaaggucaacggcuucaccugcaccggcgucgucaccgaggccgagaccuacaccaacuucgucggcuacgucaccaccaccuucaagcgcaagcacuucugccccaugcccgacgccugccgcuccgccuacaacuggaagauggccggcgacccccgcuacgaggagucccuccacaaccccuaccccgacuaccacuggcuccgcaccgucaagaccaccaaggagucccucgucaucaucucccccuccgucgccgaccucgaccccuacgacaagucccuccacucccgcaucuuccccggcggcaagugcaccggccucaccgucuccuccaccuacugcuccaccaaccacgacuacaccaucuggaugcccgagaaggccggccucggcaccuccugcgacaucuucaccaacuccaagggcaagcgcgccuccaagggcggcaagaccugcggcuucgucgacgagcgcggccucuacaagucccucaagggcgccugcaagcucaagcucugcggcgucuccggccuccgccucauggacggcaccugggucgccauccagacccucgacgagaccaaguggugcucccccgaccagcucgucaaccuccacgacuuccacuccgacgagcucgagcaccucgucgucgaggagcucguccgcaagcgcgaggagugccucgacgcccucgaguccaucaugaccaccaaguccgucuccuuccgccgccucucccaccuccgcaagcucguccccggcuucggcaaggccuacaccaucuucaacaagacccucauggaggccgacgcccacuacaaguccguccgcaccugguccgagaucauccccuccaagggcugccuccgcgucggcggccgcugccacccccacgucaacggcgucuucuucaacggcaucauccucggccccgacggccacguccucauccccgagaugcaguccucccuccuccagcagcacgucgagcuccucgaguccuccgucaucccccucaugcacccccucgccgaccccuccgccgucuucaaggacggcgacgaggccgaggacuucgucgagguccaccuccccgacguccacaagcagaucuccggcgucgaccucggccuccccuccuggggcaaguacaugcucaugaucgccggcgcccucaccacccucaugcucuucaucuuccucaugaccugcugcaagcgcgucaaccgcaccaaguccauccgccagggcccccgcgagaucgagcgcaaggucuccuucaccccccagaacaagaaggucgucuccuccugggaguccuacaaguccggcggcgagaccaagcucuga

SEQ ID NO: 128045 - RNA, 1575 nt, Artificial Sequence
  derived and/or modified CDS sequence (opt2) from glycoprotein__RABV__U27215.1
augguccccugggcccuccucuucguccccuuccucaucuccucccucugcuucggcaaguuccccaucuacaccauccccgacaagcucggccccuggucccccaucgacauccaccaccucuccugccccaacaaccucgucgucgaggacgagggcugcaacucccucuccggcuucuccuacauggagcucaaggucggcuacaucuccgccaucaaggucaacggcuucaccugcaccggcgucgucaccgaggccgagaccuacaccaacuucgucggcuacgucaccaccaccuucaagcgcaagcacuucugccccaugcccgacgccugccgcuccgccuacaacuggaagauggccggcgacccccgcuacgaggagucccuccacaaccccuaccccgacuaccacuggcuccgcaccgucaagaccaccaaggagucccucaucaucaucucccccuccgucgccgaccucgaccccuacgacaagucccuccacucccgcaucuuccccggcggcaagugcaccggccucaccgucuccuccaccuacugcuccaccaaccacgacuacaccaucuggaugcccgagaaggccggccucggcaccuccugcgacaucuucaccaacuccaagggcaagcgcgccuccaagggcggcaagaccugcggcuucgucgacgagcgcggccucuacaagucccucaagggcgccugcaagcucaagcucugcggcgucuccggccuccgccucauggacggcaccugggucgccauccagacccucgacgagaccaaguggugcucccccgaccagcucgucaaccuccacgacuuccacuccgacgagcucgagcaccucgucgucgaggagcucguccgcaagcgcgaggagugccucgacgcccucgaguccaucaugaccaccaaguccgucuccuuccgccgccucucccaccuccgcaagcucguccccggcuucggcaaggccuacaccaucuucaacaagacccucauggaggccgacgcccacuacaaguccguccgcaccugguccgagaucauccccuccaagggcugccuccgcgucggcggccgcugccacccccacgucaacggcgucuucuucaacggcaucauccucggccccgacggccacguccucauccccgagaugcaguccucccuccuccagcagcacgucgagcuccucgaguccuccgucaucccccucaugcacccccucgccgaccccuccgccgucuucaaggacggcgacgaggccgaggacuucgucgagguccaccuccccgacguccacaagcagaucuccggcgucgaccucggccuccccuccuggggcaaguacaugcucaugaucgccggcgcccucaccacccucaugcucuucaucuuccucaugaccugcugcaagcgcgucaaccgcaccaaguccauccgccagggcccccgcgagaucgagcgcaaggucuccuucaccccccagaacaagaaggucgucuccuccugggaguccuacaaguccggcggcgagaccaagcucuga

SEQ ID NO: 128046 - RNA, 1575 nt, Artificial Sequence
  derived and/or modified CDS sequence (opt2) from glycoprotein__RABV__U27216.1
augguccccugggcccuccucuucguccccuuccucaucuccucccucugcuucggcaaguuccccaucuacaccauccccgacaagcucggccccuggucccccaucgacauccaccaccucuccugccccaacaaccucgucgucgaggacgagggcugcaacucccucuccggcuucuccuacauggagcucaaggucggcuacaucuccgccaucaaggucaacggcuucaccugcaccggcgucgucaccgaggccgagaccuacaccaacuucgucggcuacgucaccaccaccuucaagcgcaagcacuucugccccaugcccgacgccugccgcuccgccuacaacuggaagauggccggcgacccccgcuacgaggagucccuccacaaccccuaccccgacuaccacuggcuccgcaccgucaagaccaccaaggagucccucaucaucaucucccccuccgucgccgaccucgaccccuacgaccgcucccuccacucccgcaucuuccccggcggcaagugcaccggccucaccgucuccuccaccuacugcuccaccaaccacgacuacaccaucuggaugcccgagaaggccggccucggcaccuccugcgacaucuucaccaacuccaagggcaagcgcgccuccaagggcggcaagaccugcggcuucgucgacgagcgcggccucuacaagucccucaagggcgccugcaagcucaagcucugcggcgucuccggccuccgccucauggacggcaccugggucgccauccagacccucgacgagaccaaguggugcucccccgaccagcucgucaaccuccacgacuuccacuccgacgagcucgagcaccucgucgucgaggagcucguccgcaagcgcgaggagugccucgacgcccucgaguccaucaugaccaccaaguccgucuccuuccgccgccucucccaccuccgcaagcucguccccggcuucggcaaggccuacaccaucuucaacaagacccucauggaggccgacgcccacuacaaguccguccgcaccugguccgagaucauccccuccaagggcugccuccgcgucggcggccgcugccacccccacgucaacggcgucuucuucaacggcaucauccucggccccgacggccacguccucauccccgagaugcaguccucccuccuccagcagcacgucgagcuccucgaguccuccgucaucccccucaugcacccccucgccgaccccuccgccgucuucaaggacggcgacgaggccgaggacuucgucgagguccaccuccccgacguccacaagcagaucuccggcgucgaccucggccuccccuccuggggcaaguacaugcucaugaucgccggcgcccucaccacccucaugcucuucaucuuccucaugaccugcugcaagcgcgucaaccgcaccgaguccauccgccagggcccccgcgagcucgaguccaaggucuccgucaccccccagaacaagaaggucaucuccuccugggaguccuacaaguccggcggcgagaccaagcucuga

SEQ ID NO: 128047 - RNA, 1575 nt, Artificial Sequence
  derived and/or modified CDS sequence (opt2) from glycoprotein__RABV__U27217.1
augguccccugggcccuccucuucguccccuuccucaucuccucccucugcuucggcaaguuccccaucuacaccauccccgacaagcucggccccuggucccccaucgacauccaccaccucuccugccccaacaaccucgucgucgaggacgagggcugcaacucccucuccggcuucuccuacauggagcucaaggucggcuacaucuccgccaucaaggucaacggcuucaccugcaccggcgucgucaccgaggccgagaccuacaccaacuucgucggcuacgucaccaccaccuucaagcgcaagcacuucugccccaugcccgacgccugccgcuccgccuacaacuggaagauggccggcgacccccgcuacgaggagucccuccacaaccccuaccccgacuaccacuggcuccgcaccgucaagaccaccaaggagucccucaucaucaucucccccuccgucgccgagcucgaccccuacgacaagucccuccacucccgcaucuuccccggcggcaagugcaccggccucaccgucuccuccaccuacugcuccaccaaccacgacuacaccaucuggaugcccgagaaggccggccucggcaccuccugcgacaucuucaccaacuccaagggcaagcgcgccuccaagggcggcaagaccugcggcuucgucgacgagcgcggccucuacaagucccucaagggcgccugcaagcucaagcucugcggcgucuccggccuccgccucauggacggcaccugggucgccauccagacccucgacgagaccaaguggugcucccccgaccagcucgucaaccuccacgacuuccacuccgacgagcucgagcaccucgucgucgaggagcucguccgcaagcgcgaggagugccucgacgcccucgaguccaucaugaccaccaaguccgucuccuuccgccgccucucccaccuccgcaagcucguccccggcuucggcaaggccuacaccaucuucaacaagacccucauggaggccgacgcccacuacaaguccguccgcaccugguccgagaucauccccuccaagggcugccuccgcgucggcggccgcugccacccccacgucaacggcgucuucuucaacggcaucauccucggccccgacggccacguccucauccccgagaugcaguccucccuccuccagcagcacgucgagcuccucgaguccuccgucaucccccucaugcacccccucgccgaccccuccgccgucuucaaggacggcgacgaggccgaggacuucgucgagguccaccuccccgacguccacaagcagaucuccggcgucgaccucggccuccccuccuggggcaaguacaugcucaugaucgccggcgcccucaccacccucaugcucuucaucuuccucaugaccugcugcaagcgcgucaaccgcaccaaguccauccgccagggcccccgcgagaucgagcgcaaggucuccuucaccccccagaacaagaaggucgucuccuccugggaguccuacaaguccggcggcgagaccaagcucuga

SEQ ID NO: 128048 - RNA, 1575 nt, Artificial Sequence
  derived and/or modified CDS sequence (opt2) from glycoprotein__RABV__X71879.1
auggucccccaggcccuccucuucgucccccuccucgucuucccccucugcuucggcaaguuccccaucuacaccauccccgacaagcucggccccuggucccccaucgacauccaccaccucuccugccccaacaaccucgucgucgaggacgagggcugcaccaaccucuccggcuucuccuacauggagcucaaggucggcuacauccucgccaucaagaugaacggcuucaccugcaccggcgucgucaccgaggccgagaacuacaccaacuucgucggcuacgucaccaccaccuucaagcgcaagcaccuccgccccacccccgacgccugccgcgccgccuacaacuggaagauggccggcgacccccgcuacgaggagucccuccacaaccccuaccccgacuacuccuggcuccgcaccgucaagaccaccaaggagucccucgucaucaucucccccuccgucgccgaccucgaccccuacgaccgcucccuccacucccgcgucuuccccuccggcaagugcuccggcgucgccgucuccuccaccuacugcuccaccaaccacgacuacaccaucuggaugcccgagaacccccgccucggcaaguccugcgacaucuucaccaacucccgcggcaagcgcgccuccaagggcuccgagaccugcggcuucgucgacgagcgcggccucuacaagucccucaagggcgccugcaagcucaagcucugcggcguccucggccuccgccucauggacggcaccugggucgccaugcagaccuccaacgagaccaaguggugcccccccgaccagcucgucaaccuccacgacuuccgcuccgacgagaucgagcaccucgucgucgaggagcucguccgcaagcgcgaggagugccucgacgcccucgaguccaucaugaccaccaaguccgucuccuuccgccgccucucccaccuccgcaagcucguccccggcuucggcaaggccuacaccaucuucaacaagacccucauggaggccgacgcccacuacaaguccguccgcaccuggaacgagauccuccccuccaagggcugccuccgcgucggcggccgcugccacccccacgucaacggcgucuucuucaacggcaucauccucggccccgacggcaacguccucauccccgagaugcaguccucccuccuccagcagcacauggagcuccucgaguccuccgucaucccccucguccacccccucgccgaccccuccaccgucuucaaggacggcgacgaggccgaggacuucgucgagguccaccuccccgacguccacaaccaggucuccggcgucgaccucggccuccccaacuggggcaaguacguccuccucuccgccggcgcccucaccgcccucaugcucaucaucuuccucaugaccugcugccgccgcgucaaccgcuccgagcccacccagcacaaccuccgcggcaccggccgcgaggucuccgucaccccccagaccuggaagaucaucuccuccugggagucccacaaguccggcggcgagacccgccucuga

SEQ ID NO: 128049 - RNA, 1701 nt, Artificial Sequence
  derived and/or modified CDS sequence (opt3) from hemagglutinin__InfluenzaA__AAA16879
auggaggccaagcuguucgugcucuuuugcaccuucacaguccuuaaagcugacacuaucuguguuggcuaccacgcaaacaauagcacggauaccguggacacaguacuggaaaagaacgugacugucacccauuccgugaauuuguuagaggauucucacaacgggaaacugugcucacuaaauggaauugcgccccuccagcuggguaaguguaacguugccggcuggcuucuggggaauccugaaugcgacuugcuccugacagcuaacaguuggagcuauauaaucgagaccuccaauucugaaaacggaacuuguuacccaggcgaguuuauugauuaugaggaacugagagagcaacucucgucagugagcaguuucgaaaaauuugagaucuucccgaaggccuccucuuggcccaaucaugagacaaccaagggugucacggcagccugcagcuacuccggggcuucaaguuuuuauaggaacuuacuguggauuacuaaaaagggaaccagcuacccuaaacuuucuaaguccuauacaaauaacaaaggcaaggaaguguugguacuguggggcguucaccauccacccacuaccucagagcagcagagccuauaccagaaugcagacgccuacgugagugucgggucuuccaaguauaaccggcgcuucacaccugaaaucgcugcccgaccaaaagugcguggacaagcggguagaaugaacuacuauuggacccuccuggaucagggcgacacgauaacuuuugaggcaacagggaaucuuaucgcccccugguacgcuuucgcccugaacaagggaagcgauucgggcauuaucaccucugacgcaccugugcacaauugugauacuaggugccagacaccacacggugcuuugaacuccucacucccguuucagaauguccaucccauuaccaucggggaauguccuaaauauauaaagaguacgaaacugcggauggccaccggauuacgcaacguuccaagcauucaauccagaggccuguucggcgcgaucgccggguuuauugagggagguuggacaggcaugaucgacgggugguacggauaucaccaucagaaugagcagggcucugguuacgcagcugaucaaaagagcacucagaacgccaucgacgggauuaccaauaaagugaacucaguaauagaaaagaugaauacacaguucacugcugugggcaaggaguucaacaaucucgaaaggcggaucgagaaccuuaauaaaaaggucgacgauggauuucuggacguguggaccuacaacgccgaauugcuaguucugcucgagaacgagcgcacacuggauuuccacgacaguaaugugcgaaaccuuuaugaaaaagucaagucccagcugagaaauaacgcaaaagaguugggcaaugggugcuuugaguucuaccacaagugugaugacgaaugcauggaaagggagaagaacggaaccuaugauuaccccaaauauagcgaggaaucuaagcucaaucgggaggaaauugacggugugaaacuggagucaaugggcguauaccaaaucuuagccauauauaguacuguugcuagcucccuggugcuacucgucucucugggggcgauuucguuuuggaugugcagcaacggaucccuucagugucguaucugcaucuga

SEQ ID NO: 128050 - RNA, 1701 nt, Artificial Sequence
  derived and/or modified CDS sequence (opt3) from hemagglutinin__InfluenzaA__AAA16880
auggaggccaagcuguucgugcucuuuugcaccuucacaguccuuaaagcugacacuaucuguguuggcuaccacgcaaacaauagcacggauaccguggacacaguacuggaaaagaacgugacugucacccauuccgugaauuuguuagaggauucucacaacgggaaacugugcucacuaaauggaauugcccccuugcagcuggguaaguguaacguugcgggcuggcuucuggggaauccugaaugcgacuugcuccugacagcuaacaguuggagcuauauaaucgagaccuccaauucugaaaacggaacuuguuacccaggcgaguuuauugauuaugaggaacugagagagcaacucucgucagugagcaguuucgaaaaauuugagaucuucccgaaggccuccucuuggcccaaucaugagacaaccaagggugucacggcagccugcagcuacuccggggcuucaaguuuuuauaggaacuuacuguggauuacuaaaaagggaaccagcuacccuacacuuucuaaauccuauacuaauaacaagggcaaagaaguguugguacuguggggcguucaccauccacccaccgugaaugagcagcagucacuauaccagaacgcagacgccuacgucagcguggggaguucuaaguauaaccggcgcuucacaccugaaaucgcugcccgaccaaaggugcguggacaagcggguagaaugaauuaccacuggacccuccuggaucagggcgacacgauaacuuuugaggcaacagggaaccuuaucgcccccugguaugcuuucgcccugaauaaaggauccgauagcggcauuaucaccucggacgcaccuguccacaacugugauacuaggugccagacaccacauggugcucucaauucuucccucccguuucagaacguucaccccauuaccaucggggaauguccuaaguacgugaaaucaacgaagcugcggauggccaccggauuacgcaauguaccaaguauacaaagcagaggccuguucggcgcgauugccggguuuaucgagggagguuggacaggcaugauugacgggugguauggauaccaucaccagaacgagcagggcuccgguuaugcagcugaucagaaaucuacucaaaaugccaucgacgggaucaccaacaaggugaauagcgucauugaaaagaugaacacaaaauucacugcugugggcaaggaguucaauaaccucgaaaggcggauagagaaucuuaacaaaaagguugacgauggauuucuggacguguggaccuacaacgccgaauugcuaguccugcucgagaaugagcgcacacuggauuuccacgacucaaacgugcgaaaucuuuacgaaaaaguaaagagucagcugagaaacaaugcaaaagaguugggcaacgggugcuuugaguucuaucauaagugugaugacgaaugcaucgaauccguuaagaauggaaccuacgauuaucccaaauacagcgaggagucuaagcucaacagggaagagauugacggugugaaacuggaaucaaugggcgucuaucagaucuuagccauauacaguacuguggcuagcucccugguccuacucgugucucugggggcgauuucguuuuggaugugcagcaauggaucccuucaaugucggaucugcaucuga

SEQ ID NO: 128051 - RNA, 1689 nt, Artificial Sequence
  derived and/or modified CDS sequence (opt3) from hemagglutinin__InfluenzaA__AAA64362
auggccaucauuuaccugauacuccuuuucaccgcugugagaggcgaccagaucugcauuggguaucacgcaaacaauagcacagagaaggucgauacuauccuggaaaggaacguuacggugacccaugccaaagacauuuuggagaagacacacaauggaaaauuauguaagcugaacgguauacccccucuagaacucggcgauugcuccaucgcgggguggcugcuuggaaauccagagugugaccggcuguugucuguaccggaauggucauacaucauggagaaagagaacccccgcgauggccucugcuauccugguaguuuuaaugacuacgaagaacugaaguaucugcucagcuccgugaagcauuucgaaaaagucaagauuuuaccaaaagaucgauggacucaacacaccacaaccgggggaucucgugcuugugccgugucgggcaaccccucauuuuucagaaauaugguuuggcugacuaagaaaggcagcgacuacccuguggcaaaggggaguuauaacaauacauccggagagcagaugcuuaucauuugggguguccaucacccaaacgaugagaccgaacagaggacguuguaccagaaugugggcacuuacguaucuguugggaccagcacacugaacaagcgguccacucccgagaucgccacccgcccuaaagugaauggacuaggcucaagaauggaauuuaguuggacacuccuggacaugugggauaccauaaacuucgagagcacggguaaccuuauugcuccagaauauggguuuaagaucucuaaaaggggauccucaggcauuaugaagacugagggcacacuggagaauugcgaaaccaaaugucaaacuccguugggggcaaucaacacaacccuccccuuccacaauguccauccucugacgaucggagagugcccacgguacgugaagucggaaaaauuagugcuggccaccggucuccgcaacgucccccagauugagagucgaggccuuuuuggggcuauagccggauucaucgaaggcgguuggcaggggaugguugacggcugguauggauaccaccauucuaaugaucagggcuccggguaugcggcagacaaggagagcacacaaaaggccuuugacggaauuacuaacaaagugaauagcguaaucgagaagaugaacacccaguucgaagcuguggguaaagaguuuucuaaucuggaaagaagguuggagaaccuaaauaagaaaauggaagauggcuuccuggacgucuggacauacaacgccgagcuccuggugcuuauggagaaugaacggacucuggauuuccacgacuccaacguuaagaauuuguaugauaaggugcguaugcagcuccgcgacaacgucaaagagcuggggaacggauguuuugaguucuaccacaagugcgaugacgaguguaugaacucagugaaaaauggcaccuacgauuauccuaaguacgaggaagagaguaaauuaaauagaaacgaaauaaaggguguaaagcugagcuccauggggguuuaucagauucuagcaaucuacgcuacaguggccggcucucucagccuggcgaucaugauggccggaauuucauuuuggaugugcaguaauggcucccuucaaugcaggaucuguauuuga

SEQ ID NO: 128052 - RNA, 1689 nt, Artificial Sequence
  derived and/or modified CDS sequence (opt3) from hemagglutinin__InfluenzaA__AAA64363
auggccaucauuuaccugauacuccuuuucaccgcugugagaggcgaccagaucugcauuggguaucacgcaaacaauagcacagagaaggucgauacuauccuggaaaggaacguuacggugacccaugccaaagacauuuuggagaagacacacaauggaaaauuauguaagcugaacgguauacccccucuagaacucggcgauugcuccaucgcgggguggcugcuuggaaauccagagugugaccggcuguugucuguaccggaauggucauacaucauggagaaagagaacccccgcgauggccucugcuauccugguaguuuuaaugacuacgaagaacugaagcaucugcucagcuccgugaagcacuucgaaaaagucaagauuuuaccaaaagaucgauggacucaacauaccacaaccgggggaucucgugcuugugccgugucgggcaaccccucauuuuucagaaauaugguuuggcugacuaagaaaggcagcaacuauccuguggcaaaggggaguuacaauaacacauccggagagcagaugcuuaucauuugggguguccaccacccaaaugacgagaccgaacagaggacguuguaucagaacgugggcacuuacguaucuguugggaccagcacacugaauaagcgguccacucccgauaucgccacccgcccuaaagugaacggacaaggcgguagaauggaguuuucauggacacuacucgacaugugggauaccauaaacuucgaaaguacggggaaucugauugcuccagaguacggauuuaagaucagcaaaagggggucuuccggcauuaugaagacugaaggcacacuuggaaacugcgagaccaaaugucagacuccgcugggugcaaucaauacaaccuugcccuuccauaacguccacccucucacgaucggcgagugcccaaaguaugugaaaucagaaaagcugguguuagccaccgggcugcggaaugucccccagauugagagccgcggacucuuuggcgcuauagccgguuucaucgaagggggcuggcagggaaugguugacggcugguacggguaucaucacaguaacgaucaaggaucugguuacgcggcagacaaggaguccacacagaaagccuuugacggcauuacuaauaaggugaacagcguaaucgagaaaauaaauacccaguucgaggcuguggagaaggaauuuucgaaccuugagcgaagacuggaaaauuugaacaaaaagauggaggauggguuccuagacgucuggacauauaaugccgaacugcucgugcugauggagaacgagaggacucuugauuuccacgacucuuccguuaagaaucuguacgauaaagugcggaugcaguugcgugacaacgucaaggaacucggaaacggcuguuuugaguucuaucauaaaugcgaugacgaauguaugaacucagugaagaaugguaccuacgauuacccuaaauaugaggaggaaaguaagcugaaucgcaacgagauuaaggggguaaaauuaagcuccaugggcaucuaccaaauccuggcaauuuaugcuacaguugccggaucucuaagccucgcgaucaugauggccggcauuucauuuuggaugugcaguaaugggucccugcagugcagaauauguaucuga

SEQ ID NO: 128053 - RNA, 1689 nt, Artificial Sequence
  derived and/or modified CDS sequence (opt3) from hemagglutinin__InfluenzaA__AAA64365
auggccaucauuuaccugauacuccuuuucaccgcugugagaggcgaccagaucugcauuggguaucacgcaaacaauagcacagagaaggucgauacuauccuggaaaggaacguuacggugacccaugccaaagacauuuuggagaagacacacaauggaaaauuauguaagcugaacgguauacccccucuagaacucggcgauugcuccaucgcgggguggcugcuuggaaauccagagugugaccggcuguugucuguaccggaauggucauacaucauggagaaagagaacccccgcgauggccucugcuauccugguaguuuuaaugacuacgaagaacugaagcaucugcucagcuccgugaagcacuucgaaaaagucaagauuuuaccaaaagaucgauggacucaacauaccacaaccgggggaucucgugcuugugccgugucgggcaaccccucauuuuucagaaauaugguuuggcugacuaagaaaggcagcaacuauccuguggcaaaggggaguuacaauaacacauccggagagcagaugcuuaucauuugggguguccaccacccaaaugacgagaccgaacagaggacguuguaucagaacgugggcacuuacguaucuguugggaccagcacacugaauaagcgguccacucccgauaucgccacccgcccuaaaguggacggacuaggcucaagaauggaguuuaguuggacacuccuggauaugugggacaccauaaacuucgaaagcacggguaaccuuauugcuccagaguacggguuuaagaucucuaaaaggggauccucaggcauuaugaagacugaaggcacacuggggaauugcgagaccaaaugucaaacuccguugggagcaaucaacacaacccuccccuuccauaauguccacccucugacgaucggugagugcccaaaguaugugaaaagcgaaaaguuagugcuggccaccggccuccggaacgucccccagauugagagucgcgggcuuuuuggagcuauagccggcuucaucgaagguggguggcagggcaugguugauggaugguacggcuaucaucacucuaaugaccagggguccggauacgcggcagacaaggagagcacacaaaaagccuuugaugguauuacuaacaagguaaauucggugaucgagaaaaugaacacccaguucgaggcuguggagaaggaauuuucuaaucuggagcgaagauuggaaaaccuaaauaaaaagauggaggacggcuuccuggaugucuggacauauaacgccgaacuccuggugcuuauggagaaugagaggacucuggacuuccacgauuccaacguuaagaauuuguacaacaaagugcggaugcagcuccgugacaacgucaaggaacuggggaauggauguuuugaguucuaucauaaaugcgaugacgaauguaugaacucagugaagaauggcaccuacgauuacccuaaauaugaggaggaaaguaaguuaaaccgcaaugagauaaaggguguaaaacugagcuccauggggauuuaccagauccuagcaaucuaugcuacaguugccggcucucucagccuggcgauuaugauggccggaaucucauuuuggaugugcaguaacggcucccuucaaugcagaauuuguauauga

SEQ ID NO: 128054 - RNA, 1689 nt, Artificial Sequence
  derived and/or modified CDS sequence (opt3) from hemagglutinin__InfluenzaA__AAA64366
auggccaucauuuaccugauacuccuuuucaccgcugugagaggcgaccagaucugcauuggguaucacgcaaacaauagcacagagaaggucgauacuauccuggaaaggaacguuacggugacccaugccaaagacauuuuggagaagacacacaauggaaaauuauguaagcugaacgguauacccccucuagaacucggcgauugcuccaucgcgggguggcugcuuggaaauccagagugugaccggcuguugucuguaccggaauggucauacaucauggagaaagagaacccccgcgauggccucugcuauccugguaguuuuaaugacuacgaagaacugaagcaucugcucagcuccgugaagcacuucgaaaaagucaagauuuuaccaaaagaucgauggacucaacauaccacaaccgggggaucucgugcuugugccgugucgggcaaccccucauuuuucagaaauaugguuuggcugacuaagaaagagagcaacuauccuguggcaaagggcaguuacaauaacacauccggggagcagaugcuuaucauuuggggaguccaccacccaaaugacgaaaccgagcagaggacguuguaucagaacguggguacuuacguaucuguuggcaccagcacacugaauaagcgguccacucccgauaucgccacccgcccuaaagugaacgggcuaggaucaagaauggaauuuaguuggacacuccuggacaugugggauaccauaaacuucgagagcacgggcaaucuuauugcuccagaauacgguuuuaagaucucuaaaaggggguccucaggaauuaugaagacugagggcacacuggagaacugcgaaaccaaaugucaaacuccguugggcgcaaucaauacaacccuccccuuccauaacguccacccucugacgaucggggagugcccaaaguaugugaaaagcgaaaaguuagugcuggccaccggacuccggaaugucccccagauugagagucgcggucuuuuuggcgcuauagccggguucaucgaaggaggcuggcaggguaugguugacgggugguacggcuaucaucacucuaacgaucagggauccggcuacgcggcagacaaggagagcacacaaaaagccuuugacgggauuacuaauaaggugaacucgguaaucgagaaaaugaauacccaguucgaagcugugggaaaggaguuuucuaaccuggaacgaagauuggagaaucuaaacaaaaagauggaagaugguuuccuggacgucuggacauauaaugccgagcuccuggugcuuauggagaacgaaaggacucuggauuuccacgacuccaauguuaagaacuuguacgauaaagugcggaugcagcuccgugacaacgucaaggagcugggcaauggguguuuugaguucuaucauaaaugcgaugacgaguguaugaacucagugaagaauggaaccuacgauuacccuaaauaugaggaagagaguaaguuaaaccgcaaugaaauaaagggcguaaaacugagcuccauggguguuuaccagauucuagcaaucuaugcuacaguggccgggucucucagccuggcgaucaugauggccggcauuucauuuuggaugugcaguaacggaucccuucaaugcagaaucuguauuuga

SEQ ID NO: 128055 - RNA, 1701 nt, Artificial Sequence
  derived and/or modified CDS sequence (opt3) from hemagglutinin__InfluenzaA__AAA85781
augaagaccaucauugcccugagcuacauauucugccucguguuugcucaggaccuucccggcaacgauaauuccacagcaacucuguguuuggggcaccaugccgucccuaacggaacguuaguuaaaaccaucacaaaugaccaaauugaggugacuaacgcgaccgaacugguacagucuucaaguacagguaagaucugcgauaauccacacaggauucuagacggcaucaacuguacccucauagaugcucugcuuggggacccgcauugcgauggauuccagaaugagaaaugggaccuguuuguggaaagaagcaaggccuucuccaacuguuaucccuacgaugucccugacuaugcaucuuugcggucgcucguggccucaagcggcacucuggaguuuaucaaugaagguuucaacuggacagggguuacccagaauggaggcaguuccgcuugcaaacgcggcccagauaacggguuuuucucucgacugaauuggcucuacaagagcggauccacguaucccgugcaaaacgucacuaugccuaauaacgacaacucagauaaguuauacauuuggggugugcaccauccaaguaccgacaaagagcagacaaaucuguauguacaggcaagcggcaagguuacugugucuaccaaacguucccagcaaacagucauccccaacguggggucaagaccuugggugaggggacuuagcagucgggucucuauuuacuggaccaucguuaagccaggcgacauauuggugauuaauuccaacgguaaucugaucgccccgcgcggguacuauaaaaugagaacgggaaagagcucgauuaugaggucugaugcucccaucggcacuuguuccucagagugcaucacaccuaacggcaguauuccaaaugacaagcccuuucagaacguaaauaaaauaaccuacggggccuguccuaaguaugugaaacagaacacucuaaagcucgcgacaggaaugcggaaugucccagaaaaacagauccgcgguauuuucggcgcaaucgccggguuuauagagaacggaugggaaggcaugauugaugguugguacggguuccgacaccaaaauagcgagggcaccggacaggcugccgaccugaaguccacgcaggcagcuaucgaucaaaucaacggcaaacuuaauagagugauugagaagaccaacgaaaaguuucaccagaucgagaaagaguucucugaaguugaagggaggauucaggaccuggagaaguauguggaggauacaaaaauagacuuguggagcuacaacgccgaacuccuggucgcguuagagaaucagcauacuaucgaucugaccgacucagaaaugaacaaacucuucgagaagacacggcgucaacuucgcgaaaaugccgaggauaugggaaacgguugcuuuaagauuuaucacaagugugacaaucccugcaucggcaguaucagaaacgggacuuacgaccaugauguguacagggacgaggcacugaauaaccgguuccagauuaaaggaguagaauugaaguccggcuauaaagauuggauacuauggaucagcuuugcuauuucuugcuuccugcucuguguugugcugcuugguuuuaucaugugggccugccagaaggggaauauucgauguaacaucugcauauga

SEQ ID NO: 128056 - RNA, 1707 nt, Artificial Sequence
  derived and/or modified CDS sequence (opt3) from hemagglutinin__InfluenzaA__AAC14418
auggagagaaucgugcugcuccuugccaccgucagccugguuaaguccgaccagauuugcauaggcuaccacgcuaacaauucuacagaacaaguggauacuaucauggagaaaaacguaacggugacccaugcacaggacauuuuggaaaggacacacaaugggaaguuaugugaucugaacggagucaaaccccuaauccuccgggacugcucaguggccgguuggcugcuuggcaauccuaugugugaugaguucauuaacguuccagaauggaguuauaucguggagaaggcgagcccggcuaaugaccugugcuaccccgggaacuuuaaugauuaugaggaauugaaacaucuccugucccgcauaaaccacuucgagaagauccagauuaucccuaagucuucguggucaaaucaugacgccagcaguggagucuccucugcauguccauaccugggccgaagcuccuuuuuccguaacgugguauggcucauuaaaaagaacucaacuuaucccaccaucaaaagaaguuacaauaauacaaaccaggaagauuuacugguucuuugggguauacaccacccuaacgacgccgcugagcaaaccaaguuguaucagaauccaacuacauacauuagcguggggaccucuacgcugaaccagaggcuaguccccgagaucgcaacucggccuaaagugaauggacaguccggccgcauggaauuuuucuggaccauucucaagccaaacgaugccaucaauuuugagucaaacggcaauuucaucgcuccggaauacgccuauaagauugugaaaaagggggacagcacaauaaugaaaagugagcuggaauacggaaacugcaauacuaagugucaaacccccaugggugcgaucaacucuuccaugccuuuucauaauauucacccacuuacaaucggcgagugccccaaauaugucaagagcaacagacugguuuuggcaaccgggcucaggaaugccccucagcgggagcgccgaaggaaaaagagaggacuguucggcgcuauagccgguuuuauugaagggggauggcagggcaugguggauggcugguacggguaucaucacucgaacgagcagggaucugguuacgcagcugaccaagaauccacgcagaaggccaucgacggcguaacuaauaaagugaacucaaucauuaacaagaugaauacacaguucgaggcggucgggcgggaauuuaacaauuuagagcgucgcaucgagaaccugaauaaaaagauggaagauggauuccucgacguguggaccuauaacgccgagcuucugguuuugauggaaaaugagagaacucuagauuuccacgacaguaacgugaaaaaucuguacgauaaggucaggcuccaacugcgggacaacgcaaaggaacuuggcaaugguuguuuugaguucuaccauaaaugcgauaacgaguguauggaaagcgugaagaaugggacauaugacuacccacaguauuccgaggaagcucgacugaaccgcgaggagauuucuggcguaaaauuggaaagcaugggaaccuaccagauacucucaaucuauaguacgguugccuccagccuggcuuuagccauuaugguggcaggccugucucuauggaugugcucaaaugggagucuccagugcagaaucuguaucuga

SEQ ID NO: 128057 - RNA, 1707 nt, Artificial Sequence
  derived and/or modified CDS sequence (opt3) from hemagglutinin__InfluenzaA__AAC40508
auggagagaaccgugcugcuccuugccacagucagccugguuaaguccgaccagaucugcauuggcuaccacgcuaacaauucuacugaacaaguggauacgauaauggagaaaaacguaaccgugacacaugcacaggacaucuuggaaaggacucacaaugggaaguuaugugaucugaacggagucaaaccccuaauucuccgggacugcucaguggccgguuggcugcuuggcaauccuaugugugaugaguucaucaacguuccagaauggaguuauauuguggagaaggcgagcccggcuaaugaccugugcuaccccgggaacuuuaaugauuaugaggaauugaaacaucuccugucccgcaucaaccacuucgagaagauacagaucauuccuaagucuucguggucaaaucaugacgccagcaguggagucuccucugcauguccauaccugggccgaagcuccuuuuuccguaacgugguauggcucaucaaaaagaacucagccuaucccaccauuaaaagaaguuacaauaauacaaaccaggaagauuuacugguucuuuggggugugcaccacccuaacgacgcugcagagcaaaccaaguuguaucagaauccaacuacauacaucagcgucgggaccucuacgcugaaccagaggcuagugcccgagauagccacucggccuaaagugaauggacaguccggccgcauggaauuuuucuggaccauucucaagccaaacgaugcuaucaauuuugagucaaacggcaauuucauugccccggaauacgcguauaagaucgucaaaaagggggacagcacaaucaugaaaagugagcuggaauacggaaacugcaauacuaagugucaaacccccaugggugcaauuaacucuuccaugccuuuucauaauauacacccacuuacaaucggcgagugccccaaauauguuaagagcaacagacugguguuggccaccgggcucaggaauacgccucagcgggagcgccgaaggaaaaagagaggacuguucggcgcuauugccgguuuuaucgaagggggauggcagggcaugguagauggcugguacggguaucaucacucgaacgagcagggaucuuguuacuccgcagacaaggaaucaacucaaaaagcuauagacggugugacaaauaaggucaacaguauuaucaacaaaaugaauacccaguucgaggccgugggccgggaauuuaacaauuuagagcgucgcaucgagaaccugaauaagaaaauggaagauggguuccucgacguuuggacuuauaacgcggagcuucugguguugauggaaaaugagagaacacuagauuuccacgacagcaacgucaagaaucuguacgauaaggugaggcuccagcugcgggacaacgccaaagaacuuggaaauggcugcuuugaguucuaccauaagugugauaacgagugcauggaauccguuaaaaaugguaccuaugacuacccacaauauucugaggaagcacgacugaaccgcgaggagauuagcgggguaaaguuggaaucaaugggcacguaccagauccucaguauuuauuccaccguggcuagcucucuggccuuagcuauaauggucgccggacugucacuauggaugugcaguaauggcagccuccaguguagaaucugcauuuga

SEQ ID NO: 128058 - RNA, 1701 nt, Artificial Sequence
  derived and/or modified CDS sequence (opt3) from hemagglutinin__InfluenzaA__AAF87274
augaaggccauccuggugguccuccuuuacaccuucacaacugcuaacgcagacacgcugugcauuggcuaucacgccaauaacagcaccgauacaguugacacuguguuggagaaaaauguaaccgugacacauuccgucaacuuacuggaaaauagacacaacgggaagcuauguaaacucaagggaguggcgccccugcaucuugguaaaugcaauauagcuggcuggcuguuggggaacccugagugugaacuccuguuuaccgccucuucauggaguuacaucguugagacuagcaauuccgauaacggaacaugcuauccaggcgacuucauuaauuacgaagaacugagggagcagcucucuucggugaguagcuuugaacgguucgagaucuuuccgaaggcaaacaguuggcccaaucacgaaaccaaccgcggugucacguccgccuguccuuaugcuggggcaaauucuuucuaccgaaacuuaauuuggcuggugaagaaaggaaacagcuauccaaaacuuuccaagucauacaucaauaacaagggcaaagagguauugguucuguggggcauacaucaucccccuacuucaaaugaucaacagagccuauaccagaacgccgacgcuuauguguuugucgggucuuccaaguacaauaagaaauucaugccagagaucgccacccgucccaaggugagaggacaggcggguaggaugaacuauuacuggacacucauugaaccuggcgauacuaucaccuuugaggcaacagggaaucugguggccccacgguaugcuuucgccauggaacgcggaucaggcagcgguauuaucauaagugacaccccgguccacgauugcaacgcaacgugucaaacucccaaaggggcuauuaauacaaaccuuccuuuucagaauauccacccaguuaccauuggagagugccccaaguacgugaaaucuacuagacugaggauggccacaggcuugcggaacaucccuuccauccagagccgcggccucuucggggcgauugccggauuuauagaagguggcuggaccgggaugaucgacggaugguauggcuaccaccaucagaaugagcaagguucgggguacgcagcugaucgaaagucuacgcagaacgccauugacggcaucaccaauaaaguaaacuccgugauagagaagaugaacacacaguucacugcugucggaaaggaguucaaucaccuggagaaaagaauuaagaacuuaaauaaaaagguggaugacggcuuucuggacguuuggaccuauaacgccgaacuccuugugcuguuggagaaugaaaggacacuagauuaccacgacucaaacgucaaaaaucuguaugagaaggugcggagucagcuccguaacaaugcaaaggagaucgggaacggauguuucgaauuuuaccauaaaugcgaugacacuuguauggagagcaucaagaaugguaccuaugauuacccaaaauauuccgaagaggccaagcugacacgcgaagagauugacggcguaaaacuugagucuaccagaaucuaccaaauucuggcuauauacagcacuaucgcgucaaguuugguucuccugguguccuuaggggcaauuagcuucuggaugugcucuaacggaucacugcagugcaggaucuguaucuga

SEQ ID NO: 128059 - RNA, 1701 nt, Artificial Sequence
  derived and/or modified CDS sequence (opt3) from hemagglutinin__InfluenzaA__AAF87275
augaaggccauccuggugguccuccuuuacaccuucacaacugcuaacgcagacacgcugugcauuggcuaucacgccaauaacagcaccgauacaguugacacuguguuggagaagaauguaaccgugacacauuccgucaacuuacuggaaaauagacacaacgggaagcuauguaaacucaagggaguggcgccccugcaucuugguaaaugcaauauagcuggcuggcuguuggggaacccugagugugaacuccuguuuaccgccucuucauggaguuacaucguugagacuagcaauuccgauaacggaacaugcuauccaggcgacuucauuaauuacgaagaacugagggagcagcucucuucggugaguagcuuugaacgguucgagaucuuuccgaaggcaaacaguuggcccaaucacgaaaccaaccgcggugucacguccgccuguccuuaugcuggggcaaauucuuucuaccgaaacuuaauuuggcuggugaagaaaggaaacagcuauccaaaacuuuccaagucauacaucaauaacaagggcaaagagguauugguucuguggggcauacaucaucccccuacuucaaaugaucaacagagccuauaccagaacgccgacgcuuauguguuugucgggucuuccaaguacaauaagaaauucaugccagagaucgccacccgucccaaggugagaggacaggcggguaggaugaacuauuacuggacacucauugaaccuggcgauacuaucaccuuugaggcaacagggaaucugguggccccacgguaugcuuucgccauggaacgcggaucaggcagcgguauuaucauaagugacaccccgguccacgauugcaacgcaacgugucaaacucccaaaggggcuauuaauacaaaccuuccuuuucagaauauccacccaguuaccauuggagagugccccaaguacgugaaaucuacuagacugaggauggccacaggcuugcggaacaucccuuccauccagagccgcggccucuucggggcgauugccggauuuauagaagguggcuggaccgggaugaucgacggaugguauggcuaccaccaucagaaugagcaagguucgggguacgcagcugaucgaaagucuacgcagaacgccauugacggcaucaccaauaaaguaaacuccgugauagagaagaugaacacacaguucacugcugucggaaaggaguucaaucaccuggagaaaagaauugaaaacuuaaauaagaaaguggaugacggcuuucuggacguuuggaccuauaacgccgagcuccuugugcuguuggaaaaugagaggacacuagauuaccacgacucaaacgucaagaaucuguaugagaaagugcggagucagcuccguaacaaugcaaaggaaaucgggaacggauguuucgaguuuuaccauaagugcgaugacacuuguauggaaagcaucaaaaaugguaccuaugauuacccaaaguauuccgaggaagccaaacugacacgcgaggagauugacggcguaaaacuugaaucuaccagaaucuaccaaauucuggcuauauacagcacuaucgcgucaaguuugguucuccugguguccuuaggggcaauuagcuucuggaugugcucuaacggaucacugcagugcaggaucuguaucuga

SEQ ID NO: 128060 - RNA, 1701 nt, Artificial Sequence
  derived and/or modified CDS sequence (opt3) from hemagglutinin__InfluenzaA__AAF87277
augaaggccauccugcucgugcuucuguacaccuucacagcugcaaacgccgacacuuugugcauuggcuaucacgcgaauaacagcacggauaccgucgacacaguuuuagagaagaaugugacuguaacccauuccgugaaccugcuagaagauagacacaaugggaagcucuguaaacugaggggaauagcuccccuucaucuggguaagugcaacaucgccggcugguugcucgggaauccugagugugaacugcuguuuacagcaucuucauggaguuacauugucgagaccagcaacuccgacaauggaacuugcuauccaggcgauuucaucaacuacgaagaacuccgggagcaguuaucuucggugucuagcuuugaacgcuucgagauuuuuccgaaagccaguuccuggcccgaccacgaaacaaaucgagguguuaccgcugcauguccuuaugccggggcuaacucuuucuaccguaaucugaucuggcuugugaagaagggaaacagcuauccaaaauuguccaagucauacauaaauaacaaagagaaggagguccuggugcuauggggcauccaucaucccccuacgaguacugaucaacagagccucuaccagaacgccgacgcguauguauuuguuggcucauccaaauacaauaagaaguucaaaccagaaauugcaucaagacccaaggugagggggcaggccggacggauggauuauuacuggacccuggucgagccuggugacacaaucacuuuugaagcuaccggcaaccuuguggugccacgcuaugccuucgcaaugaaaagagggagcggaaguggcauuaucauaucugauacaccgguccacgacugcaauaccacgugucaaacucccaagggugcuauuaacacaucccugccuuuucagaauauccacccaguuaccauuggggagugccccaaauacguaaagagcacuaaauugaggauggccacaggacuccggaacaucccuucgauccagucucgcggccuguucggcgcgauugccggguuuauagaaggagguuggaccggcaugaucgaugggugguauggauaccaccaucagaaugagcaaggcuccgguuacgcagcugaccgaaagucaacgcagaacgccauugacggggugaccaauaaggugaacagugucaucgagaaaaugaauacacaguucacugcugugggcaaggaguucaaccacuuagagaaaagaauagaaaaucugaacaagaaaguugaugacggauuucucgauguguggaccuauaaugccgagcuucuggucuugcuagaaaacgagaggacacuggacuaccacgauagcaacgugaagaaucucuaugagaagguacggucccagcugaaaaacaaugcaaaggaaauuggcaacggguguuucgaguuuuaccauaaaugcgacgauacuuguauggaaucuguuaagaauggaaccuaugacuacccaaaauauagcgaggaaucaaaacuuaaccgugaggagaucgauggugugaagcuggaaaguacacgcaucuaccaaauuuuggccaucuacuccaccgucgcuagcucucucauucuguuagugucacugggcgcgauaaguuucuggaugugcagcaaugggucccuacagugcagaaucuguauuuga

SEQ ID NO: 128061 - RNA, 1701 nt, Artificial Sequence
  derived and/or modified CDS sequence (opt3) from hemagglutinin__InfluenzaA__AAF87278
augaaggccauccugcucgugcuucuguacaccuucacagcugcaaacgccgacacuuugugcauuggcuaucacgcgaauaacagcacggauaccgucgacacaguuuuagagaagaaugugacuguaacccauuccgugaaccugcuagaagauagacacaaugggaagcucuguaaacugaggggaauagcuccccuucaucuggguaagugcaacaucgccggcugguugcucgggaauccugagugugaacugcuguuuacagcaucuucauggaguuacauugucgagaccagcaacuccgacaauggaacuugcuauccaggcgauuucaucaacuacgaagaacuccgggagcaguuaucuucggugucuagcuuugaacgcuucgagauuuuuccgaaagccaguuccuggcccaaucacgaaacaaaccgagguguuaccgcugcauguccuuaugccggggcuaauucuuucuaccguaaccugaucuggcuugugaagaagggaaauagcuauccaaaauuguccaagucauacauaaacaacaaagagaaggagguccuggugcuauggggcauccaucaucccccuacgaguacugaccaacagagccucuaccagaaugccgaugcguauguauuuguuggcucauccaaauacaacaagaaguucaaaccagaaauugcaucaagacccaaggugagggggcaggccggacggauggacuauuacuggacccuggucgagccuggugauacaaucacuuuugaagcuaccggcaaucuuguggugccacgcuaugccuucgcaaugaaaagagggagcggaaguggcauuaucauaucugacacaccgguccacgauugcaacaccacgugucaaacucccaagggugcuauuaauacaucccugccuuuucagaacauccacccaguuaccauuggggagugccccaaauacguaaagagcacuaaauugaggauggccacaggacuccggaauaucccuucgauccagucucgcggccuguucggcgcgauugccggguuuauagaaggagguuggaccggcaugaucgacgggugguauggauaccaccaucagaacgagcaaggcuccgguuacgcagcugaucgaaagucaacgcagaaugccauugacggggugaccaacaaggugaauagugucaucgagaaaaugaacacacaguucacugcugugggcaaggaguucaaucacuuagagaaaagaauagaaaaccugaauaagaaaguugacgauggauuucucgacguguggaccuauaacgccgagcuucuggucuugcuagaaaacgagagggcacuggauuaccacgacagcaaugugaagaaccucuaugagaagguacggucccagcugaaaaauaacgccaaggaaauuggcaauggguguuucgaguuuuaccauaaaugcgaugacacauguauggaaucuguuaagaacggaacuuaugauuacccaaaauauagcgaggaaucaaaacuuaaucgugaggagaucgacggugugaagcuggaaaguacccgcaucuaccaaauuuuggcuaucuacuccacagucgcgagcucucucauucuguuagugucacugggcgcaauaaguuucuggaugugcagcaacgggucccuacagugcagaaucuguauuuga

SEQ ID NO: 128062 - RNA, 1701 nt, Artificial Sequence
  derived and/or modified CDS sequence (opt3) from hemagglutinin__InfluenzaA__AAF87279
augaaggccauccugcucgugcuucuguacaccuucacagcugcaaacgccgacacuuugugcauuggcuaucacgcgaauaacagcacggauaccgucgacacaguuuuagagaagaaugugacuguaacccauuccgugaaccugcuagaagauagacacaaugggaagcucuguaaacugaggggaauagcuccccuucaucuggguaagugcaacaucgccggcugguugcucgggaauccugagugugaacugcuguuuacagcaucuucauggaguuacauugucgagaccagcaacuccgacaauggaacuugcuauccaggcgauuucaucaacuacgaagaacuccgggagcaguuaucuucggugucuagcuuugaacgcuucgagauuuuuccgaaagccaguuccuggcccaaucacgaaacaaaccgagguguuaccgcugcauguccuuaugccggggcuaauucuuucuaccguaaccugaucuggcuugugaagaagggaaauagcuauccaaaauuguccaagucauacauaaacaacaaagagaaggagguccuggugcuauggggcauccaucaucccccuacgaguacugaccaacagagccucuaccagaaugccgaugcguauguauuuguuggcucauccaaauacaacaagaaguucaaaccagaaauugcaucaagacccaaggugagggggcaggccggacggauggacuauuacuggacccuggucgagccuggugauacaaucacuuuugaagcuaccggcaaucuuguggugccacgcuaugccuucgcaaugaaaagagggagcggaaguggcauuaucauaucugacacaccgguccacgauugcaacaccacgugucaaacucccaagggugcuauuaauacaucccugccuuuucagaacauccacccaguuaccauuggggagugccccaaauacguaaagagcacuaaauugaggauggccacaggacuccggaauaucccuucgauccagucucgcggccuguucggcgcgauugccggguuuauagaaggagguuggaccggcaugaucgacgggugguauggauaccaccaucagaacgagcaaggcuccgguuacgcagcugaucgaaagucaacgcagaaugccauugacggggugaccaacaaggugaauagugucaucgagaaaaugaacacacaguucacugcugugggcaaggaguucaaucacuuagagaaaagaauagaaaaccugaauaagaaaguugacgauggauuucucgacguguggaccuauaacgccgagcuucuggucuugcuagaaaacgagaggacacuggauuaccacgacagcaaugugaagaaccucuaugagaagguacggucccagcugaaaaauaacgcaaaggaaauuggcaauggguguuucgaguuuuaccauaaaugcgaugacacuuguauggaaucuguuaagaacggaaccuaugauuacccaaaauauagcgaggaaucaaaacuuaaucgugaggagaucgacggugugaagcuggaaaguacacgcaucuaccaaauuuuggccaucuacuccaccgucgcuagcucucucauucuguuagugucacugggcgcgauaaguuucuggaugugcagcaacgggucccuacagugcagaaucuguauuuga

SEQ ID NO: 128063 - RNA, 1701 nt, Artificial Sequence
  derived and/or modified CDS sequence (opt3) from hemagglutinin__InfluenzaA__AAF87281
augaaggccauccuggugguccuccuuuacaccuucacaacugcuaacgcagacacgcugugcauuggcuaucacgccaauaacagcaccgauacaguugacacuguguuggagaaaaauguaaccgugacacauuccgucaacuuacuggaagauagacacaaugggaagcuauguaaacucaagggaauagcgccccugcaucuugguaaaugcaacaucgcuggcuggcuguuggggaauccugagugugaacuccuguuuaccgccucuucauggaguuacauuguggagacuagcaacuccgacaauggaacaugcuauccaggcgauuucaucaacuacgaggaacugagggagcagcucucuucgguuagcucauuugaacgguucgagauuuuuccgaaggcaaguuccuggcccaaucacgaaaccaaccgcggugugacgucugccuguccuuaugcuggggcaaauagcuucuaccgaaacuuaaucuggcuggucaagaaaggaaauuccuauccaaaacuuucaaaaaguuacauaaacaacaagggcaaaaagguguugguacuguggggcauccaucaucccccuacuagcaccgaccaacagucucuauaccagaaugccgaugcuuauguuuuugugggguccucaaaguacaacaaaaaguucaugccagagauugccacacgucccaaagucagaggacaggcggguaggaugaauuauuacuggacucucaucgagccuggcgacaccauuacauuugaagcaaccgggaaccugguggugccacgguaugccuucgcuauggagcgcggauacggcagcgguaucauaauuagugauacgccgguccacgacugcaauacuacaugucaaacccccaagggggccaucaacacuucucuuccuuuucagaauauucacccaguuacaaucggagaaugccccaaauaugugaaguccaccaaacugagaauggcaacgggcuugaggaacaucccuagcauucagucgcggggccucuucggggcuauagccggauuuaucgaggguggcuggaccgggaugauugauggaugguacggcuaccaccaucagaaugaacaagguucuggguaugcggccgaccgcaaguccacacagaacgcaaucgauggcauaacuaauaagguaaacucagugauugagaaaaugaauacccaguucacagcugucggaaaggaguucaaccaccuggaaaaacgaaucgagaauuuaaacaagaaaguggacgacggcuuucuggauguuuggacuuacaacgccgaacuccuugugcuguuggagaaugaaagaacccuagacuaucacgauaguaacgucaagaaucuguacgagaaggugaaaagccagcucaagaacaaugcuaaagagaucgggaacggauguuucgaauuuuaucauaagugcgacgauacauguauggaguccguaaagaaugguaccuacgacuauccaaaguacucugaagaggccaagcugaacagggaagagauugauggcguuaaacuugagagcacucggaucuaccaaauucuggcaauauauucaacgaucgccaguuccuuggugcuccuggucagcuuaggggcuauuucuuucuggaugugcucaaauggaagucugcagugccguaucuguaucuga

SEQ ID NO: 128064 - RNA, 1701 nt, Artificial Sequence; identical to SEQ ID NO: 128062
  derived and/or modified CDS sequence (opt3) from hemagglutinin__InfluenzaA__AAF87282

SEQ ID NO: 128065 - RNA, 1701 nt, Artificial Sequence
  derived and/or modified CDS sequence (opt3) from hemagglutinin__InfluenzaA__AAF87283
augaaggccauccuggugguccuccuuuacgcuuucaccacagcaaacgccgacacucugugcauuggcuaucacgcgaauaacagcacggauaccguugacacaguguuggagaaaaauguaacugugacccauuccgucaacuuacuggaagauagacacaaugggaagcuauguaaacucaagggaguggcuccccugcaucuugguaaaugcaacauagccggcuggcuguuggggaauccugagugugaacuccuguuuacagcaucuucauggaguuacaucguugagaccagcaacuccgacaauggaacuugcuauccaggcgauuucauuaacuacgaagaacugagggagcagcucucuucggugagcucauuugaacgguucgagaucuuuccgaaggccaguuccuggcccaaucacgaaacaaaccgcggugucaccucugcuuguccuuauagcggggcaaauuccuucuaccgaaacuuaauuuggcuggugaagaaaggaaauucauauccaaaacuuaguaaaagcuacaucaacaacaagggcaaagagguauugguucuguggggcauacaucaucccccuacgucuacugaccaacagucccuauaccagaaugccgaugcuuauguguuugucgggucaagcaaguacaacaagaaauucaugccagagaucgccacccgucccaaggugagaggacaggcggguaggaugaauuauuacuggacacucauugaaccuggcgacacuaucaccuuugaggcaacagggaaccugguggccccacgguaugcuuucgccauggaacgcggaaguggcucugguauuaucauauccgauaccccggucuacgacugcaauacggcaugucaaacucccaaaggggcuauuaacacaagccuuccuuuucagaauauccacccaguuaccauuggagagugccccaaguaugugaaaucgacuaagcugagaauggccacaggcuugaggaacaucccuucuauccagucccggggccucuucggggcgauugccggauuuauagaagguggcuggaccgggaugaucgauggaugguacggcuaccaccaccagaaugagcaagguucaggguaugcaccagaccgcaaaaguacgcagaacgcuauugauggcaucaccaauaagguaaacagcgugauagagaagaugaauacacaguucacugccgucggaaaagaguucaaccaucuggagaagcgaauugaaaauuuaaacaaaaagguggacgacggcuuucugaacguuuggaccuacaaugcugagcuccuugugcuguuggaaaacgagagaacacuagauuaucacgacuccaaugucaaaaaccuguacgagaaggugaggucucagcucaagaauaacgccaaagaaaucgggaauggauguuucgaguuuuaucacaagugcgaugacacuuguauggaaagcguaaagaacgguaccuacgauuaucccaaguacucagaggaagcacggcugaaucgugaggagaucgacggcguuaaacuugaaaguacacgcauuuaccaaauccuggccauuuauuccaccauagcuagcucuuuggugcuccuggucucauuaggggcgaucaguuucuggaugugcagcaacggaucccugcagugcagaauuuguaucuga

SEQ ID NO: 128066 - RNA, 1701 nt, Artificial Sequence
  derived and/or modified CDS sequence (opt3) from hemagglutinin__InfluenzaA__AAF87284
augaaggccauccuggugguccuccuuuacgcuuucaccacagcaaacgccgacacucugugcauuggcuaucacgcgaauaacagcacggauaccguugacacaguguuggagaaaaauguaacugugacccauuccgucaacuuacuggaagauagacacaaugggaagcuauguaaacucaagggaguggcuccccugcaucuugguaaaugcaacauagccggcuggcuguuggggaauccugagugugaacuccuguuuacagcaucuucauggaguuacaucguugagaccagcaacuccgacaauggaacuugcuauccaggcgauuucauuaacuacgaagaacugagggagcagcucucuucggugagcucauuugaacgguucgagaucuuuccgaaggccaguuccuggcccaaucacgaaacaaaccgcggugucaccucugcuuguuuacuguucuggagcaagcaacuuuugcagaaacugaauauggcagggaagaaaggaaacuccuauccuaagcuaucaaaaaguuacauuaauaacaagggcaaggaggugcucguacuguggggcauccaucacccacccacgagcacugaccagcagucucuuuaucaaaacgccgaugcuuacguuuuugugggguccucaaaauacaauaagaaauucaugccugagauagccacccgaccaaagguccguggacaggcggguagaaugaacuauuacuggacacugaucgaacccggcgacacuauuaccuuugaggcaacagggaauuugguggccccuagguaugcuuucgccauggaacggggaagcggcagugguaucauuaucucugauaccccaguguacgacugcaacacggcaugucagacuccgaaaggggcuauaaauacaucccuccccuuucagaacauucacccugucaccaucggagagugcccaaaguauguuaaaagcacuaagcugcgcauggccacaggcuuaagaaauauucccucgauccaaucuaggggccuguucggggcgaucgccggauuuauugaagguggcuggaccgggaugauagauggaugguacggcuaucaucaccagaacgagcaggguuccggguacgcagcugaccggaagucaacgcagaaugccaucgauggcauuaccaacaaagugaauaguguaaucgagaagaugaacacacaauucacugcugugggaaaagaguucaaucaucucgagaagcgcauagaaaaccuuaauaaaaaggucgacgacggcuuucugaacguguggaccuacaacgccgaguugcuaguucugcucgaaaaugagcgaacacuggauuaucacgacagcaacgugaagaaucuuuacgagaaagucagaucccagcugaagaacaaugcaaaagaaauugggaacggauguuucgaguuuuaucacaagugcgaugacacuuguauggaaucugugaaaaaugguaccuacgauuauccuaaguacagcgaggaagccagguugaaccgggaggagaucgacggcguaaagcucgaaucaacacguaucuaucagauucuggcuaucuacaguaccauugcguccagcuuaguucugcuagugucucucggggcaauaucauucuggaugugcaguaauggaagccugcaaugccgcaucuguauuuga

SEQ ID NO: 128067 - RNA, 1701 nt, Artificial Sequence
  derived and/or modified CDS sequence (opt3) from hemagglutinin__InfluenzaA__AAG01749
augagcaccaucauugcccuguccuacauacucugccuuguguucgcucagaagcugcccggcaacgacaauucuacagcaacuuuguguuuagggcaccaugccgucccuaacggaacgcugguuaaaaccaucacaaaugaucaaauugaggugacuaacgcgaccgaacuuguacagucaaguagcacagguagaaucugcgacuccccacacaggauucucgauggcaagaauuguacccugaucgacgcucuacugggggauccgcauugcgacggauuucagaacaaagagugggauuuguucguggaacggucuaaggccuauucgaauuguuaccccuaugacgucccugauuacgcaucacuccgcagccugguggccaguuccggcacucuggaguuuacaaacgaagguuucaauuggaccgggguugcucaggacggaacgucuuaugcaugcaaacgaggcagcgugaaguccuuuuucucacgucucaacugguuacacaagcuggaguacaaauauccagcccuuaaugucacuaugcccaacaaugauaaguuugacaaauuguacauauggggcgugcaucacccuaguaccgauagcgaccaaacaucucuguacguacaggcuuccgggagaguuacugugucaaccaagaggagccagcagacagucaucccaaacauuggaagucggcccugggugcgcgguaucucuuccagaauuagcaucuauuggaccauagugaaaccuggcgacauucuacucaucaauucgacggggaaccugauugccccaaggggauacuucaagauccggucuggcaaguccucaaucaugcgcagugaugcgccgauugacaacuguaauagcgagugcauaacucccaacgguuccaucccuaaugaaaaaccauuucaaaacgucaaucgaauuacauauggggcaugucccagauacguuaagcagaacacccuuaaacuggccacuggaaugaggaaugugccugagaagcagacacggggcaucuucggcgcuauagccggguuuauugaaaacggaugggaggguaugguagauggcugguauggguuccgucaccaaaauucugagggaaccggccaggcagcugacuugaaaagcacgcaggccgcgaucaaccagaucaaugguaagcucaaccgccugauugagaaaaccaaugaaaaguuucaucaaaucgaaaaggaguucucagaaguggaggggaggauucaggauuuagagaaauacgucgaagacacaaagauagaucuguggaguuauaacgccgagcuccuuguggcacuggaaaaucagcacacuaucgacuugaccgauuccgagaugaacaaacuauucgaaagaacacggaagcagcugcgagagaacgcugaggacaugggcaauggaugcuuuaaaauuuaccauaagugugauaacgccugcaucggcagcauccgcaaugggacuuacgaccacgacguuuauagagaugaagcucucaacaauagguuccaaauuaagggaguggagcugaaaucugguuacaaggacuggauacuuuggaucucauuugccauuaguugcuuccuguugugugucgugcuccugggcuuuaucaugugggcaugccagaaagggaacauucgguguaauaucugcauauga

SEQ ID NO: 128068 - RNA, 1701 nt, Artificial Sequence
  derived and/or modified CDS sequence (opt3) from hemagglutinin__InfluenzaA__AAG01767
augaacaccaucauugcccugagcuacauacucugccuuguguucgcucagaagcugcccggcaaugacaacuccacagcaacuuuguguuuagggcaccaugccgucccuaauggaacgcugguuaaaaccaucacaaacgaucaaauugaggugacuaaugcgaccgaacuuguacagucuucaaguacagguagaaucugcgacagcccacacaggauucucgauggcaagaacuguacccugaucgacgcucuacugggggauccgcauugcgacggauuucagaauaaagagugggauuuguucauagaacgguccaaggccuauucuaacuguuaccccuaugacgugccugauuacucgucacuccgcagccuggucgcaaguuccggcacucuggaguuuacaaaugaagacuucaacuggaccgguguggcccaggaugggggaucuuauagcugcaaacgagaguccguuaagucauuuuucagucgucucaauugguuacacaagcuggaguacaaauauccagcucuuaacgugacgaugcccaauaacgacaaguuugauaaauuguacaucuggggcguccaucacccuagcacugacucugaacaaaccucccuguacgugcaggcaauuggcagaguaacaguuucaacuaagagcagucagcagaccgugaucccaaauauugggucuaggcccuggguccggggaaucuccagccgcauaucgauuuauuggacaaucgugaaaccuggugacauucuacucaucucuuccaccggcaaccugaucgccccaagaggguacuucaagauuaggaacggaaagucaaguauaaugcggagcgaugcuccgaucgacaauuguuauuccgagugcauuacgcccaacggcucuaucccuaaugauaaaccauuucaaaacgugaaucgcauaacuuacggugccugucccaaguaugucaaacagaagacacuuaaacuggcgaccgggaugcgaaacguuccugaaaagcagacuagaggaauuuucggcgcaaucgccggcuuuaucgagaaugggugggagggaaugguggacgguugguacggcuucaggcaccagaacagcgaagggacaggacaagcugccgauuugaaaucaacccaggcagcuauugaccagguaaauggcaagcucaaccggcugaucgagaagacgaaugaaaaauuucaucaaauugagaaggaguucagugaaguggagggucguauacaggauuuagaaaaauaugucgaggacaccaagaucgaucugugguccuacaacgccgaacuccuuguggcgcuggagaaucagcacacaauugacuugacugauagcgaaaugaacaaacuauucgagaagacccgcaagcagcugagagagaaugccgaagacauggggaacggcugcuuuaaaaucuaccauaagugugacaacgcaugcaucggaucuauuaggaauggcacauaugaucacgacguuuaccgggaugaggcucucaacaaucgauuccaaauaaaagggguggaacugaagucaggauauaaagacuggauccuuuggauuaguuuugccaucagcugcuuccuguugugugucgugcuccuggguuuuauuaugugggcuugccagaagggcaacauccgcuguaauauaugcaucuga

SEQ ID NO: 128069 - RNA, 1701 nt, Artificial Sequence
  derived and/or modified CDS sequence (opt3) from hemagglutinin__InfluenzaA__AAG01776
augaacaccaucauugcccugagcuacauacucugccuuguguucgcucagaagcugcccggcaaugacaacuccacagcaacuuuguguuuagggcaccaugccgucccuaauggaacgcugguuaaaaccaucacaaacgaucaaauugaggugacuaaugcgaccgaacuuguacagucuucaaguacagguagaaucugcgacagcccacacaggauucucgauggcaagaacuguacccugaucgacgcucuacugggggauccgcauugcgacggauuucagaauaaagagugggauuuguucauagaacgguccaaggccuauucuaacuguuaccccuaugacgugccugauuacucgucacuccgcagccuggucgcaaguuccggcacucuggaguuuacaaaugaagacuucaacuggaccgguguggcccaggaugggggaucuuauagcugcaaacgagaguccguuaagucauuuuucagucgucucaauugguuacacaagcuggaguacaaauauccagcucuuaacgugacgaugcccaauaacgacaaguuugauaaauuguacaucuggggcguccaucacccuagcacugacucugaacaaaccucccuguacgugcaggcaauuggcagaguaacaguuucaacuaagagcagucagcagaccgugaucccaaauauugggucuaggcccuggguccggggaaucuccagccgcauaucgauuuauuggacaaucgugaaaccuggugacauucuacucaucucuuccaccggcaaccugaucgccccaagaggguacuucaagauuaggaacggaaagucaaguauaaugcggagcgaugcuccgaucgacaauuguuauuccgagugcauuacgcccaacggcucuaucccuaaugauaaaccauuucaaaacgugaaucgcauaacuuacggugccugucccaaguaugucaaacagaagacacuuaaacuggcgaccgggaugcgaaacguuccugaaaagcagacuagaggaauuuucggcgcaaucgccggcuuuaucgagaaugggugggagggaaugguggacgguugguacggcuucaggcaccagaacagcgaagggacaggacaagcugccgauuugaaaucaacccaggcagcuauugaccagguaaauggcaagcucaacuggcugaucgagaagacgaaugaaaaauuucaucaaauugagaaggaguucagugaaguggagggucggauacaggauuuagaaaaauaugucgaggacaccaagaucgaucugugguccuacaacgccgaacuccuuguggcgcuggagaaucagcacacaauugacuugacugauagcgaaaugaacaaacuauucgagaagacccguaagcagcugcgcgagaaugccgaagacauggggaacggcugcuuuaaaaucuaccauaagugugacaacgcaugcaucggaucuauuagaaauggcacauaugaucacgacguuuacagggaugaggcucucaacaaucgguuccaaauaaaagggguggaacugaagucaggauauaaagacuggauccuuuggauuaguuuugccaucagcugcuuccuguugugugucgugcuccuggguuuuauuaugugggcuugccagaagggcaacauccgauguaauauaugcaucuga

SEQ ID NO: 128070 - RNA, 1701 nt, Artificial Sequence
  derived and/or modified CDS sequence (opt3) from hemagglutinin__InfluenzaA__AAG01785
augaagaccaucauugcccugagcuacauacucugccuuguguucgcucagaaacugcccggcaacgacaauuccacagcaacuuuguguuuagggcaccaugccgucccuaacggaacgcugguuaagaccaucacaaaugaucaaauugaggugacuaacgcgaccgaacuuguacagucuucaaguacagguagaaucugcgacagcccacacaggauucucgauggcaaaaauuguacccugaucgacgcucuacugggggauccgcauugcgacggauuucagaacaaggagugggauuuguucauagaacgguccaaagccuauucuaauuguuaccccuaugacgugccugauuacucgucacuccgcagccuggucgcaaguuccggcacucuggaguuuacaaacgaagacuucaauuggaccgguguggcccaggaugggggaucuuauagcugcaagcgagaguccguuaagucauuuuucagucgucucaacugguuacacaaacuggaguacaaguauccagcucuuaaugugacgaugcccaacaaugacaaauuugauaaguuguacaucuggggcguccaucacccuagcacugacucugaacaaaccucccuguacgugcaggcaauuggcagaguaacaguuucaacuaaaagcagucagcagaccgugaucccaaacauugggucuaggcccuggguccggggaaucuccagccgcauaucgauuuauuggacaaucgugaagccuggugacauucuacucaucucuuccaccggcaaucugaucgccccaagaggguacuucaagauuaggaacggaaaaucaaguauaaugcggagcgaugcuccgaucgacaacuguuauuccgagugcauuacgcccaauggcucuaucccuaacgauaagccauuucaaaaugugaaccgcauaacuuacggugccugucccaaauaugucaagcagaaaacacuuaagcuggcgaccgggaugcgaaauguuccugaaaaacagacuagaggaauuuucggcgcaaucgccggcuuuaucgagaacgggugggagggaaugguggacgguugguacggcuucaggcaccagaauagcgaagggacaggacaagcugccgauuugaagucaacccaggcagcuauugaccagguaaacggcaagcucaaucggcugaucgagaaaacgaacgaaaaguuucaucaaauugagaaagaguucagugaaguggagggucguauacaggauuuagaaaaguaugucgaggacaccaaaaucgaucugugguccuacaaugccgaacuccuuguggcgcuggagaaccagcacacaauugacuugacugauagcgaaaugaauaagcuauucgagaagacccgcaaacagcugagagagaacgccgaagacauggggaauggcugcuuuaagaucuaccauaaaugugacaacgcaugcaucggaucuauuaggaacggcacauaugaucacgacguuuaccgggaugaggcucucaauaaccgauuccaaauaaaggggguggaacugaaaucaggauauaaggacuggauccuuuggauuaguuuugccaucagcugcuuccuguugugugucgugcuccuggguuuuauuaugugggcuugccagaagggcaauauccgcuguaacauaugcaucuga

SEQ ID NO: 128071 - RNA, 1701 nt, Artificial Sequence
  derived and/or modified CDS sequence (opt3) from hemagglutinin__InfluenzaA__AAK52911
augaagaccaucauugcccugagcuacauacucugccuuguguucgcucagaaacugcccggcaacgacaauuccacagcaacuuuguguuuagggcaccaugccgucccuaacggaacgcugguuaagaccaucacaaaugaucaaauugaggugacuaacgcgaccgaacugguacagucuucaaguacagguagaaucugcgacagcccacaccagauucucgauggcaaaaauuguacccugaucgacgcccuucugggggauccgcauugcgacggauuucagaacaaggagugggauuuguucguggaaagguccacugcuuauucuaauuguuaccccuaugacgucccugauuacgcaucgcuccggucacugguggccagcaguggcacacuggaguuuaccaaagaagguuucaacuggacggggguugcucaagacggaacuuccuaugcaugcaagcgcggcucugucaagagcuuuuucucccgacucaauugguuacacaaacuggaguacaaguauccagcccuuaacgugaccaugcccaauaacgauaaauuugacaaguuguacauauggggcgugcaucacccuucaacagauagugaccagacuagccuguacguacaggcuucugggcguguuaccguguccacaaaaagaucacagcaaaccgucaucccaaauauuggaagcaggcccugggugcggggugugaguucucgcaucuccauuuauuggacgaucgucaagccuggcgacauacuacucauuaacagcacugggaaucugaucgccccaagaggauacuucaagauuaggucgggcaaaucuuccaucaugcggucagaugcgccgaucgacaacuguaacagugagugcauuacacccaaugguagcauaccuaacgauaagccauuucagaauguuaaccgcaucaccuauggggcauguccccgauacgugaaacagaauacucuuaagcuggccacaggaaugagaaacguaccugaaaaacagaccaggggcauuuucggcgcuaucgccggguuuauagagaauggaugggaagguaugguggacggcugguauggguuccggcaccaaaacuccgagggaacgggccaggcagcugauuugaagucuacccaggccgcgauuaaucaaaucaacgguaaacucaaucgucugaucgagaagacaaacgaaaaguuucaucagauugagaaagaguucagcgaagucgaagggcgcauccaggacuuagagaaguacguggaggauacuaaaauugaccuguggucauauaaugccgaacuccuuguugcacuggagaaccagcacaccauagauuugacagacagugaaaugaauaagcuauucgagagaacuaggaaacaacugcgggaaaacgcugaggauaugggcaacggaugcuuuaagaucuaccauaagugugacaaugccugcauuggcuccauccgaaacgggaccuacgaccacgauguguaucgcgacgaggcucucaauaacagauuccagaucaaaggagucgaacuaaagagcgguuacaaagauuggauucuuuggauaucuuuugccaucucaugcuuccuguugugugugguacuccugggcuuuauuaugugggcaugccagaaggggaauaucagguguaacauuugcaucuga

SEQ ID NO: 128072 - RNA, 1701 nt, Artificial Sequence
  derived and/or modified CDS sequence (opt3) from hemagglutinin__InfluenzaA__AAK52912
augaagaccaucauugcccugagcuacauacucugccuuguguucgcucagaaacugcccggcaacgacaauuccacagcaacuuuguguuuagggcaccaugccgucccuaacggaacgcugguuaagaccaucacaaaugaucaaauugaggugacuaacgcgaccgaacuuguacagucuucaaguacagguagaaucugcgacagcccacacaggauucucgauggcaaaaauuguacccugaucgacgcucuacugggggauccgcauugcgacggauuucagaacaaggagugggauuuguucguggaacggacuaaagccuauuccaauuguuaccccuaugacgucccugauuacgcaucucuccgcucgcugguggccucaagcggcacacuggaguuuaccaacgaagguuucaauuggacggggguugcucagaacggaacuagcuaugcaugcaagcgaggcuccgugaagucuuucuucagccgucucaauugguuacacaaacuggaguacaaguauccagcccuuaacgucaccaugcccaauaacgacaaauuugauaaguuguacauauggggcgugcaucacccuuccacagacucagaucaaaccagucuguacguacaggcuagcgggagaguuacugugucuacaaaaaggucccagcagaccgucaucccaaauauuggaucacggcccugggugcgcggugugagcaguagaaucucuauuuauuggacgaucgucaagccuggcgacauacuacucauuaacuccacugggaaccugaucgccccaaggggauacuucaagauucggagcggcaaaucgucuaucaugcgcuccgacgcgccgaucgguaauuguaacucagagugcauuacacccaaugggaguauaccuaacgauaagccauuucaaaauguuaaccgaaucaccuauggagcaugucccagauacgugaaacagaauacucuuaagcuggccacaggcaugaggaacguaccugaaaaacagacccggggcauuuucggggcuaucgccggauuuauagagaaugguugggaaggcaugguggacgggugguauggauuccgucaccagaacagcgagggcacgggucaagcagcugauuugaaguccacccaggccgcgauuaaucagaucaacgggaaacucaaucgccugaucgagaagacaaacgaaaaguuucaucaaauugagaaagaauuuucugaggucgaaggcagaauccaggacuuagagaaguacguggaggauacuaaaauugaccuguggagcuauaaugccgaacuccuuguugcacuggagaaccagcacaccauagauuugacagacucagaaaugaacaagcuauucgagaggacucggaaacagcugcgagaaaaugcugaggauaugggaaacggcugcuuuaagaucuaccauaagugugacaaugccugcauugggaguauccgcaacggaaccuacgaucacgacguguauagagacgaggcucucaauaacagguuccaaaucaaaggugucgaacugaaguccggcuacaaagauuggauucuuuggauaaguuuugccaucucuugcuuccuguugugugugguacuccugggguuuauuaugugggcaugccagaagggaaauauccgguguaacauuugcaucuga

SEQ ID NO: 128073 - RNA, 1701 nt, Artificial Sequence
  derived and/or modified CDS sequence (opt3) from hemagglutinin__InfluenzaA__AAK71687
augaaggccauccuggugguccuccuuuacaccuucacaacugcuaacgcagacacgcugugcauuggcuaucacgccaauaacagcaccgauacaguugacacuguguuggagaagaauguaaccgugacacauuccgucaacuuacuggaagauagacacaaugggaagcuauguaaacucaggggaguggcgccccugcaucuugguaagugcaacauagcuggcuggcuguuggggaauccugagugugaaucucucuuuaccgccucaaguuggagcuacaucguugagacuuccaacucugacaauggaacaugcuauccaggcgauuucauuaacuacgaagaacugcgggagcagcugucgucagugagcaguuuugaacgcuucgagaucuuuccggaaaccuccucuuggcccaaucacgacacgaaccgaggugucacugcagccuguccucaugcuggggcaaauagcuucuaucguaaccucauuugguuagccaaaaagggagauuccuacccaaagcugucaaaaaguuauaucaauaacaagggcaaagaggugcuuguauuguggggcauacaccaucccccuaccagcgcugaccaacagucucuguaccagaacgccgaugcguacguuuuugugggguccucaagauauagcaagaaauucaagccagagaucgcaacaaggcccaagguccggggacaggccggucgcaugaauuacuauuggacucuaguggaaccuggcgacaaaauuaccuuugaggcuacagggaaccucguggucccaagauacgccuucgcaaugaagaggaauagugaaucuggaaucauuaucuccgauauaagcguucacgacugcaacaccacgugucaaacuccgaaaggcgcuauuaauacaucgcugcccuuucagaacauccacccugugaccauuggugagugcccaaaguauguaaaaucuacuaaacuucggauggccacagggcugcgcaaugugcccuccauccagucacgaggauuguucggcgcgaucgccggcuuuauugaagggggauggaccgguaugauagauggcugguacggguaucaucaccagaacgagcaaggaaguggcuacgcagcugaccucaaaagcacgcagaaugccaucgacgguauuaccaacaaggucaauuccgugaucgagaagaugaacacacaguucacuguuguggggaaagaguucaaucaccuggagaagagaauagaaaacuuaaauaaaaaggucgaugacggcuuucuggauauuuggaccuacaacgcugagcuccuugugcuguuggaaaacgagaggacacuagacuaucaugauucuaauguaaagaaccuguacgagaagguucggagccagcucaagaauaacgccaaagaaaucggaaauggcuguuucgaguuuuaucacaagugcgacgauacuuguauggaaucagugaaaaacgggaccuacgacuauccuaaguacagugaggaagcaaaacugaaucgugaggagaucgauggagucaaacuugaauccacacgcauuuaucaaauccuggccauuuacagcaccguggcuucuucauugguccucgugguuagucuggguacuaucagcuucuggaugugcuccaacggcucuuuacagugcagaauauguauuuga

SEQ ID NO: 128074 - RNA, 1707 nt, Artificial Sequence
  derived and/or modified CDS sequence (opt3) from hemagglutinin__InfluenzaA__AAS65618
auggagaagaucgugcuucucuucgccauugucagccuuguuaaauccgaccagauaugcaucggcuaccacgcuaacaauucuaccgaacaaguggauacaauuauggagaagaacguaacugugacgcaugcacaggacauccuggaaaagacccacaaugggaaguugugugauuuagacggagucaaaccccugauucuaagagauugcucaguggccgguuggcuccugggcaacccuaugugugacgaguuuaucaauguuccagaauggaguuauauaguggagaaggcgaacccggucaaugaucuuugcuaccccggggacuucaacgauuaugaggaacugaagcauuugcucagcaggaucaaucacuuugagaaaauucagaucauuccuaaguccucuuggucgucacaugaagugagccugggaguaaguuccgcuuguccauaccagggcaaaucuagcuucuuucggaacguuguguggcugaucaagaaaaauuccacauaucccacuauaaagcgcucauacaacaauaccaaccaagaggaccucuuaguccugugggguauucaccacccuaaugaugccgcagagcagacaaagcuguaucagaacccaaccacuuacaucaguguggggacaagcaccuugaaccagcgacuggugccccguauugccacgagaucuaaagucaauggacaauccggcaggauggaguucuuuuggacuauccuaaagccuaacgacgcuaucaauuucgaaucaaacggcaauuuuauugcaccagaauacgccuauaaaauaguuaagaaaggggauagcaccaucaugaagagugagcucgaauacggaaacugcaauacaaaaugucagacuccgaugggugcuauuaacucuuccaugcccuuccauaauauccacccucugaccauaggcgagugcccaaaguaugugaaaagcaaccggcuuguacuggccacaggguugcgcaauucgccccagagagagaggcggcgcaaaaagcgaggacucuuuggcgcgauugcagguuucaucgaagggggauggcagggcaugguggacggcugguacggguaucaucacucuaacgagcaaggauccgguuacgccgcugccaaagaaucaacccagaaggcaaucgacggcgucacgaauaaagugaacaguauuaucgauaagaugaauacucaguuugaggcuguugggagagaguucaacaaccuggaaaggcggauugagaauuuaaacaagaaaauggaagacggauuccuggauguguggacauauaaugccgagcuccuuguccugauggaaaacgagcguaccuuggacuuucacgauagcaaugugaagaaccuauacgacaaaguacgccugcaacucaaggauaaugcgaaagaacugggcaacgguuguuucgaguuuuaccauaagugcgacaaugaguguauggaauccguuagaaacgggacuuaugauuacccucaguauucugaggaagccaggcuuaagcgggaggagauaagcggcgugaaacuggaaucaaucggaauuuaccagaucuugaguaucuauuccacagucgcaagcucucucgcucuggccauuaugguggcuggcuuaucacuguggaugugcaguaaugggagccuacagugccgaauauguaucuga

SEQ ID NO: 128075 - RNA, 1704 nt, Artificial Sequence
  derived and/or modified CDS sequence (opt3) from hemagglutinin__InfluenzaA__AAT38819
augaacacccagauccuggccuucauugcuugcaugcucauaggcacaaagggggacaaaaucugucuuggacaccaugcaguggccaaugguacuaaggucaacacgcugaccgagagaggcauugaaguugugaaugcgacagagacuguagaaaccgugaacaucaaaaagauuugcacacaagggaaaaggcccaccgauuugggacaguguggcuuacuggguacucuaaucgggccuccacagugcgaccaguuucucgaguucgaugcuaaucugauaaucgaacggcgcgagggaacagacgucuguuacccgggcaaguuuaccaacgaggaaagccuucgacaaauucugcguggcuccgggggaaucgauaaggagucuauggguuucacguauucaggcauuagaacuaauggggccaccagugcaugcaggcggagcggauccucuuuuuacgccgaaaugaaaugguugcucucgaacucagacaaugcugcauucccccagaugacaaagagcuaucgcaacccuagaaauaaaccagcccugaucauauggggcgugcaccauagugguuccgcuacugagcagaccaagcuguacgggucuggaaacaaacucauuacaguuggcagcuccaaguaucagcaaucauuuacccccaguccuggcgccaggccacaggugaaugggcagagcggacggaucgauuuccacugguuacugcuugaccccaacgauacggucacuuuuacauucaauggugcguuuauugcaccugaccgcgccucuuucuuucgaggcgaguccuugggggugcagucagauguaccacuggacagcggaugugaaggcgauugcuuccauaguggugggaccaucguuucuucccuaccguuccaaaacaucaaccccagaacugugggcaaguguccuagguacgucaaacagacaagccuccugcuugcuaccggaaugcggaaugugccagagaaccccaagcaggccuaucaaaaacagaugacgcguggccuguuuggggcaauugcuggauucauagaaaaugguugggagggcuugaucgacgggugguacggauuucgccaccagaacgcccagggcgaagguaccgcggccgacuacaagucgacacaaucugcaauugaucagaucacugggaaacucaauagacugauagacaagaccaaccagcaguucgaguuaauugauaaugaguuuuccgaaaucgagcaacagaucggcaacgugauuaauuggacaagggacucaaugacugaagucuggaguuauaacgcugagcugcucguugccauggaaaaucagcacaccaucgaucuugcugacagcgagaugaacaaacuguacgagcgggugcgaaagcaguugcgcgaaaaugccgaggaagauggaacaggcugcuucgagauuuuucauaagugugacgaucaaugcauggaauccauaagaaacaauaccuaugaccacacucaguacaggacggagucucuacagaaccggauccagauugauccuguaaaacugagcucaggguauaaggacaucauccucugguucaguuuuggagcauccugcuuccugcuucuggccauugcuauggguuugguguuuauauguaucaaaaacggcaauaugcgcugcacaauuuguaucuga

SEQ ID NO: 128076 - RNA, 1707 nt, Artificial Sequence
  derived and/or modified CDS sequence (opt3) from hemagglutinin__InfluenzaA__AAV32636
auggagaagaucgugcuccuguucgccauugucagccuuguuaaauccgaccagauaugcaucggcuaccacgcuaacaauucuaccgaacaaguggauacaauuauggagaagaacguaacugugacgcaugcacaggacauccuggaaaagacccacaaugggaaguugugugauuuagacggagucaaaccccugauucuaagagauugcucaguggccgguuggcuccugggcaacccuaugugugacgaguuuaucaauguuccagaauggaguuauauaguggagaaggcgaacccggucaaugaucuuugcuaccccggggacuucaacgauuaugaggaacugaagcauuugcucagcaggaucaaucacuuugagaaaauucagaucauuccuaaguccucuuggucgucacaugaagcuagccugggagugaguuccgccuguccauaccagggcaaaucuagcuucuuucggaacguaguuuggcugaucaagaaaaauuccacauaucccacuauaaagcgcucauacaacaauaccaaccaagaggaccucuuagugcugugggguauucaccacccuaaugaugcagccgagcagacaaaacuuuaucagaacccaaccacuuacaucagugucgggacaagcaccuugaaccagcgacuggugccccguauugcuacgagaucuaaagugaauggacaauccggcaggauggaguucuuuuggacuauccuaaagccuaacgacgcaaucaauuucgaaucaaacggcaauuuuauugccccagaauacgcuuauaaaauagucaagaaaggggauagcaccaucaugaagagugagcucgaauacggaaacugcaauacaaaaugucagacuccgaugggugccauuaacucuuccaugcccuuccauaauauccacccucugaccauaggcgagugcccaaaguauguuaagagcaaccggcuugugcuggcgacaggguugcgcaauucgccccagagagagaggcggcgcaaaaagcgaggacucuuuggcgcaauugccgguuucaucgaagggggauggcagggcaugguagacggcugguacggguaucaucacucuaacgagcaaggauccgguuacgcugccgacaaagaaucaacccagaaggcaaucgauggcgugacgaauaaagucaacaguauuaucgacaagaugaauacucaguuugaggcuguggggagagaguucaacaaccuggaaaggcggauugagaauuuaaacaagaaaauggaagauggauuccuggacguuuggacauauaaugccgagcuccuugugcugauggaaaacgagcguaccuuggauuuucacgacagcaaugucaagaaccuauacgauaaagugcgccugcaacucagagacaaugcgaaggaacugggcaacgguuguuucgaguuuuaccauaaaugcgauaaugaguguauggaauccguaaggaacgggacuuaugacuacccucaguauucugaggaagcccggcuuaagcgagaggagauaagcggcguuaagcuggaaucaaucggaauuuaccagaucuugaguaucuauuccacaguggcaagcucucucgcucuggccauuauggucgcuggcuuaucacuguggaugugcaguaaugggagccuacagugccgcauauguaucuga

SEQ ID NO: 128077 - RNA, 1707 nt, Artificial Sequence; identical to SEQ ID NO: 128076
  derived and/or modified CDS sequence (opt3) from hemagglutinin__InfluenzaA__AAV34704

SEQ ID NO: 128078 - RNA, 1707 nt, Artificial Sequence
  derived and/or modified CDS sequence (opt3) from hemagglutinin__InfluenzaA__AAV65826
auggagaagaucgugcuccuguucgccauugucagccuuguuaaauccgaccagauaugcaucggcuaccacgcuaacaauucuaccgaacaaguggauacaauuauggagaagaacguaacugugacgcaugcacaggacauccuggaaaagacccacaaugggaaguugugugauuuagacggagucaaaccccugauucuaagagauugcucaguggccgguuggcuccugggcaacccuaugugugacgaguuuaucaauguuccagaauggaguuauauaguggagaaggcgaacccggucaaugaucuuugcuaccccggggacuucaacgauuaugaggaacugaagcauuugcucagcaggaucaaucacuuugagaaaauucagaucauuccuaaguccucuuggucgucacaugaagcuagccugggagugaguuccgccuguccauaccagggcaaaucuagcuucuuucggaacguaguuuggcugaucaagaaaaauuccacauaucccacuauaaagcgcucauacaacaauaccaaccaagaggaccucuuagugcugggugggauucaccacccuaaugaugcagccgagcagacaaaacuuuaucagaacccaaccacuuacaucagugucggaacaagcaccuugaaccagcgacuggugccccguauugcuacgagaucuaaagugaauggccaauccggcaggauggaguucuuuuggacuauccuaaagccuaacgacgcaaucaauuucgaaucaaacgggaauuuuauugccccagaauacgcuuauaaaauagucaagaaaggagauagcaccaucaugaagagugagcucgaauacgguaacugcaauacaaaaugucagacuccgaugggcgccauuaacucuuccaugcccuuccauaauauccacccucugaccauaggggagugcccaaaguauguuaagagcaaccggcuugugcuggcgacaggauugcgcaauucgccccagagagagaggcggcgcaaaaagcgaggccucuuuggugcaauugccggguucaucgaaggaggcuggcagggcaugguagacgggugguacggauaucaucacucuaacgagcaagguuccggcuacgcugccgacaaagaaucaacccagaaggcaaucgauggggugacgaauaaagucaacaguauuaucgacaagaugaauacucaguuugaggcugugggaagagaguucaacaaccuggaaaggcggauugagaauuuaaacaagaaaauggaagauggcuuccuggacguuuggacauauaaugccgagcuccuugugcugauggaaaacgagcguaccuuggauuuucacgacagcaaugucaagaaccuauacgauaaagugcgccugcaacucagagacaaugcgaaggaacuggguaacggguguuucgaguuuuaccauaaaugcgauaaugaguguauggaauccguaaggaacggcacuuaugacuacccucaguauucugaggaagcccggcuuaagcgagaggagauaagcggaguuaagcuggaaucaaucggcauuuaccagaucuugaguaucuauuccacaguggcaagcucucucgcucuggccauuauggucgcuggguuaucacuguggaugugcaguaauggaagccuacagugccgcauauguaucuga

SEQ ID NO: 128079 - RNA, 1701 nt, Artificial Sequence
  derived and/or modified CDS sequence (opt3) from hemagglutinin__InfluenzaA__AAX11505
augaagaccaucauugcccugagcuacauacucugccuuguguucgcucagaaacugcccggcaacgacaauuccacagcaacuuuguguuuagggcaccaugccgucccuaacggaacgaucguuaagaccauuacaaaugaucaaaucgaggugacuaacgcgaccgaacugguacagucuucaaguacagguggcauuugcgacagcccacaccagauccuagauggggagaauuguacccucauagacgcucugcuuggagauccgcagugcgacggcuuucaaaacaaaaagugggaucuguucguggaaagauccaaagccuauucuaauuguuaccccuaugacgucccugauuacgcaucguugaggucacucguggccagcagugguacucuggaguuuaacaaugaauccuucaacuggacagggguuacccagaauggaacgucuagcgcuugcgagcggcgcuccaacaagucauuuuucagucgacugaauuggcucacucauuuaaaguauaaauacccagcacugaacgugaccaugcccaauaacgagaaguuugacaaacuuuauaucuggggcguccaccauccuggcacagauagcgaccagauuucuuuguacgcccaggcuuccgggcguaucacugugucaaccaagagaagccaacagacaguaauuccaaacaucggaaguaggccccggguucgcgaugugucuuccagaauaagcauuuacuggaccaucgucaaaccuggugacauucugcuaaucaauucgacgggcaaccucaucgccccaaggggguauuucaagauucggucuggaaaguccucaauaaugcgcagugacgcgccgaucggcaaauguaauagcgaaugcauuacucccaacgguuccaucccuaaugauaagccauuucagaacgugaaucgaauaacauacggggcaugucccagauaugugaaacagaacacccugaaacuugccacuggaaugaggaaugucccugagaaacaaacacggggcauuuucggcgcuaucgccggguuuaucgaaaacggaugggaggguaugguugacggcugguacggguuccgucaccagaauagcgagggaaccggccaggcagcugaucugaagucuacgcaagccgcgauuaaccagaucaaugguaaauugaaccgccucauugggaagaccaaugaaaaguuucaccagauagagaaagaguucucagaaguggaaggcagaauccaggaccuggagaaguauguagaggauacaaaaauugacuuauggaguuacaacgccgaacugcucguggcacuugagaaccaacauacuaucgaucugaccgacuccgaaaugaauaaguuguucgagaggacaaagaagcagcuacgggaaaacgcugaggauaugggaaauggcugcuuuaagaucuaucacaaaugugacaacgccugcauugggagcauacgaaauggaacuuacgaucaugacgucuaccgcgacgaggcucugaacaauagauuccagaucaaggguguggaacucaaaucuggcuauaaggauuggauucuguggaucucauuugccauuaguugcuuccuucuguguguugcauugcucggguuuaucaugugggccugccagaaaggaaacauaaggugugacaucugcauuuga

SEQ ID NO: 128080 - RNA, 1701 nt, Artificial Sequence
  derived and/or modified CDS sequence (opt3) from hemagglutinin__InfluenzaA__AAX11525
augaagaccaucauugcccugagcuacauacucugccuuguguucgcucagaaacugcccggcaacgacaauuccacagcaacuuuguguuuagggcaccaugccgucccuaacggaacgaucguuaagaccauuacaaaugaucaaaucgaggugacuaacgcgaccgaacugguacagucuucaaguacagguggcauuugcgacagcccacaccagauccuagauggggagaauuguacccucauagacgcucugcuuggagauccgcagugcgacggcuuucaaaacaaaaagugggaucuguucguggaaagauccaaagccuauucuaauuguuaccccuaugacgucccugauuacgcaucguugaggucacucguggccagcagugguacucuggaguuuaacaaugaauccuucgacuggacagggguuacccagaacggaacgucuagcgcuugcaagcggcgcuccaauaagucauuuuucagucgacugaacuggcucacucauuuaaaauauaaguacccagcacugaaugugaccaugcccaacaaugagaaauuugauaaacuuuauaucuggggcguccaccauccuggcacagacagcgaucagauuucuuuguacgcccaggcuuccgggcguaucacugugucaaccaagagaagccaacagacaguaauuccaaacaucggaaguaggccccggguucgcgacgugucuuccagaauaagcauuuacuggaccaucgucaagccuggugacauucugcuaaucaacucgacgggcaaucucaucgccccaaggggguauuucaagauucggucuggaaaauccucaauaaugcgcagugaugcgccgaucggcaaguguaacagcgagugcauuacucccaaugguuccaucccuaacgacaaaccauuucagaaugugaaccgaauaacauacggggcaugucccagauaugugaagcagaauacccugaaacuugccacuggaaugaggaacgucccugaaaagcaaacacggggcauuuucggcgcuaucgccggguuuaucgagaauggaugggaagguaugguugauggcugguacggguuccgucaccagaacucugagggaaccggccaggcagcugaccugaaaagcacgcaagccgcgauuaaucagaucaacgguaaguugaaucgccucauugggaagaccaacgagaaauuucaccagauagaaaaggaguucucagaaguggagggcagaauccaggaucuggaaaaauauguagaggacacaaagauugauuuauggaguuacaaugccgagcugcucguggcacuugaaaaccaacauacuaucgaccugaccgauuccgagaugaacaaauuguucgaaaggacaaagaagcagcuacgggagaaugcugaagacaugggaaacggcugcuuuaaaaucuaucacaagugugauaaugccugcauugggagcauacgaaacggaacuuacgaccaugacgucuaccgcgaugaggcucugaauaacagauuccagaucaaagguguggagcucaagucuggcuauaaagacuggauucuguggaucucauuugccauuaguugcuuccuucuguguguugcauugcucggguuuaucaugugggccugccagaagggaaauauaagguguaacaucugcauuuga

SEQ ID NO: 128081 - RNA, 1701 nt, Artificial Sequence; identical to SEQ ID NO: 128080
  derived and/or modified CDS sequence (opt3) from hemagglutinin__InfluenzaA__AAX11535

SEQ ID NO: 128082 - RNA, 1701 nt, Artificial Sequence; identical to SEQ ID NO: 128080
  derived and/or modified CDS sequence (opt3) from hemagglutinin__InfluenzaA__AAX11545

SEQ ID NO: 128083 - RNA, 1701 nt, Artificial Sequence; identical to SEQ ID NO: 128079
  derived and/or modified CDS sequence (opt3) from hemagglutinin__InfluenzaA__AAX11555

SEQ ID NO: 128084 - RNA, 1701 nt, Artificial Sequence; identical to SEQ ID NO: 128080
  derived and/or modified CDS sequence (opt3) from hemagglutinin__InfluenzaA__AAX11565

SEQ ID NO: 128085 - RNA, 1701 nt, Artificial Sequence
  derived and/or modified CDS sequence (opt3) from hemagglutinin__InfluenzaA__AAX11585
augaagaccaucauugcccugagcuacauacucugccuuguguucgcucagaaacugcccggcaacgacaauuccacagcaacuuuguguuuagggcaccaugccgucccuaacggaacgaucguuaagaccauuacaaaugaucaaaucgaggugacuaacgcgaccgaacugguacagauuucuucaacagguggcaucugcgacaguccacaccagauacuagauggggagaauuguacccucaucgacgcucugcuuggagauccgcagugcgacggcuuucaaaacaaaaagugggaucuguucguggaaagaagcaaagccuauuccaauuguuaccccuaugacgucccugauuacgcaucuuugaggucgcucguggccucaagcgguacucuggaguuuaacaaugaaaguuucgacuggacagggguuacccagaacggaacguccucugcuugcaagcggcgcagcaauaaguccuuuuucucacgacugaacuggcucacucauuuaaaauauaaguacccagcacugaaugugaccaugcccaacaaugagaaauuugauaaacuuuauauuuggggcguccaccauccuggcacagacaacgaucagaucaguuuguacgcccaggcuagcgggcguauuacugugucuaccaagagaucccaacagacaguaaucccaaacauaggaucaaggccccggguucgcgacgugagcagucagauuucuaucuacuggaccauugucaagccuggugacauccugcuaaucaauuccacgggcaaccucauugccccaagaggguauuucaagauaaggagcggaaaaucgucuaucaugcgguccgaugcgccgauuggcaaguguaauucagagugcaucacucccaacgguaguauaccuaaugacaaaccauuucagaacgugaaucgcauuacauacggggcauguccccgauaugugaagcaaaacacccugaaacuugccacuggaaugagaaaugucccugaaaagcagacaaggggcaucuucggcgcuaucgccggguuuauugagaacggaugggaagguaugguugauggcugguacggguuccggcaccagaauagcgagggaaccggccaagcagcugaccugaaauccacgcaggccgcgaucaaccagauuaaugguaaguugaaccgucucauagggaagaccaaugagaaauuucaccagaucgaaaaggaguucucugaaguggagggccgcauucaagaucuggaaaaauauguagaggacacaaagaucgauuuauggagcuacaacgccgagcugcucguggcacuugaaaaccagcauacuaucgaccugaccgauucagagaugaauaaauuguucgaaagaacaaagaagcagcuaagggagaacgcugaagacaugggaaauggcugcuuuaaaauuuaucacaagugugauaacgccugcauagggaguauccggaauggaacuuacgaccaugacgucuaccgagaugaggcucugaacaaucgcuuccagauuaaagguguggagcucaaguccggcuauaaagacuggauccuguggauuagcuuugccaucucuugcuuccuucuguguguugcauugcucggguuuauaaugugggccugccaaaagggaaacaucagauguaauauuugcaucuga

SEQ ID NO: 128086 - RNA, 1701 nt, Artificial Sequence; identical to SEQ ID NO: 128080
  derived and/or modified CDS sequence (opt3) from hemagglutinin__InfluenzaA__AAX11605

SEQ ID NO: 128087 - RNA, 1701 nt, Artificial Sequence; identical to SEQ ID NO: 128080
  derived and/or modified CDS sequence (opt3) from hemagglutinin__InfluenzaA__AAX11615

SEQ ID NO: 128088 - RNA, 1701 nt, Artificial Sequence
  derived and/or modified CDS sequence (opt3) from hemagglutinin__InfluenzaA__AAX11625
augaagaccaucauugcccugagcuacauacucugccuuguguucgcucagaaacugcccggcaacgacaauuccacagcaacuuuguguuuagggcaccaugccgucccuaacggaacgcugguuaagaccaucacaaaugaucaaauugaggugacuaacgcgaccgaacuuguacagucuucaaguacaagcagaaucugcgacuccccacaccagauucucgauggugagaauuguacccugaucgacgcucuacugggcgauccgcauugcgacggguuucagaacaaagaaugggauuuguucguggagaggucuaaggccuauucgaauuguuaccccuaugacgucccugauuacgugucacuccggagccugguugcaaguuccggaacucuggaauuuaacaaugagucuuucaacuggacaggcguggcccaaaaugguaccagcuccgcuugcaaacgccgaucagacaagagcuuuuucagucgucucaacugguuacaccagcugaaguauaaauacccagcacuuaaugucacgaugcccaacaaugagaaguuugauaaauuguauauauggggagugcaucacccugggacugacucugaucagaucucccuguacgcccaggcuucaggcagaguaaccguuagcacaaagaggagucaacagacugugauuccaaacaucggcucugggcccuggguccggggaguguccagccgcauuucgaucuacuggaccauagugaaaccuggugacauucuacucaucaacucuacaggcaaucugauugccccaagaggguauuucaagaucagguccggaaagucaaguaucaugcggagcgacgcgccgauuggcaaauguaacuccgaaugcauaacccccaaugguucuaucccuaacgauaagccauuucagaaugucaaccgcauuacguacggggcauguccccgauauguuaaacagaauacucuuaagcuggccacaggaaugagaaacgugccugagaaacaagcuaggggcaucuucggcgccauagcaggguuuauugaaaauggaugggaggguaugauggacggcugguacggguuccggcaccagaacagcgagggaaccggccaggcugccgauuugaagucaacucaagcggccaucaaucagaucaacgguaaacucaaucgucugauugaaaagacaaacgagaaguuucaucagaucgaaaaagaguucagugaaguagaggggcgcauucaggacuuagagaaguauguggaagauaccaaaauagaccugugguccuacaaugcagagcuccuugucgcucuggaaaaccaacacacgaucgauuugaccgacagcgagaugaacaagcuauucgaaagaacuaaaaagcagcugagggagaaugccgaggauaugggcaacggaugcuuuaagauuuaucauaaaugugacaaugcuugcaucggcucuauccggaacgggacauacgaucacgacguguaccgagacgaagcccucaauaaccgcuuccagauuaagggaguugagcugaaaucagguuauaaggauuggauacuuuggaucaguuuugcaauuagcugcuuccuguuguguaucgugcuccugggcuuuauuaugugggccugccagaaagggaauaucagauguaacauaugcaucuga

SEQ ID NO: 128089 - RNA, 1701 nt, Artificial Sequence; identical to SEQ ID NO: 128080
  derived and/or modified CDS sequence (opt3) from hemagglutinin__InfluenzaA__AAX12731

SEQ ID NO: 128090 - RNA, 1701 nt, Artificial Sequence
  derived and/or modified CDS sequence (opt3) from hemagglutinin__InfluenzaA__AAX12741
augaagaccaucauugcccugagcuacauacucugccuuguguucgcucagaaacugcccggcaacgacaauuccacagcaacuuuguguuuagggcaccaugccgucccuaacggaacgaucguuaagaccauuacaaaugaucaaaucgaggugacuaacgcgaccgaacugguacagucuucaaguacagguggcauuugcgacagcccacaccagauccuagauggggagaauuguacccucauagacgcucugcuuggagauccgcagugcgacggcuuucaaaacaaaaagugggaucuguucguggaaagauccaaagccuauucuaauuguuaccccuaugacgucccugauuacgcaucguugaggucacucguggccagcagugguacucuggaguuuaacaaugaauccuucgacuggacagggguuacccagaacggaacgucuagcgcuugcaagcggcgcuccaauaagucauuuuucagucgacugaacuggcucacucauuuaaaauauaaguacccagcacugaaugugaccaugcccaacaaugagaaauuugauaaacuuuauaucuggggcguccaccauccuggcacagacagcgaucagauuucuuuguacgcccaggcuuccgggcguaucacugugucaaccaagagaagccaacagacaguaauuccaaacaucggaaguaggccccggguucgcgacgugucuuccagaauaagcauuuacuggaccaucgucaagccuggugacauucugcuaaucaacucgacgggcaaucucaucgccccaaggggguauuucaagauucggucuggaaaauccucaauaaugcgcagugaugcgccgaucggcaaguguaacagcgagugcauuacucccaaugguuccaucccuaacgacaaaccauuucagaaugugaaccgaauaacauacggggcaugucccagauaugugaagcagaauacccugaaacuugccacuggaaugaggaacgucccugaaaagcaaacacggggcauuuucggcgcuaucgccggguuuaucgagaauggaugggaagguaugguugauggcugguacggguuccgucaccagaacucugagggaaccggccaggcagcugaccugaaaagcacgcaagccgcgauuaaucagaucaacgguaaguugaaucgccucauugggaagaccaacgagaaauuucaccagauagaaaaggaguucucagaaguggagggcagaauccaggaucuggaaaaauauguagaggacacaaagauugauuuauggaguuacaaugccgagcugcucguggcacuugaaaaccaacauacuaucgaccugaccgauuccgagaugaacaaauuguucgaaaggacaaagaagcagcuacgggagaaugcugaagacaugggaaacggcugcuuuaaaaucuaucacaagugugauaaugccugcauugggagcauacgaaacggaacuuacgaccaugacgucuaccgcgaugaggcucugaauaacagauuccagaucaaagguguggagcucaagucuggcuauaaagacuggauucuguggaucucauuugccaccaguugcuuccuucuguguguugcauugcucggguuuauuaugugggccugccagaagggaaauaucagguguaacauaugcaucuga

SEQ ID NO: 128091 - RNA, 1701 nt, Artificial Sequence; identical to SEQ ID NO: 128080
  derived and/or modified CDS sequence (opt3) from hemagglutinin__InfluenzaA__AAX12751

SEQ ID NO: 128092 - RNA, 1701 nt, Artificial Sequence
  derived and/or modified CDS sequence (opt3) from hemagglutinin__InfluenzaA__AAX12761
augaagaccaucauugcccugagcuacauacucugccuuguguucgcucagaaacugcccggcaacgacaauuccacagcaacuuuguguuuagggcaccaugccgucccuaacggaacgcugguuaagaccaucacaaaugaucaaauugaggugacuaacgcgaccgaauugguacagucuucaaguacagguagaaucugcgacagcccacaccagauucucgauggcgagaauuguacccugaucgacgcccuucugggggauccgcauugcgacggauuucagaacaaagaaugggauuuguucguggagagguccaaggcuuauucuaauuguuaccccuaugacgucccugauuacgugucgcuccggucacugguugcaagcaguggcacucuggaauuuaacaaugaguccuucaacuggacagguguggcccaaaaugggaccucuagcgcuugcaaacgccgauccgacaagucauuuuucagucgucucaacugguuacaccagcugaaguauaaauacccagcacuuaaugucacgaugcccaacaaugagaaguuugauaaauuguauauauggggagugcaucacccuggcacugacagcgaucagaucucucuguacgcccaggcuuccggcagaguaaccguuucaacaaagaggagccaacagacugugauuccaaacaucgggagucggcccuggguccgcggagugucuuccagaauuagcaucuacuggaccauagugaaaccuggugacauucuacucaucaacucgacaggcaaucugauugccccaaggggguauuucaagauccggucuggaaaguccucaaucaugcgcagugacgcgccgauuggcaaauguaacagcgaaugcauaacccccaaugguuccaucccuaacgauaagccauuucagaaugucaaccgaauuacguacgggcccuguccuagauauguuaaacagaauacucuuaagcuggcaacaggaaugaggaacgugccagagaaacaaacccggggcaucuucggcgccauagcuggguuuauugaaaauggaugggaggguaugauggacggcugguacggguuccgucaccagaacucugagggaacuggccaggccgcagaucuaaagagcacacaagcugccaucaaucagaucaacgguaaacucaaucgccugauugaaaagaccaacgagaaguuucaucagaucgaaaaagaguucucagaaguagaggggaggauucaggacuuagagaaguauguggaagauacgaaaauagaccuguggaguuacaaugcggagcuccuugucgcccuggaaaaccaacacaccaucgauuugacagacuccgagaugaacaagcuauucgaaagaacuaaaaagcagcugcgggagaaugcagaggauaugggcaacggaugcuuuaagauuuaucauaaaugugacaaugugugcaucggcagcauccgaaacgggaccuacgaucacgacguuuaccgcgacgaagcucucaauaacagauuccagauuaagggaguggagcugaaaucugguuauaaggauuggauacuuuggaucucauuugccauuaguugcuuccuguuguguaucguccuccugggcuuuauuaugugggcuugccagaaagggaauaucagguguaacauaugcaucuga

SEQ ID NO: 128093 - RNA, 1701 nt, Artificial Sequence
  derived and/or modified CDS sequence (opt3) from hemagglutinin__InfluenzaA__AAX12791
augaagaccaucauugcccugagcuacauacucugccuuguguucgcucagaaacugcccggcaacgacaauuccauggcaacauuguguuuagggcaccaugccgucccuaacggaacucugguuaagacgaucaccaaugaucaaauugaggugacaaacgcgacugaacuuguacagucuucaaguaccgguagaaucugcgacagcccacaccagauucucgauggcgagaauuguacacugaucgacgcucuacugggggauccgcauugcgacggauuucagaacaaagaaugggauuuguucguggagagguccaaggccuauucuaauuguuaccccuaugacgucccugauuacgugucgcuccggucacugguugcaagcaguggcacccuggaauuuaacaaugaguccuucaacuggacugguguggcccaaaaugggacaucuagcgcuugcaaacgccgauccgacaagucauuuuucagucgucucaacugguuacaccagcugaaguauaaauacccagcacuuaaugucaccaugcccaacaaugagaaguuugauaaauuguauauauggggagugcaucacccuggcacggacagcgaucagaucucucuguacgcccaggcuuccggcagaguaacuguuucaaccaagaggagccaacagacagugauuccaaacaucgggaguggacccuggguccggggugugucuucccgcauuagcaucuacuggacuauagugaaaccuggcgacauucuacucaucaacucgaccgggaaucugauugccccaagaggauauuucaagaucaggucuggcaaguccucaaucaugcggagugacgcgccgauugauaaauguaacagcgaaugcauaacacccaaugguuccaucccuaacgacaagccauuucagaaugucaaccgcauuaccuacgggcuuuguccccgauauguuaaacagaauacgcugaaguuggcaacuggaaugagaaacgugccugagaaacaaacaaggggcaucuucggcgccauagcuggguuuauugaaaauggaugggaggguaugauggauggcugguacggguuccggcaccagaacucugagggaaccggccaggccgcagaccucaagagcacucaagcugccaucaaucagaucaacgguaaacugaaucguuuaauugaaaagacaaacgagaaguuucaucagaucgaaaaagaguucucagaaguagaggggcgcauucaggaucuggagaaguauguggaagacaccaaaauagaucucuggaguuacaaugcggagcuucuggucgccuuggaaaaccaacacacgaucgaccuaaccgauuccgagaugaacaagcuguucgaaagaacuaaaaagcagcucagggagaaugcagaggacaugggcaacggaugcuuuaagauuuaucauaaaugugauaaugcuugcaucggcagcauccggaacgggacauacgaccacgacguguaccgagaugaagcccugaauaaccgcuuccagauuaagggaguugagcuuaaaucugguuauaaggacuggauacuguggaucucauuugcuauuaguugcuucuugcucuguaucgugcuguuaggcuuuauuaugugggccugccagaaagggaauaucagauguaacauaugcaucuga

SEQ ID NO: 128094 - RNA, 1701 nt, Artificial Sequence
  derived and/or modified CDS sequence (opt3) from hemagglutinin__InfluenzaA__AAX12801
augaagaccaucauugcccugagcuacauacucugccuuguguucgcucagaaauuucccggcaacgacaauuccacagcaacucuguguuuggggcaccaugccgucccuaacggaacguuaguuaagaccaucacaaaugaucaaauugaggugacuaacgcgaccgaacugguacagucuucaaguacagacagaaucugcgauagcccacaccagauucuagacggugagaauuguacccucaucgaugcucugcuuggcgacccgcauugcgauggguuccagaacaaagaaugggaccuguuuguggagagguccaaggccuauucuaauuguuaccccuaugaugucccugacuacgugucguugcggucacucguugcaagcaguggaacucuggaguucaacaaugaauccuuuaacuggacaggcguggcccaaaaugguaccucuagcgcuugcaaacgccgauccgauaagucauucuuuagucgucugaacuggcuccaccaguuaaaguauaaauacccagcacugaaugucacgaugcccaacaaugagaaguucgacaaacuuuauauauggggagugcaucacccugggacugauagcgaccagaucucuuuguacgcccaggcuuccggcagaguaaccguuucaacaaagaggagccaacagacugugauuccaaacaucggcagucggcccuggguccgcggggugucuuccagaauuagcaucuacuggaccauagugaaaccuggagacauucugcuaaucaacucgacagguaaucucauugccccaaggggcuauuuuaagauccggucugggaaguccucaaucaugcgcagugaugcgccgauuggaaaauguaacagcgaaugcauaacccccaauggcuccaucccuaacgacaagccauuccagaaugucaaccgaauuacguacggugcaugucccagauauguuaaacagaauacucugaagcuggccacagggaugaggaacgugccugagaaacaaacccggggaaucuuuggcgcuauagccggcuucauugaaaaugggugggagggaaugauggaugguugguacggcuuucgucaccagaacucugaggggacuggacaggcagcugaccuuaagagcacacaagccgcgaucaaucagaucaacggcaaauugaaucgccucauugaaaagaccaacgagaaguuccaucagaucgaaaaagaguucucagaaguagaggguaggauucaggaucuggagaaguauguggaagacacgaaaauagauuuauggaguuacaaugccgagcugcucgucgcacuugaaaaccaacacaccaucgaccugacagauuccgagaugaacaaguuguuugaaagaacuaaaaagcagcuacgggagaaugcugaggacauggggaacggcugcuucaagauuuaucauaaaugugauaaugccugcaucggaagcauccgaaacggcaccuacgaccacgacguguaccgcgaugaagcucugaauaacagauuucagauuaaggggguugagcucaaaucuggauauaaggacuggauacuguggaucucauucgccauuaguugcuuucuucuguguaucguguugcucgguuucauuaugugggcaugccagaaaggcaauaucagguguaacauaugcaucuga

SEQ ID NO: 128095 - RNA, 1701 nt, Artificial Sequence
  derived and/or modified CDS sequence (opt3) from hemagglutinin__InfluenzaA__AAX12811
augaagaccaucauugcccugagcuacauacucugccuuguguucgcucagaaacugcccggcaacgacaauuccacagcaacuuuguguuuagggcaccaugccgucccuaacggaacgcugguuaagaccaucacaaaugaucaaauugaggugacuaacgcgaccgaacuuguacagucuucaaguacaagcagaaucugcgacuccccacaccagauucucgauggugagaauuguacccugaucgacgcucuacugggcgauccgcauugcgacggguuucagaacaaagaaugggauuuguucguggagaggucuaaggccuauucgaauuguuaccccuaugacgucccugauuacgugucacuccggagccugguugcaaguuccggaacucuggaauuuaacaaugagucuuucaacuggacaggcguggcccaaaaugguaccagcuccgcuugcaaacgccgaucagacaagagcuuuuucagucgucucaacugguuacaccagcugaaguauaaauacccagcacuuaaugucacgaugcccaacaaugagaaguuugauaaauuguauauauggggagugcaucacccugggacugacucugaucagaucucccuguacgcccaggcuucaggcagaguaaccguuagcacaaagaggagucaacagacugugauuccaaacaucggcucucggcccuggguccgcgggguguccagcagaauuucgaucuacuggaccauagugaaaccuggagacauucuacucaucaacucuacagguaaucugauugccccaaggggcuauuucaagauccgguccgggaagucaaguaucaugcgcagcgacgcgccgauuggaaaauguaacuccgaaugcauaacccccaauggcucuaucccuaacgauaagccauuucagaaugucaaccgaauuacguacggugcaugucccagauauguuaaacagaauacucuuaagcuggccacagggaugaggaacgugccugagaaacaaacccggggaaucuucggcgcuauagccggcuuuauugaaaaugggugggagggaaugauggacgguugguacggcuuccgucaccagaacagcgaggggacuggacaggcagcugauuugaagucaacacaagccgcgaucaaucagaucaacggcaaacucaaucgccugauugaaaagaccaacgagaaguuucaucagaucgaaaaagaguucagugaaguagaggguaggauucaggacuuagagaaguauguggaagauacgaaaauagaccugugguccuacaaugccgagcuccuugucgcacuggaaaaccaacacaccaucgauuugacagacagcgagaugaacaagcuauucgaaagaacuaaaaagcagcugcgggagaaugcugaggauauggggaacggcugcuuuaagauuuaucauaaaugugacaaugccugcaucggaucuauccgaaacggcaccuacgaucacgacguguaccgcgacgaagcucucaauaacagauuccagauuaaggggguugagcugaaaucaggauauaaggauuggauacuuuggaucaguuuugccauuagcugcuuccuguuguguaucgugcuccuggguuuuauuaugugggcaugccagaaaggcaauaucagguguaacauaugcaucuga

SEQ ID NO: 128096 - RNA, 1701 nt, Artificial Sequence
  derived and/or modified CDS sequence (opt3) from hemagglutinin__InfluenzaA__AAX34061
augaagaccaucauugcccugagcuacauacucugccuuguguucgcucagaaacugcccggcaacgacaauuccacagcaacuuuguguuuagggcaccaugccgucccuaacggaacgaucguuaagaccauuacaaaugaucaaaucgaggugacuaacgcgaccgaacugguacagucuucaaguacaggugagauuugcgacagcccacaccagauccuagauggcgaaaauuguacccucauagacgcucugcuuggggauccgcagugcgacggauuucaaaacaaaaagugggaucuguucguggagagauccaaagccuauucuaauuguuaccccuaugacgucccugauuacgcaucguugaggucacucguggccagcaguggcacucuggaauuuaacaaugaguccuucgacuggacagguguuacccagaacgggacgucuagcgcuugcaagcggcgcuccaauaagucauuuuucagucgacugaacuggcucacucauuuaaaauauaaguacccagcacugaaugugaccaugcccaacaaugagaaauuugauaaacuuuauaucuggggaguccaccauccuggcacagacagcgaucagauuucuuuguacgcccaggcuuccggccguaucacugugucaaccaagagaagccaacagacaguaauuccaaacaucgggaguaggccccggguucgcgacgugucuuccagaauaagcauuuacuggaccaucgucaagccuggagacauucugcuaaucaacucgacggguaaucucaucgccccaaggggcuauuucaagauucggucugggaaauccucaauaaugcgcagugaugcgccgaucggaaaguguaacagcgaaugcauuacucccaauggcuccaucccuaacgacaaaccauuucagaaugugaaccgaauaacauacggugcaugucccagauauauuaagcagaauacccugaaacuugccacugggaugaggaacgugccugagaagcaaacacggggaaucuucggcgcuaucgccggcuuuauugaaaaugggugggagggaauggucgaugguugguacggcuuccgucaccagaacucugaggggaccggacaggcagcugaccugaaaagcacgcaagccgcgaucaaucagauuaacggcaaguugaaucgccucauagguaagaccaacgaaaaauuucaccagaucgagaaggaguucucagaaguugaagggaggauucaggaucuggagaaauauguggaggacacaaagaucgauuuauggaguuacaaugccgaacugcucguagcacuugagaaccaacauacuaucgaccugaccgauuccgaaaugaacaaauuguucgagagaacaaagaagcagcuacgggaaaaugcugaggacaugggcaacggaugcuuuaaaauuuaucacaagugugauaaugccugcauaggcagcauccgaaacgggacuuacgaccaugacguguaccgcgaugaggcucugaauaacagauuccagauuaaaggagucgaacucaagucugguuauaaagacuggauccuguggauuucauuugccaucaguugcuuccuucuguguguggcauugcucggcuuuauaaugugggccugccagaaggggaauaucagguguaacauuugcaucuga

SEQ ID NO: 128097 - RNA, 1701 nt, Artificial Sequence
  derived and/or modified CDS sequence (opt3) from hemagglutinin__InfluenzaA__AAX35821
augaagaccaucauugcccugagcuacauacucugccuuguguucgcucagaaacugcccggcaacgacaauuccacagcaacuuuguguuuagggcaccaugccgucccuaacggaacgaucguuaagaccauuacaaaugaucaaaucgaggugacuaacgcgaccgaacugguacagucuucaaguacagguggcauuugcgacagcccacaccagauccuagauggggagaauuguacccucauagacgcucugcuuggagauccgcagugcgacggcuuucaaaacaaaaagugggaucuguucguggaaagauccaaagccuauucuaauuguuaccccuaugacgucccugauuacgcaucguugaggucacucguggccagcagugguacucuggaguuuaacaaugaauccuucaacuggacagggguuacccagaauggaacgucuagcgcuugcaagcggaaguccaacaaaucauuuuucagucgccugaauuggcucacucauuuaaaguauaaauacccagcacugaacgugaccaugcccaauaacgagaaguuugacaaacuuuauaucuggggcguccaccauccuggcacagauaacgaccagauuagcuuguacgcccaggcuucugggcgaaucacuguguccaccaagcguucacaacagacaguaauuccaaauaucggaagcagacccaggguucgggaugugaguucucgcauauccauuuacuggaccaucgucaagccuggugacauucugcuaaucaacagcacgggcaaucucaucgccccaagaggguauuucaaaauuaggucgggaaagucuuccauaaugcggucagacgcgccgaucggcaaauguaacagugagugcauuacucccaaugguagcaucccuaacgauaagccauuucagaaugugaaccgcauaacauacggggcauguccccgauaugugaaacagaauacccugaaacuugccacuggaaugagaaacgucccugaaaggcaaacacggggcauuuucggcgcuaucgccggguuuaucgagaauggaugggaagguaugguugacggcugguacggguuccgucaccagaacuccgagggaaccggccaggcagcugaucugaagucuacgcaagccgcgauuaaucagaucaacgguaaguugaaucgccucauugggaagaccaacgagaaauuucaccagauagaaaaggaguucagcgaaguggagggcagaauccaggaccuggaaaaauauguagaggauacaaagauugacuuauggucauacaacgccgagcugcucguggcacuugaaaaucaacauacuaucgaucugaccgacagugagaugaacaaauuguucgaaaggacaaagaagcagcuacgggagaaugcugaagauaugggaaacggcugcuuuaaaaucuaucacaagugugacaaugccugcauuggguccauacgaaacggaacuuacgaucaugacgucuaccgcgacgaggcucugaauaacagauuccagaucaaagguguggagcucaagagcggcuauaaagauuggauucuguggaucucuuuugccauuucaugcuuccuucuguguguugcauugcucggguuuaucaugugggccugccagaagggaaauauaagguguaacaucugcauuuga

SEQ ID NO: 128098 - RNA, 1701 nt, Artificial Sequence; identical to SEQ ID NO: 128079
  derived and/or modified CDS sequence (opt3) from hemagglutinin__InfluenzaA__AAX35831

SEQ ID NO: 128099 - RNA, 1701 nt, Artificial Sequence
  derived and/or modified CDS sequence (opt3) from hemagglutinin__InfluenzaA__AAX35851
augaagaccaucauugcccugagcuacauacucugccuuguguucgcucagaaacugcccggcaacgacaauuccacagcaacuuuguguuuagggcaccaugccgucccuaacggaacgcugguuaagaccaucacaaaugaucaaauugaggugacuaacgcgaccgaauugguacagucuucaaguacagguagaaucugcgacagcccacaccagauucucgauggcgagaauuguacccugaucgacgcccuucugggggauccgcauugcgacggauuucagaacaaagaaugggauuuguucguggagagguccaaggcuuauucuaauuguuaccccuaugacgucccugauuacgugucgcuccggucacugguugcaagcaguggcacucuggaauuuaacaaugaguccuucaacuggacagguguggcccaaaaugggaccucuagcgcuugcaaacgccgauccgacaagucauuuuucagucgucucaacugguuacaccagcugaaguauaaauacccagcacuuaaugucacgaugcccaacaaugagaaguuugauaaauuguauauauggggagugcaucacccuggcacugacagcgaucagaucucucuguacgcccaggcuuccggcagaguaaccguuucaacaaagaggagccaacagacugugauuccaaacaucgggagucggcccuggguccgcggagugucuuccagaauuagcaucuacuggaccauagugaaaccuggugacauucuacucaucaacucgacaggcaaucugauugccccaaggggguauuucaagauccggucuggaaaguccucaaucaugcgcagugacgcgccgauuggcaaauguaacagcgaaugcauaacccccaaugguuccaucccuaacgauaagccauuucagaaugucaaccgaauuacguacgggcccuguccuagauauguuaaacagaauacucuuaagcuggcaacaggaaugaggaacgugccagagaaacaaacccggggcaucuucggcgccauagcuggguuuauugaaaauggaugggaggguaugauggacggcugguacggguuccgucaccagaacucugagggaacuggccaggccgcagaucuaaagagcacacaagcugccaucaaucagaucaacgguaaacucaaucgccugauugaaaagaccaacgagaaguuucaucagaucgaaaaagaguucucagaaguagaggggaggauucaggacuuagagaaguauguggaagauacgaaaauagaccuguggaguuacaaugcggagcuccuugucgcccuggaaaaccaacacaccaucgauuugacagacuccgagaugaacaagcuauucgaaagaacuaaaaagcagcugcgggagaaugcagaggauaugggcaacggaugcuuuaagauuuaucauaaaugugacaaugcuugcaucggcagcauccgaaacgggaccuacgaucacgacguguaccgcgacgaagcccucaauaacagauuccagauuaagggaguugagcugaaaucugguuauaaggauuggauacuuuggaucucauuugcuauuaguugcuuccuguuguguaucgugcuccugggcuuuauuaugugggccugccagaaagggaauaucagguguaacauaugcaucuga

SEQ ID NO: 128100 - RNA, 1701 nt, Artificial Sequence
  derived and/or modified CDS sequence (opt3) from hemagglutinin__InfluenzaA__AAX35861
augaagaccaucauugcccugagcuacauacucugccuuguguucgcucagaaacugcccggcaacgacaauuccacagcaacuuuguguuuagggcaccaugccgucccuaacggaacgcugguuaagaccaucacaaaugaucaaauugaggugacuaacgcgaccgaacuuguacagucuucaaguacaagcagaaucugcgacuccccacaccagauucucgauggugagaauuguacccugaucgacgcucuacugggcgauccgcauugcgacggguuucagaacaaagaaugggauuuguucguggagaggucuaaggccuauucgaauuguuaccccuaugacgucccugauuacgugucacuccggagccugguugcaaguuccggaacucuggaauuuaacaaugagucuuucaacuggacaggcguggcccaaaaugguaccagcuccgcuugcaaacgccgaucagacaagagcuuuuucagucgucucaacugguuacaccagcugaaguauaaauacccagcacuuaaugucacgaugcccaacaaugagaaguuugauaaauuguauauauggggagugcaucacccugggacugacucugaucagaucucccuguacgcccaggcuucaggcagaauuaccguaagcacaaagaggagucaacagacuguuaucccaaacauuggcucugggcccugggugcggggagucuccagccgcaucucgauauacuggaccauugugaaaccuggugacauccuacucauuaacucuacaggcaaucugaucgccccaagaggguauuucaagaucagguccggaaagucaaguauuaugcggagcgacgcgccgauaggcaaauguaacuccgaaugcaucacccccaaugguucuauuccuaacgauaagccauuucagaaugugaaccgcaucacguacggggcauguccccgauaugucaaacagaauacucuuaagcuggccacaggaaugagaaacguuccugagaaacaaaccaggggcauauucggcgcuauugccggguuuaucgaaaauggaugggaggguaugauggacggcugguacggguuccggcaccagaacagcgagggaacuggccaggcagcugauuugaagucaacacaagccgcgaucaaucagauuaacgguaaacucaaucgucugaucgaaaagaccaacgagaaguuucaucagauugaaaaagaguucagugaaguggaggggcgcauacaggacuuagagaaguauguagaagauacgaaaaucgaccugugguccuacaaugccgagcuccuuguggcacuggaaaaccaacacaccauugauuugacagacagcgagaugaacaagcuauucgaaagaacuaaaaagcagcugagggagaaugcugaggauaugggcaacggaugcuuuaagaucuaucauaaaugugacaaugccugcaucggcucuauucggaacgggaccuacgaucacgacgucuaccgagacgaagcucucaauaaccgcuuccagauaaagggaguggagcugaaaucagguuauaaggauuggauccuuuggauuaguuuugccaucagcugcuuccuguuguguauuguucuccugggcuuuaucaugugggcaugccagaaagggaauauaagauguaacaucugcauuuga

SEQ ID NO: 128101 - RNA, 1701 nt, Artificial Sequence
  derived and/or modified CDS sequence (opt3) from hemagglutinin__InfluenzaA__AAX35871
augaagaccaucauugcccugagcuacauacucugccuuguguucgcucagaaacugcccggcaacgacaauuccacagcaacuuuguguuuagggcaccaugccgucccuaacggaacgcugguuaagaccaucacaaaugaucaaauugaggugacuaacgcgaccgaauugguacagucuucaagugcuagcagaaucugcgacuccccacaccagauucucgauggugagaauuguacacugaucgacgcccuucugggcgauccgcauugcgacggguuucagaacaaagaaugggauuuguucguggagaggucuaaggcauauucgaauuguuaccccuaugacgucccugauuacgugucacuccggagccugguugccaguuccggaacccuggaauuuaacaaugagucuuucaacuggacuggcguggcucaaaaugguaccagcuuugcaugcaaacgccgauccgacaagucauucuuuagucgucucaacugguuacaccagcugaaguauaaauacccagcccuuaaugucacaaugcccaacaaugagaaguucgauaaauuguauauauggggagugcaucacccugggacggacagcgaucagaucucucuguacgcucaggccuccggcagaguaacuguuucaaccaagaggagccaacagacagugauuccaaacaucggcagugggcccuggguccggggagugucuucccgcauuagcaucuacuggacuauagugaaaccuggugacauucuacucaucaacucgaccggcaaucugauugcgccaagaggguauuuuaagaucaggucuggaaaguccucaaucaugcggagugacgcaccgauuggcaaauguaacagcgaaugcauaacacccaaugguuccaucccuaacgauaagccauuccagaaugucaaccgcauuaccuacggggccuguccccgauauguuaaacagaauacgcuuaagcuggcuacuggaaugagaaacgugccugagaaacaaacaaggggcaucuuuggcgccauagcaggguucauugaaaauggaugggaggguaugauggacggcugguacggguuucggcaccagaacucugagggaaccggccaggcugccgaucuaaagagcacucaagcggccaucaaucagaucaacgguaaacucaaucgucugauugaaaagacaaacgagaaguuccaucagaucgaaaaagaguucucagaaguagaggggcgcauucaggacuuagagaaguauguggaagauaccaaaauagaccuguggaguuacaaugcagagcuccuugucgcucuggaaaaccaacacacgaucgauuugaccgacuccgagaugaacaagcuauuugaaagaacuaaaaagcagcugagggagaaugccgaggauaugggcaacggaugcuucaagauuuaucauaaaugugacaaugcuugcaucggcagcauccggaacgggacauacgaucacgacguguaccgagacgaagcccucaauaaccgcuuucagauuaagggaguugagcugaaaucugguuauaaggauuggauacuuuggaucucauucgcaauuaguugcuuucuguuguguaucgugcuccugggcuucauuaugugggccugccagaaagggaauaucagauguaacauaugcaucuga

SEQ ID NO: 128102 - RNA, 1701 nt, Artificial Sequence; identical to SEQ ID NO: 128095
  derived and/or modified CDS sequence (opt3) from hemagglutinin__InfluenzaA__AAX38237

SEQ ID NO: 128103 - RNA, 1701 nt, Artificial Sequence
  derived and/or modified CDS sequence (opt3) from hemagglutinin__InfluenzaA__AAX47515
augaaggccaucauugcucugagcuacauacucugccuuguguucgcacagaaacugcccggcaacgacaauuccaccgccacauuguguuuagggcaccaugcggucccuaacggaacucugguuaagacgaucaccaaugaucaaauugaggugacaaacgcuacugaauugguacagucuucaaguaccgguagaaucugcgacagcccacaccagauucucgauggcgagaauuguacacugaucgacgcccuucugggggauccgcauugcgacggauuucagaacaaagaaugggauuuguucguggagagguccaaggcauauucuaauuguuaccccuaugacgucccugauuacgugucgcuccggucacugguugccagcaguggcacccuggaauuuaacaaugaguccuucaacuggacugguguggcucaaaaugggacaucuagcgcaugcaaacgccgauccgacaagucauuuuucagucgucucaacugguuacaccagcugaaguauaaauacccagcccuuaaugucaccaugcccaacaaugagaaguuugauaaauuguauauauggggagugcaucacccuggcacggacagcgaucagaucucucuguacgcucaggccuccggcagaguaacuguuucaaccaagaggagccaacagacagugauuccaaacaucgggagucggcccuggguccgcggagugucuuccagaauuagcaucuacuggacuauagugaaaccuggugacauucuacucaucaacucgaccggcaaucugauugcgccaaggggguauuucaagauccggucuggaaaguccucaaucaugcgcagugacgcaccgauuggcaaauguaacagcgaaugcauaacacccaaugguuccaucccuaacgauaagccauuucagaaugucaaccgaauuaccuacggggccugucccagauauguuaaacagaauacgcuuaagcuggcuacuggaaugaggaacgugccugagaaacaaacacggggcaucuucggcgccauagcaggguuuauugaaaauggaugggaggguaugauggacggcugguacggguuccgucaccagaacucugagggaaccggccaggcugccgaucuaaagagcacucaagcggccaucaaucagaucaacgguaaacucaaucgccugauugaaaagacaaacgagaaguuucaucagaucgaaaaagaguucucagaaguagaggggaggauucaggacuuagagaaguauguggaagauaccaaaauagaccuguggaguuacaaugcagagcuccuugucgcucuggaaaaccaacacacgaucgauuugaccgacuccgagaugaacaagcuauucgaaagaacuaaaaagcagcugcgggagaaugccgaggauaugggcaacggaugcuuuaagauuuaucauaaaugugacaaugcuugcaucggcagcauccgaaacgggacauacgaucacgacguguaccgcgacgaagcccucaauaacagauuccagauuaagggaguugagcugaaaucugguuauaaggauuggauacuuuggaucucauuugcaauuaguugcuuccuguuguguaucgugcuccugggcuuuauuaugugggccugccagaaagggaauaucagguguaacauaugcaucuga

SEQ ID NO: 128104 - RNA, 1701 nt, Artificial Sequence
  derived and/or modified CDS sequence (opt3) from hemagglutinin__InfluenzaA__AAX47525
augaagaccaucauugcccugagcuacauacucugccuuguguucgcucagaaacugcccggcaacgacaauuccacagcaacuuuguguauggggcaccaugccgucccuaacggaacguuaguuaagaccaucacaaaugaucaaauugaggugacuaacgcgaccgaacugguacagucuucaaguacagguagaaucugcgacagcccacaccagauucuagauggcgagaauuguacccucaucgacgcucugcuuggggauccgcauugcgacggauuucagaacaaagaaugggaucuguucguggagagguccaaggccuauucuaauuguuaccccuaugacgucccugauuacgugucguugcggucacucguugcaagcaguggcacucuggaauuuaacaaugaguccuucaacuggacagguguggcccaaaaugggaccucuagcgcuugcaaacgccgauccaacaagucauuuuucagucgucugaauuggcuccaccaguuaaaguauaaauacccagcacugaacgucacgaugcccaauaacgagaaguuugacaaacuuuauauauggggagugcaucacccugauacugacagcaaccagaucucuuuguacgcccaggcuuccggcagaguaaccguuucaacaaagaggagccaacagacugugauuccaaauaucggcagugggcccuggguccggggagugucuucccgcauuagcaucuacuggaccauagugaaaccuggugauauucugcuaaucaacucgacaggcaaucucauugccccaagaggguauuucaagaucaggucuggaaaguccucaaucaugcggagugacgcgccgauuggcaaauguaacagcgaaugcauaacccccaaugguuccaucccuaacgacaagccauuucagaaugucaaccgcauuacguacggggcauguccccgauauguuaaacagaauacucugaagcuggccacaggaaugagaaacgugccugagaaacaaaccaggggcaucuucggcgcuauagccggguuuauugaaaauggaugggaggguaugauggauggcugguacggguuccggcaccagaacucugagggaacuggccaggcagcugaccuuaagagcacacaagccgcgaucaaucagaucaacgguaaauugaaucgucucauugaaaagaccaacgagaaguuucaucagaucgaaaaagaguucucagaaguagaggggcgcauucaggaucuggagaaguauguggaagacacgaaaauagauuuauggaguuacaacgccgagcugcucgucgcacuugaaaaucaacacaccaucgaccugacagauuccgagaugaacaaguuguucgaaagaacuaaaaagcagcuaagggagaaugcugaggacaugggcaacggaugcuuuaagauuuaucauaaaugugauaaugccugcaucggcagcauccggaacgggaccuacgaccacgauguguaccgagacgaagcucugaauaaccgcuuccagauuaagggaguugagcucaaaucugguuauaaggacuggauacuguggaucucauuugccauuaguugcuuccuucuguguaucguguugcucggcuuuauuaugugggcaugccagaaagggaauaucagauguaacauaugcaucuga

SEQ ID NO: 128105 - RNA, 1701 nt, Artificial Sequence; identical to SEQ ID NO: 128095
  derived and/or modified CDS sequence (opt3) from hemagglutinin__InfluenzaA__AAX47535

SEQ ID NO: 128106 - RNA, 1701 nt, Artificial Sequence; identical to SEQ ID NO: 128079
  derived and/or modified CDS sequence (opt3) from hemagglutinin__InfluenzaA__AAX56380

SEQ ID NO: 128107 - RNA, 1701 nt, Artificial Sequence; identical to SEQ ID NO: 128079
  derived and/or modified CDS sequence (opt3) from hemagglutinin__InfluenzaA__AAX56390

SEQ ID NO: 128108 - RNA, 1701 nt, Artificial Sequence
  derived and/or modified CDS sequence (opt3) from hemagglutinin__InfluenzaA__AAX56400
augaagaccaucauugcccugagcuacauacucugccuuguguucgcucagaaacugcccggcaacgacaauuccacagcaacuuuguguuuagggcaccaugccgucccuaacggaacgaucguuaagaccauuacaaaugaucaaaucgaggugacuaacgcgaccgaacugguacagucuucaaguacagguggcauuugcgacagcccacaccagauccuagauggggagaauuguacccucauagacgcucugcuuggagauccgcagugcgacggcuuucaaaacaaaaagugggaucuguucguggaaagauccaaagccuauucuaauuguuaccccuaugacgucccugauuacgcaucguugaggucacucguggccagcagugguacucuggaguuuaacaaugaauccuucaacuggacagggguuacccagaauggaacgucuagcgcuugcgagcggcgcuccaacaagucauuuuucagucgacugaauuggcucacucauuuaaaguauaaauacccagcacugaacgugaccaugcccaauaacgagaaguuugacaaacuuuauaucuggggcguccaccauccuggcacagauagcgaccagauuucuuuguacgcccaggcuuccgggcguaucacugugucaaccaagagaagccaacagacaguaauuccaaacaucggaaguaggccccggguucgcgauauaucuuccagaauuagcaucuacuggaccauugugaaaccuggugacauccugcuaaucaauucgacgggcaaccucauugccccaaggggguauuucaagauacggucuggaaaguccucaaucaugcgcagugacgcgccgauuggcaaauguaauagcgaaugcaucacucccaacgguuccauaccuaaugauaagccauuucagaacgucaaucgaauuacauacggggcaugucccagauaugugaaacagaacacccugaaacuugccacuggaaugaggaaugugccugagaaacaaacacggggcaucuucggcgcuaucgccggguuuauugaaaacggaugggaggguauggucgacggcugguacggguuccgucaccagaauagcgagggaaccggccaggcagcugaucugaagucuacgcaagccgcgaucaaccagauuaaugguaaauugaaccgccucauagggaagaccaaugaaaaguuucaccagaucgagaaagaguucucagaaguugaaggcaggauucaggaccuggagaaguauguggaggauacaaaaaucgacuuauggaguuacaacgccgaacugcucguagcacuugagaaccaacauacuaucgaucugaccgacuccgaaaugaauaaguuguucgagagaacaaagaagcagcuacgggaaaacgcugaggauaugggaaauggcugcuuuaagauuuaucacaaaugugacaacgccugcauagggagcauccgaaauggaacuuacgaucaugacguguaccgcgacgaggcucugaacaauagauuccagauuaagggugucgaacucaaaucuggcuauaaggauuggauccuguggauuucauuugccaucaguugcuuccuucuguguguggcauugcucggguuuauaaugugggccugccagaaaggaaacaucaggugugacauuugcaucuga

SEQ ID NO: 128109 - RNA, 1701 nt, Artificial Sequence; identical to SEQ ID NO: 128079
  derived and/or modified CDS sequence (opt3) from hemagglutinin__InfluenzaA__AAX56410

SEQ ID NO: 128110 - RNA, 1701 nt, Artificial Sequence
  derived and/or modified CDS sequence (opt3) from hemagglutinin__InfluenzaA__AAX56420
augaagaccaucauugcccugagcuacuuccucugccuuguguuugcucagaaacugcccggcaacgacaauuccacagcaacuuuguguuuagggcaccaugccgucccuaacggaacgauaguuaagaccaucacaaaugaucaaauugaggugacuaacgcgaccgaacugguacagucuucaaguacagguggcaucugcgacagcccacaccagauucuagauggggagaauuguacccucaucgacgcucugcuuggagauccgcagugcgacggcuuccaaaacaaaaagugggaucuguuuguggaaagauccaaagccuauucuaauuguuaccccuaugacgucccugauuacgcaucguugaggucacucguggccagcagugguacucuggaguucaacaaugaauccuuugacuggacagggguuacccagaacggaacgucuagcgcuugcaagcggcgcuccaauaagucauucuuuagucgacugaacuggcucacucauuuaaaauauaaguacccagcacugaaugugaccaugcccaacaaugagaaauucgauaaacuuuauauauggggcguccaccauccuggcacagacagcgaucagaucucuuuguacgcccaggcuuccgggcguauuacugugucaaccaagagaagccaacagacaguaaucccaaacauuggaaguaggccccggguucgcgacgugucuuccagaaucagcauauacuggaccauugucaagccuggugacauccugcuaauuaacucgacgggcaaucucaucgccccaaggggguauuuuaagauccggucuggaaaauccucaauuaugcgcagugaugcgccgauaggcaaguguaacagcgagugcaucacucccaaugguuccauuccuaacgacaaaccauuccagaaugugaaccgaaucacauacggggcaugucccagauaugugaagcagaauacccugaaacuugccacuggaaugaggaacgucccugaaaagcaaacacggggcauauuuggcgcuauugccggguucaucgagaauggaugggaagguaugguugauggcugguacggguuucgucaccagaacucugagggaaccggccaggcagcugaccugaaaagcacgcaagccgcgaucaaucagauuaacgguaaguugaaucgccucaucgggaagaccaacgagaaauuccaccagauugaaaaggaguucucagaaguggagggcagaauacaggaucuggaaaaauauguagaggacacaaagaucgauuuauggaguuacaaugccgagcugcucguggcacuugaaaaccaacauacuauugaccugaccgauuccgagaugaacaaauuguuugaaaggacaaagaagcagcuacgggagaaugcugaagacaugggaaacggcugcuucaaaaucuaucacaagugugauaaugccugcaucgggagcauucgaaacggaacuuacgaccaugacgucuaccgcgaugaggcucugaauaacagauuucagauaaaagguguggagcucaagucuggcuauaaagacuggauccuguggauuucauucgccaucaguugcuuucuucuguguguugcauugcucggguucauuaugugggccugccagaagggaaauaucagguguaacauaugcaucuga

SEQ ID NO: 128111 - RNA, 1701 nt, Artificial Sequence
  derived and/or modified CDS sequence (opt3) from hemagglutinin__InfluenzaA__AAX56430
augaagaccaucauugcccugagcuacauacucugccuuguguucacacagaaacugcccggcaacgacaauuccacugcuacguuguguuuagggcaccaugcagucccuaacggaaccaucguuaagacaauuacuaaugaucaaaucgaggugaccaacgccacagaacugguacagucuucaaguaccgguggcauuugcgacagcccacaccagauccuagauggggagaauuguacucucauagacgcgcugcuuggagauccgcagugcgacggcuuucaaaacaaaaagugggaucuguucguggaaagauccaaggcuuauucuaauuguuaccccuaugacgucccugauuacgccucguugaggucacucguggcaagcagugguacacuggaguuuaacaaugaauccuucaacuggaccgggguuacgcagaauggaacuucuagcgccugcgagcggcgcuccaacaagucauuuuucagucgacugaauuggcucacccauuuaaaguauaaauacccagcucugaacgugacaaugcccaauaacgagaaguuugacaaacuuuauaucuggggcguccaccauccuggcacugauagcgaccagauuucuuuguacgcacaggccuccgggcguaucaccgugucaacaaagagaagccaacagaccguaauuccaaacaucggaaguaggccccggguucgcgaugugucuuccagaauaagcauuuacuggacgaucgucaaaccuggugacauucugcuaaucaauucgacuggcaaccucaucgcuccaaggggguauuucaagauucggucuggaaaguccucaauaaugcgcagugacgccccgaucggcaaauguaauagcgaaugcauuacacccaacgguuccaucccuaaugauaagccauuucagaacgugaaucgaauaaccuacggggcgugucccagauaugugaaacagaacacucugaaacuugcaacaggaaugaggaaugucccugagaaacaaacccggggcauuuucggcgccaucgcuggguuuaucgaaaacggaugggaggguaugguugacggcugguacggguuccgucaccagaauagcgagggaacgggccaggccgcagaucugaagucuacccaagcugccauuaaccagaucaaugguaaauugaaccgccucauugggaagacaaaugaaaaguuucaccagauagagaaagaguucucagaaguggaaggcagaauccaggaccuggagaaguauguagaggauacuaaaauugacuuauggaguuacaacgcggaacugcucguggcccuugagaaccaacauaccaucgaucugacagacuccgaaaugaauaaguuguucgagaggacuaaaaagcagcuacgggaaaacgcagaggauaugggaaauggcugcuuuaagaucuaucacaaaugugacaacgcuugcauugggagcauacgaaauggaaccuacgaucaugacgucuaccgcgacgaggcccugaacaauagauuccagaucaaggguguggaacucaaaucuggcuauaaggauuggauucuguggaucucauuugcuauuaguugcuuccuucuguguguugccuugcucggguuuaucaugugggcaugccagaaaggaaacauaaggugugacaucugcauuuga

SEQ ID NO: 128112 - RNA, 1701 nt, Artificial Sequence
  derived and/or modified CDS sequence (opt3) from hemagglutinin__InfluenzaA__AAX56440
augaagaccaucauugcccugagcuacauacucugccuuguguucgcucagaaacugcccggcaacgacaauuccacagcaacuuuguguuuagggcaccaugccgucccuaacggaacgcugguuaagaccaucacaaaugaucaaauugaggugacuaacgcgaccgaacuuguacaaaauucuucaacagguagaaucugcgacaguccacaccagauucucgauggcgagaacuguacccugaucgacgcucuacugggggauccgcauugcgacggauuucagaauaaagaaugggauuuguucguggagaggagcaaggccuauuccaacuguuaccccuaugacgucccugauuacgugucucuccggucgcugguugcaucaagcggcacucuggaauuuaauaacgagaguuucaauuggacagguguggcccagaacgggaccuccucugcuugcaaacgccgaagcgacaaguccuuuuucucacgucucaauugguuacaccagcugaaguauaaauacccagcacuuaacgucacgaugcccaauaacgagaaguuugauaaauuguauauauggggagugcaucacccuggcacugacaacgaucagaucagucuguacgcccaggcuagcggcagaguaaccguuucuacaaagaggucccaacagacugugauuccaaauaucgggucaggacccuggguccggggugugagcagucgcauuucuaucuacuggaccauagugaaaccuggcgacauucuacucaucaacuccacagggaaucugauugccccaagaggauauuucaagaucaggagcggcaagucgucuaucaugcgguccgacgcgccgauugguaaauguaacucagaaugcauaacccccaaugggaguaucccuaacgauaagccauuucagaaugucaaccgcauuacguacggacccuguccucgauauguuaaacagaauacucuuaagcuggcaacaggcaugagaaacgugccagagaaacaaaccaggggcaucuucggggccauagcuggauuuauugaaaaugguugggagggcaugauggacgggugguacggauuccggcaccagaacagcgagggcacuggucaggccgcagauuugaaguccacacaagcugccaucaaucagaucaacgggaaacucaaucgucugauugaaaagaccaacgagaaguuucaucagaucgaaaaagaguucucugaaguagagggccgcauucaggacuuagagaaguauguggaagauacgaaaauagaccuguggagcuacaacgcggagcuccuugucgcccuggaaaaucaacacaccaucgauuugacagacucagagaugaacaagcuauucgaaagaacuaaaaagcagcugagggagaaugcagaggauaugggaaacggcugcuuuaagauuuaucauaaaugugacaaugcuugcaucgggaguauccggaacggaaccuacgaucacgacguguaccgagacgaagcccucaauaaccgcuuccagauuaaggguguugagcugaaauccggcuauaaggauuggauacuuuggaucagcuuugcuauuucuugcuuccuguuguguaucgugcuccugggguuuauuaugugggccugccagaaaggaaauaucagauguaacauaugcaucuga

SEQ ID NO: 128113 - RNA, 1701 nt, Artificial Sequence; identical to SEQ ID NO: 128095
  derived and/or modified CDS sequence (opt3) from hemagglutinin__InfluenzaA__AAX56450

SEQ ID NO: 128114 - RNA, 1701 nt, Artificial Sequence
  derived and/or modified CDS sequence (opt3) from hemagglutinin__InfluenzaA__AAX56460
augaagaccaucauugcccugagcuacauacucugccuuguguucgcucagaaacugcccgagaacgacaauuccacagcaacuuuguguuuaggccaccaugccgucccuaacgggacgcugguuaagaccaucacaaaugaucaaauugaagugacuaacgcgaccgagcuaguacagucuucaaguacaggaagaaucugcgacagcccacaccagauucucgauggugaaaauuguacccugaucgacgcuuugcugggcgauccgcauugcgacggguuucagaacaaagagugggauuuguucguggaaagguccaaggccuauucuaauuguuaccccuaugacgucccugauuacgugucgcuccggucacugguugcaagcaguggaacucuggaguuuaacaaugaguccuucaacuggacaggcguggcccaaaaugguaccucuagcgcuugcaaacgccgauccgacaagucauuuuucagucgucucaacugguuacaccagcugaaguauaaauacccagcacuuaaugucacgaugcccaacaaugaaaaguuugauaaauuguauauauggggagugcaucacccugggacugacagcgaucagaucucucuguacgcccaggcuuccggcagaguaaccguuucaacaaagaggagccaacagacugugauuccaaacaucggcagucggcccuggguccgcggggugucuuccagaauuagcaucuacuggaccauagugaaaccuggagacauucuacucaucaacucgacagguaaucugauugccccaaggggcuauuucaagauccggucugggaaguccucaaucaugcgcagugacgcgccgauuggaaaauguaacagcgagugcauaacccccaauggcuccaucccuaacgauaagccauuucagaaugucaaccgaauuacgcacggucccuguccuagauacguuaaacagaauacucuuaagcuggcaacagggaugaggaacgugccagaaaaacaaacccggggaaucuucggcgccauagcuggcuuuauugagaaugggugggagggaaugauggacgguugguauggcuuccgucaucagaacucugaagggacuggacaggccgcagaucuuaagagcacacaagcugccaucaaucagaucaacggcaaacucaaucgccugauugagaagaccaacgaaaaguuucaccagaucgagaaagaguucucagaaguagaggguaggauucaggacuuagaaaaguacguggaggauacgaaaauagaccuguggaguuauaaugcggaacuccuugucgcccuggagaaccaacauaccaucgauuugacagacuccgaaaugaacaagcuauucgagagaacuaaaaagcagcugcgggagaaugcagaagauauggggaacggcugcuuuaagauuuaccacaaaugugacaaugcuugcaucggaagcauccgaaacggcaccuaugaucacgacguguaccgcgacgaggcccucaauaacagauuccagauuaaggggguugaacugaaaucuggauacaaggauuggauacuuuggaucucauuugcuauuaguugcuuccuguuguguaucgugcuccuggguuuuauuaugugggccugccagaaaggcaauaucagguguaacauaugcaucuga

SEQ ID NO: 128115 - RNA, 1701 nt, Artificial Sequence
  derived and/or modified CDS sequence (opt3) from hemagglutinin__InfluenzaA__AAX56470
augaagaccaucauugcccugagcuacauacucugccuuguguucgcucagaaacugcccggcaacgacaauuccacagcaacuuuguguuuagggcaccaugccgucccuaacggaacgcugguuaagaccaucacaaaugaucaaauugaggugacuaacgcgaccgaauugguacagucuucaaguacagguagaaucugcgacagcccacaccagauucucgauggcgagaauuguacccugaucgacgcccuucugggggauccgcauugcgacggauuucagaacaaagaaugggauuuguucguggagagguccaaggcuuauucuaauuguuaccccuaugacgucccugauuacgugucgcuccggucacugguugcaagcaguggcacucuggaauuuaacaaugaguccuucaacuggacagguguggcccaaaaugggaccucuagcgcuugcaaacgccgauccgacaagucauuuuucagucgucucaacugguuacaccagcugaaguauaaauacccagcacuuaaugucacgaugcccaacaaugagaaguuugauaaauuguauauauggggagugcaucacccuggcacugacagcgaucagaucucucuguacgcccaggcuuccggcagaguaaccguuucaacaaagaggagccaacagacugugauuccaaacaucgggagucggcccuggguccgcggagugucuuccagaauuagcaucuacuggaccauagugaaaccuggugacauucuacucaucaacucgacaggcaaucugauugccccaaggggguauuucaagaugcggucuggaaaguccucaaucaugcgcagugacgcgccgaucggcaaauguaacagcgaaugcauuacccccaaugguuccauaccuaacgauaagccauuucagaaugucaaccgaaucacguacgggcccuguccuagauauguuaaacagaauacucuuaagcuggcaacaggaaugaggaacgugccagagaaacaaacccggggcauuuucggcgccaucgcuggguuuauagaaaauggaugggaggguaugauggacggcugguacggguuccgucaccagaacucugagggaacuggccaggccgcagaucuaaagagcacacaagcugccauuaaucagaucaacgguaaacucaaucgccugaucgaaaagaccaacgagaaguuucaucagauugaaaaagaguucucagaaguagaggggagaauccaggacuuagagaaguauguggaagauacgaaaauugaccuguggaguuacaaugcggagcuccuugucgcccuggaaaaccaacacaccauagauuugacagacuccgagaugaacaagcuauucgaaaggacuaaaaagcagcugcgggagaaugcagaggauaugggcaacggaugcuuuaagaucuaucauaaaugugacaaugcuugcauuggcagcauccgaaacgggaccuacgaucacgacguguaccgcgacgaagcccucaauaacagauuccagaucaagggaguugagcugaaaucugguuauaaggauuggauucuuuggauaucauuugcuaucaguugcuuccuguuguguauugugcuccugggcuuuaucaugugggccugccagaaagggaauauuagguguaacaucugcauauga

SEQ ID NO: 128116 - RNA, 1701 nt, Artificial Sequence; identical to SEQ ID NO: 128099
  derived and/or modified CDS sequence (opt3) from hemagglutinin__InfluenzaA__AAX56480

SEQ ID NO: 128117 - RNA, 1701 nt, Artificial Sequence
  derived and/or modified CDS sequence (opt3) from hemagglutinin__InfluenzaA__AAX56510
augaagaccaucauugcccugagcuacauacucugccuuguguucgcucagaaacugcccggcaacgacaauuccacagcaacuuuguguuuagggcaccaugccgucccuaacggaacgcugguuaagaccaucacaaaugaucaaauugaggugacuaacgcgaccgaacuuguacagucuucaaguacagguagaaucugcgacagcccacaccagauucucgauggcgagaauuguacccugaucgacgcucuacugggggauccgcauugcgacggauuucagaacaaagaaugggauuuguucguggagagguccaaggccuauucuaauuguuaccccuaugacgucccugauuacgugucgcuccggucacugguugcaagcaguggcacucuggaauuuaacaaugaguccuucaacuggacagguguggcccaaaaugggaccucuagcgcuugcaaacgccgauccgacaagucauuuuucagucgucucaacugguuacaccagcugaaguauaaauacccagcacuuaaugucacgaugcccaacaaugagaaguuugauaaauuguauauauggggagugcaucacccuggcacugacagcgaucagaucucucuguacgcccaggcuuccggcagaguaaccguuucaacaaagaggagccaacagacugugauuccaaacaucgggagucggcccuggguccgcggagugucuuccaaaauuagcaucuacuggaccauagugaagccuggugacauucuacucaucaacucgacaggcaaucugauugccccaagaggguauuucaagaucaggucuggaaaauccucaaucaugcggagugacgcgccgauuggcaaguguaacagcgaaugcauaacccccaaugguuccaucccuaacgauaaaccauuucagaaugucaaccgcauuacguacggggcauguccccgauauguuaagcagaauacucuuaaacuggccacaggaaugagaaacgugccugagaagcaaaccaggggcaucuucggcgcuauagccggguuuauugaaaauggaugggaggguaugauggacggcugguacggguuccggcaccagaacucugagggaacuggccaggcagcugauuugaaaagcacacaagccgcgaucaaucagaucaacgguaagcucaaucgucugauugaaaagaccaacgagaaauuucaucagaucgaaaaggaguucucagaaguagaggggcgcauucaggacuuagagaaauauguggaagauacgaagauagaccuguggaguuacaaugccgagcuccuugucgcacuggaaaaccaacacaccaucgauuugacagacuccgagaugaacaaacuauucgaaagaacuaagaagcagcugagggagaaugcugaggauaugggcaacggaugcuuuaaaauuuaucauaagugugacaaugccugcaucggcagcauccggaacgggaccuacgaucacgacguguaccgagacgaagcucucaauaaccgcuuccagauuaaaggaguugagcugaagucugguuauaaagauuggauacuuuggaucucauuugccauuaguugcuuccuguuguguaucgugcuccugggcuuuauuaugugggcaugccagaaggggaauaucagauguaacauaugcaucuga

SEQ ID NO: 128118 - RNA, 1701 nt, Artificial Sequence; identical to SEQ ID NO: 128095
  derived and/or modified CDS sequence (opt3) from hemagglutinin__InfluenzaA__AAX56520

SEQ ID NO: 128119 - RNA, 1701 nt, Artificial Sequence
  derived and/or modified CDS sequence (opt3) from hemagglutinin__InfluenzaA__AAX56530
augaaggccaaacugcucgugcuucugugcgcuuucaccgcaacauacgccgacacuaucuguauuggcuaucacgcgaacaauagcacggauaccgucgacacaguuuuggagaagaacgugacuguaacccauuccgugaauuuacuggaagauucucacaacgggaaacuaugcagacucaagggaacagcuccccugcagcuugguaauuguucaauagccggcuggauccuggggaacccugagugcgaaaguuuguuuagcaaagaguccuggucuuacauugcagaaaccccaaauccgaagaacggaacuuguuaucccggcuacuucgccgacuaugaggagcucagggaacaacugucgucagucagcaguuuugagcgguucgaaaucuuuccuaaggauuccucuuggccaaaucauacagugaccaaagguguuacggcuagcugcucccacaacgggaagucaaguuucuacaaaaaucugcucugguuaacugagaagaacggacuguaucccaaucuuagcaaaucuuacgugaacaagaagggcaaagaggucuuggugcuguggggcguacaucacccuuccaauaugggggaccagcgcgcaauuuaccacaaggaaaacgccuauguuucagugcuaagcagucauuacucucgacguuuuaccccagagaucgcuaaaagacccaaggucagggaucaggaaggacggauaaacuauuacuggacacuccuggagccuggugacacuaucauuuucgaagccaauggcaaccuuaucgcgccaugguaugcauuugcccugucccgcggguucggaagcggcauuaucauaucgaaugcuucuaugggugagugugaugccaaaugccagaccccgcaaggggcaauuaacuccucauugcccuuucagaaugugcacccugugacaaucggagaguguccaaaguacgucagaaguaccaaacucaggaugguuacgggccugcggaacgugcccagcauucagucccgcggcuuauucggggcuaucgccggauuuaucgaagguggcuggacugggaugauugacggaugguauggcuaccaucaccagaaugagcaagguucuggguacgcggccgaucagaaaagcacacagaacgcaauaaauggcaucaccaacaagguaaauucaauuaucgaaaagaugaacacucaguucacagcugugggaaaggaguucaauaaacuggaaaagcgaauggagaaccucaauaaaaaggucgacgauggcuuucuugacauauggaccuauaacgccgagcuguuggugcuacuggaaaacgagagaacgcucgacuuccacgaucugaauguuaagaaccuuuacgaaaaagugaagaaucaacugaaaaacaaugcuaaggagauugggaacggaugcuuugaguucuaucauaaauguaauaacgaaugcauggagagugucaagaaugguaccuacgacuauccuaaguacuccaaagaaagcaaguugaacagggagaaaaucgauggcgugaagcucgaaucuauggggguauaucagauccuggccauuuacucaacaguugcaaguagcuuagugcugcuagucucccucggagccaucucuuuuuggaugugcucgaauggcagccugcagugucggauuugcauauga

SEQ ID NO: 128120 - RNA, 1701 nt, Artificial Sequence
  derived and/or modified CDS sequence (opt3) from hemagglutinin__InfluenzaA__AAX56550
augaagaccaucauugcccugagcuacauacucugccuuguguucgcucagaaacugcccgucaacgacaauuccacagcaacuuuguguuuaggccaccaugccguuccuaacgggacgcuggugaagaccaucacaaaugaucacauugagguaacuaacgcgaccgaacuugugcaaucuucaaguacaggaagaaucugcgacagcccacaucagauucucgauggugagaauuguacccugaucgacgcucuacugggcgauccgcacugcgacggguuucagaacaaagaaugggauuuguucgucgagagguccacugccuauucuaauuguuaccccuaugacgugccugauuacgcaucgcuccggucacugguugccagcaguggaacacuggaauuuaacaaugaguccuucaacuggaccggcguggcucagaaugguacgucuagcgcaugcaagcgccgauccauaaaaucauuuuucagucgucucaacugguuacaucaacugaaguauaaguacccagcccuuaaugucacuaugcccaacaaugagaaauuugacaaguuguauaucuggggagugcaccacccuagcaccgauucugaccagauuucccuguacgcucaggccucagggagaguaacaguuagcacuaaaaggagucagcaaaccgugaucccaaacauuggcucucggcccuggguccgcggcguguccagcagaaucucgauauacuggacaauugugaagccuggggauauccuacucauuaacucuaccggaaaucugaucgcgccaagggguuauuucaaaauccgguccggcaagucaaguauuaugcgcagcaacgcaccgauagggaaguguaauuccgaaugcaucacgcccaacggaucuauuccuaaugacaaaccauuucagaacgucaaucgaaucacuuacggcgccugucccagauauguuaagcagaacacacuuaaacuggcuaccgguaugaggaaugugccugagaagcagacucgggggauauucggagccauugcaggcuuuaucgaaaacggcugggaggggaugguagacggaugguacgguuuccgucaucaaaauagcgagggcacagggcaggcugccgauuugaaaucaacccaggcggccaucaaccaaauuaauggaaagcucaaccgccugaucgagaaaacgaaugaaaaguuucaccagauugaaaaggaguucagugaaguggagggcagaauacaggacuuagagaaauaugucgaagauaccaagaucgaccugugguccuacaacgcagagcuccuuguggcucuggaaaaccagcauacaauugauuugacugacagcgagaugaauaaacuauucgaaaggacccggaagcaacugcgagagaacgccgaggauauggguaaugggugcuuuaaaaucuaucacaagugugacaacgcuugcaucggcucuauucgcaauggaacauacgaucacgacguuuacagagaugaagcccucaacaauagguuccagauaaagggcguggagcugaaaucaggguauaaggacuggauccuuuggauuaguuuugcaaucagcugcuuccuguugugugucgugcuccugggauuuauuaugugggccugccagaaagguaacauccgguguaauauaugcaucuga

SEQ ID NO: 128121 - RNA, 1701 nt, Artificial Sequence
  derived and/or modified CDS sequence (opt3) from hemagglutinin__InfluenzaA__AAX56560
augaagaccaucauugcccugagcuacauacucugccuuguguucgcucagaaacugcccggcaacgacaauuccacagcaacuuuguguuuagggcaccaugccgucccuaacggaacgaucguuaagaccauuacaaaugaucaaaucgaggugacuaacgcgaccgaacugguacagauuucuucaacagguggcaucugcgacaguccacaccagauacuagauggggagaauuguacccucaucgacgcucugcuuggagauccgcagugcgacggcuuucaaaacaaaaagugggaucuguucguggaaagaagcaaagccuauuccaauuguuaccccuaugacgucccugauuacgcaucuuugaggucgcucguggccucaagcgguacucuggaguuuaacaaugaaaguuucgacuggacagggguuacccagaacggaacguccucugcuugcaagcggcgcagcaauaaguccuuuuucucacgacugaacuggcucacucauuuaaaauauaaguacccagcacugaaugugaccaugcccaacaaugagaaauuugauaaacuuuauauuuggggcguccaccauccuggcacagacagugaucagaucagcuuguacgcccaggcuucugggcguauuacuguguccaccaagagaucacaacagacaguaaucccaaacauaggaagcaggccccggguucgcgacgugaguucuagaauuuccaucuacuggaccauugucaagccuggugacauccugcuaaucaacagcacgggcaaucucauugccccaaggggguauuucaagauacggucgggaaaaucuuccaucaugcgcucagaugcgccgauuggcaaguguaacagugagugcaucacucccaaugguagcauaccuaacgacaaaccauuucagaaugugaaccgaauuacauacggggcaugucccagauaugugaagcagaauacccugaaacuugccacuggaaugaggaacgucccugaaaagcaaacacggggcaucuucggcgcuaucgccggguuuauugagaauggaugggaagguaugguugauggcugguacggguuccgucaccagaacuccgagggaaccggccaggcagcugaccugaaaucuacgcaagccgcgaucaaucagauuaacgguaaguugaaucgccucauagggaagaccaacgagaaauuucaccagaucgaaaaggaguucagcgaaguggagggcaggauucaggaucuggaaaaauauguagaggacacaaagaucgauuuauggucauacaaugccgagcugcucguggcacuugaaaaccaacauacuaucgaccugaccgauagugagaugaacaaauuguucgaaagaacaaagaagcagcuacgggagaaugcugaagacaugggaaacggcugcuuuaaaauuuaucacaagugugauaaugccugcauaggguccauccgaaacggaacuuacgaccaugacgucuaccgcgaugaggcucugaauaacagauuccagauuaaagguguggagcucaagagcggcuauaaagacuggauccuguggauuucuuuugccaucucaugcuuccuucuguguguugcauugcucggguuuauaaugugggccugccagaagggaaauaucagguguaacauuugcaucuga

SEQ ID NO: 128122 - RNA, 1701 nt, Artificial Sequence
  derived and/or modified CDS sequence (opt3) from hemagglutinin__InfluenzaA__AAX56570
augaagaccaucauugcccugagcuacauacucugccuuguguucgcucagaaacugcccggcaacgacaauuccacagcaacuuuguguuuagggcaccaugccgucccuaacggaacgcugguuaagaccaucacaaaugaucaaauugaggugacuaacgcgaccgaacuuguacagucuucaaguacaagcagaaucugcgacuccccacaccagauucucgauggugagaauuguacccugaucgacgcucuacugggcgauccgcauugcgacggguuucagaacaaagaaugggauuuguucguggagaggucuaaggccuauucgaauuguuaccccuaugacgucccugauuacgugucacuccggagccugguugcaaguuccggaacucuggaauuuaacaaugagucuuucaacuggacaggcguggcccaaaaugguaccagcuccgcuugcaaacgccgaucagacaagagcuuuuucagucgucucaacugguuacaccagcugaaguauaaauacccagcacuuaaugucacgaugcccaacaaugagaaguuugauaaauuguauauauggggagugcaucacccugggacugacucugaucagaucucccuguacgcccaggcuucaggcagaguaaccguuagcacaaagaggagucaacagacugugauuccaaacaucggcucucggcccuggguccgcgggguguccagcggaauuucgaucuacuggaccauagugaaaccuggugacauucuacucaucaacucuacaggcaaucugauugccccaagaggguauuucaagaucagguccggaaagucaaguaucaugcggagcgacgcgccgauuggcaaauguaacuccgaaugcauaacccccaaugguucuaucccuaacgauaagccauuucagaaugucaaccgcauuacguacggggcauguccccgauauguuaaacagaauacucuuaagcuggccacaggaaugagaaacgugccugagaaacaaaccaggggcaucuucggcgcuauagccggguuuauugaaaauggaugggaggguaugauggacggcugguacggguuccggcaccagaacagcgagggaacuggccaggcagcugauuugaagucaacacaagccgcgaucaaucagaucaacgguaaacucaaucgucugauugaaaagaccaacgagaaguuucaucagaucgaaaaagaguucagugaaguagaggggcgcauucaggacuuagagaaguauguggaagauacgaaaauagaccugugguccuacaaugccgagcuccuugucgcacuggaaaaccaacacaccaucgauuugacagacagcgagaugaacaagcuauucgaaagaacuaaaaagcagcugagggagaaugcugaggauaugggcaacggaugcuuuaagauuuaucauaaaugugacaaugccugcaucggcucuauccggaacgggaccuacgaucacgacguguaccgagacgaagcucucaauaaccgcuuccagauuaagggaguugagcugaaaucagguuauaaggauuggauacuuuggaucaguuuugccauuagcugcuuccuguuguguaucgugcuccugggcuuuauuaugugggcaugccagaaagggaauaucagauguaacauaugcaucuga

SEQ ID NO: 128123 - RNA, 1701 nt, Artificial Sequence
  derived and/or modified CDS sequence (opt3) from hemagglutinin__InfluenzaA__AAX56590
augaagaccaucauugcccugagcuacauacucugccuuguguucgcucagaaacugcccggcaacgacaauuccacagcaacuuuguguuuagggcaccaugccgucccuaacggaacgcugguuaagaccaucacaaaugaucaaauugaggugacuaacgcgaccgaacuuguacagucuucaaguacaagcagaaucugcgacuccccacaccagauucucgauggugagaauuguacccugaucgacgcucuacugggcgauccgcauugcgacggguuucagaacaaagaaugggauuuguucguggagaggucuaaggccuauucgaauuguuaccccuaugacgucccugauuacgugucacuccggagccugguugcaaguuccggaacucuggaauuuaacaaugagucuuucaacuggacaggcguggcccaaaaugguaccagcuccgcuugcaaacgccgaucagacaagagcuuuuucagucgucucaacugguuacaccagcugaaguauaaauacccagcacuuaaugucacgaugcccaacaaugagaaguuugauaaauuguauauauggggagugcaucacccuucuacugacuccgaucagaucucacuguacgcccaggcuagcgggagaguaaccguuaguacaaagaggucucaacagacugugauuccaaacaucggcucccggcccuggguccgcggcgugagcucgagaauuucuaucuacuggaccauagugaaaccuggggacauucuacucaucaacuccacaggaaaucugauugccccaagggguuauuucaagauccggucaggcaagaguagcaucaugcgcuccgacgcgccgauugggaaauguaacucugaaugcauaacccccaauggaagcaucccuaacgauaagccauuucagaaugucaaccgaauuacguacggcgcaugucccagauauguuaaacagaauacucuuaagcuggccacagguaugaggaacgugccugagaaacaaacccgggggaucuucggagcuauagccggcuuuauugaaaauggcugggaggggaugauggacggaugguacgguuuccgucaccagaacucagagggcacugggcaggcagcugauuugaagaguacacaagccgcgaucaaucagaucaacggaaaacucaaucgccugauugaaaagaccaacgagaaguuucaucagaucgaaaaagaguucuccgaaguagagggcaggauucaggacuuagagaaguauguggaagauacgaaaauagaccuguggagcuacaaugccgagcuccuugucgcacuggaaaaccaacacaccaucgauuugacagacucugagaugaacaagcuauucgaaagaacuaaaaagcagcugcgggagaaugcugaggauauggguaacgggugcuuuaagauuuaucauaaaugugacaaugccugcaucggcucaauccgaaacggaaccuacgaucacgacguguaccgcgacgaagcucucaauaacagauuccagauuaagggcguugagcugaaaaguggguauaaggauuggauacuuuggaucagcuuugccauuuccugcuuccuguuguguaucgugcuccugggauuuauuaugugggcaugccagaaagguaauaucagguguaacauaugcaucuga

SEQ ID NO: 128124 - RNA, 1701 nt, Artificial Sequence; identical to SEQ ID NO: 128121
  derived and/or modified CDS sequence (opt3) from hemagglutinin__InfluenzaA__AAX56600

SEQ ID NO: 128125 - RNA, 1701 nt, Artificial Sequence
  derived and/or modified CDS sequence (opt3) from hemagglutinin__InfluenzaA__AAX57644
augaagaccaucauugcccugagcuacauacucugccuuguguucgcucagaaacugcccggcaacgacaauuccacagcaacuuuguguuuagggcaccaugccgucccuaacggaacgaucguuaagaccauuacaaaugaucaaaucgaggugacuaacgcgaccgaacugguacagucuucaaguacagguggcauuugcgacagcccacaccagauccuagauggggagaauuguacccucauagacgcucugcuuggagauccgcagugcgacggcuuucaaaacaaaaagugggaucuguucguggaaagauccaaagccuauucuaauuguuaccccuaugacgucccugauuacgcaucguugaggucacucguggccagcagugguacucuggaguuuaacaaugaauccuucgacuggacagggguuacccagaacggaacgucuagcgcuugcaagcggcgcuccaauaagucauuuuucagucgacugaacuggcucacucauuuaaaauauaaguacccagcacugaaugugaccaugcccaacaaugagaaauuugauaaacuuuauaucuggggcguccaccauccuggcacagacagcgaucagauuucuuuguacgcccaggcuuccgggcguaucacugugucaaccaagagaagccaacagacaguaauuccaaacaucggaaguaggccccggguucgcgacgugucuuccagaauaagcauuuacuggaccgucgugaagccuggugacauccugcuaauuaacucgacgggcaaucucaucgccccaaggggguauuucaagaugcggucuggaaaauccucaaucaugcgcagugaugcgccgauuggcaaguguaacagcgagugcauaacucccaaugguuccaucccuaacgacaaaccauuucagaaugugaaccgaauuacauacggggcaugucccagauaugucaagcagaauacccugaaacuugccacuggaaugaggaacguuccugaaaagcaaacacggggcaucuucggcgcuauagccggguuuauugagaauggaugggaagguaugguggauggcugguacggguuccgucaccagaacucugagggaaccggccaggcagcugaccugaaaagcacgcaagccgcgaucaaucagaucaacgguaaguugaaucgccucauugggaagaccaacgagaaauuucaccagaucgaaaaggaguucucagaaguagagggcaggauucaggaucuggaaaaauauguggaggacacaaagauagauuuauggaguuacaaugccgagcugcucgucgcacuugaaaaccaacauacuaucgaccugaccgauuccgagaugaacaaauuguucgaaagaacaaagaagcagcuacgggagaaugcugaagacaugggaaacggcugcuuuaaaauuuaucacaagugugauaaugccugcaucgggagcauccgaaacggaacuuacgaccaugacguguaccgcgaugaggcucugaauaacagauuccagauuaaagguguugagcucaagucuggcuauaaagacuggauacuguggaucucauuugccauuaguugcuuccuucuguguguggcauugcucggguuuaucaugugggccugccagaagggaaauauuagguguaacaucugcauauga

SEQ ID NO: 128126 - RNA, 1701 nt, Artificial Sequence; identical to SEQ ID NO: 128079
  derived and/or modified CDS sequence (opt3) from hemagglutinin__InfluenzaA__AAX57654

SEQ ID NO: 128127 - RNA, 1701 nt, Artificial Sequence; identical to SEQ ID NO: 128095
  derived and/or modified CDS sequence (opt3) from hemagglutinin__InfluenzaA__AAX57664

SEQ ID NO: 128128 - RNA, 1701 nt, Artificial Sequence
  derived and/or modified CDS sequence (opt3) from hemagglutinin__InfluenzaA__AAX57684
augaagaccaucauugcccugagcuacauacucugccuuguguucgcucagaaacugcccggcaacgacaauuccacagcaacuuuguguuuagggcaccaugccgucccuaacggaacgcugguuaagaccaucacaaaugaucaaauugaggugacuaacgcgaccgaacuuguacagucuucaaguacaagcagaaucugcgacuccccacaccagauucucgauggugagaauuguacccugaucgacgcucuacugggcgauccgcauugcgacggguuucagaacaaagaaugggauuuguucguggagaggucuaaggccuauucgaauuguuaccccuaugacgucccugauuacgugucacuccggagccugguugcaaguuccggaacucuggaauuuaacaaugagucuuucaacuggacaggcguggcccaaaaugguaccagcuccgcuugcaaacgccgaucagacaagagcuuuuucagucgucucaacugguuacaccagcugaaguauaaauacccagcacuuaaugucacgaugcccaacaaugagaaguuugauaaauuguauauauggggagugcaucacccugggacugacucugaucagaucucccuguacgcccaggcuucaggcagaguaaccguuagcacaaagaggagucaacagacugugauuccaaacaucggcucugggcccuggguccggggaguguccagccgcauuucgaucuacuggaccauagugaaaccuggugacauucuacucaucaacucuacaggcaaucugauugccccaagaggguauuucaagaucagguccggaaagucaaguaucaugcggagcgacgcgccgauuggcaaauguaacuccgaaugcauaacccccaaugguucuaucccuaacgauaagccauuucagaaugucaaccgcauuacguacggggcauguccccgauauguuaaacagaauacucuuaagcuggccacaggaaugagaaacgugccugagaaacaaaccaggggcaucuucggcgcuauagccggguuuauugaaaauggaugggaggguaugauggacggcugguacggguuccggcaccagaacagcgagggaacuggccaggcagcugauuugaagucaacacaagccgcgaucaaucagaucaacgguaaacucaaucgucugauugaaaagaccaacgagaaguuucaucagaucgaaaaagaguucagugaaguagaggggcgcauucaggacuuagagaaguauguggaagauacgaaaauagaccugugguccuacaaugccgagcuccuugucgcacuggaaaaccaacacaccaucgauuugacagacagcgagaugaacaagcuauucgaaagaacuaaaaagcagcugagggagaaugcugaggauaugggcaacggaugcuuuaagauuuaucauaaaugugacaaugccugcaucggcucuauccggaacgggaccuacgaucacgacguguaccgagacgaagcucucaauaaccgcuuccagauuaagggaguugagcugaaaucagguuauaaggauuggauacuuuggaucaguuuugccauuagcugcuuccuguuguguaucgugcuccugggcuuuauuaugugggcaugccagaaagggaauaucagauguaacauaugcaucuga

SEQ ID NO: 128129 - RNA, 1701 nt, Artificial Sequence; identical to SEQ ID NO: 128099
  derived and/or modified CDS sequence (opt3) from hemagglutinin__InfluenzaA__AAX57694

SEQ ID NO: 128130 - RNA, 1701 nt, Artificial Sequence; identical to SEQ ID NO: 128121
  derived and/or modified CDS sequence (opt3) from hemagglutinin__InfluenzaA__AAX57704

SEQ ID NO: 128131 - RNA, 1701 nt, Artificial Sequence; identical to SEQ ID NO: 128099
  derived and/or modified CDS sequence (opt3) from hemagglutinin__InfluenzaA__AAX57714

SEQ ID NO: 128132 - RNA, 1701 nt, Artificial Sequence; identical to SEQ ID NO: 128128
  derived and/or modified CDS sequence (opt3) from hemagglutinin__InfluenzaA__AAX57733

SEQ ID NO: 128133 - RNA, 1701 nt, Artificial Sequence
  derived and/or modified CDS sequence (opt3) from hemagglutinin__InfluenzaA__AAX57734
augaagaccaucauugcccugagcuacauacucugccuuguguucgcucagaaacugcccggcaacgacaauuccacagcaacuuuguguuuagggcaccaugccgucccuaacggaacgcugguuaagaccaucacaaaugaucaaauugaggugacuaacgcgaccgaacuuguacagucuucaaguacaagcagaaucugcaauuccccacaccagauucucgacggugagaacuguacccugaucgaugcucuacugggcgacccgcauugcgauggguuucagaauaaagaaugggacuuguucguggagaggucuaaggccuauucgaacuguuaccccuaugaugucccugacuacgugucacuccggagccugguugcaaguuccggaacucuggaauuuaauaacgagucuuucaauuggacaggcguggcccaaaacgguaccagcuccgcuugcaaacgccgaucagauaagagcuuuuucagucgucucaauugguuacaccagcugaaguauaaauacccagcacuuaacgucacgaugcccaauaacgagaaguuugacaaauuguauauauggggagugcaucacccugggacugauucugaccagaucucccuguacgcccaggcuucaggcagaguaaccguuagcacaaagaggagucaacagacugugauuccaaacaucggcucugggcccuggguccggggaguguccagccgcauuucgaucuacuggaccauagugaaaccuggugauauucuacucaucaauucuacaggcaaccugauugccccaagaggguauuucaagaucagguccggaaagucaaguaucaugcggagcgacgcgccgauuggcaaauguaauuccgaaugcauaacccccaacgguucuaucccuaaugacaagccauuucagaacgucaaucgcauuacguacggggcauguccccgauauguuaaacagaacacucuuaagcuggccacaggaaugagaaaugugccugagaaacaaaccaggggcaucuucggcgcuauagccggguuuauugaaaacggaugggaggguaugauggauggcugguacggguuccggcaccagaauagcgagggaacuggccaggcagcugacuugaagucaacacaagccgcgaucaaccagaucaaugguaaacucaaccgucugauugaaaagaccaaugagaaguuucaucagaucgaaaaagaguucagugaaguagaggggcgcauucaggauuuagagaaguauguggaagacacgaaaauagaucugugguccuacaacgccgagcuccuugucgcacuggaaaaccaacacaccaucgacuugacagauagcgagaugaauaagcuauucgaaagaacuaaaaagcagcugagggagaacgcugaggacaugggcaauggaugcuuuaagauuuaucauaaaugugauaacgccugcaucggcucuauccggaaugggaccuacgaccacgauguguaccgagacgaagcucucaacaaucgcuuccagauuaagggaguugagcugaaaucagguuauaaggacuggauacuuuggaucaguuuugccauuagcugcuuccuguuguguaucgugcuccugggcuuuauuaugugggcaugccagaaagggaacaucagauguaauauaugcaucuga

SEQ ID NO: 128134 - RNA, 1701 nt, Artificial Sequence; identical to SEQ ID NO: 128120
  derived and/or modified CDS sequence (opt3) from hemagglutinin__InfluenzaA__AAX57744

SEQ ID NO: 128135 - RNA, 1701 nt, Artificial Sequence; identical to SEQ ID NO: 128120
  derived and/or modified CDS sequence (opt3) from hemagglutinin__InfluenzaA__AAX57764

SEQ ID NO: 128136 - RNA, 1701 nt, Artificial Sequence; identical to SEQ ID NO: 128120
  derived and/or modified CDS sequence (opt3) from hemagglutinin__InfluenzaA__AAX57774

SEQ ID NO: 128137 - RNA, 1701 nt, Artificial Sequence
  derived and/or modified CDS sequence (opt3) from hemagglutinin__InfluenzaA__AAX57784
augaagaccaucauugcccugagcuacauacucugccuuguguucgcucagaaacugcccggcaacgacaauuccacagcaacuuuguguuuagggcaccaugccgucccuaacggaacgcugguuaagaccaucacaaaugaucaaauugaggugacuaacgcgaccgaacuuguacagaauagcucaacaaguagaaucugcgacagcccacaccagauucucgauggugagaacuguacccugaucgacgcucuacugggcgauccgcauugcgacggguuucagaauaaagaaugggauuuguucguggagagguccaaggccuauucuaacuguuaccccuaugacgucccugauuacgugucgcuccggucacugguugcaagcaguggaacucuggaauuuaauaacgaguccuucaauuggacaggcguggcccaaaacgguaccucuagcgcuugcaaacgccgauccgacaagucauuuuucagucgucucaauugguuacaccagcugaaguauaaauacccagcacuuaacgucacgaugcccaauaacgagaaguuugauaaauuguauauauggggagugcaucacccugggacugacagcgaucagaucucucuguacgcccaggcuuccggcagaguaaccguuucaacaaagaggagccaacagacugugauuccaaacaucggcagucggcccuggguccgcggggugucuuccagaauuagcaucuacuggaccauagugaaaccuggagacauucuacucaucaauucgacagguaaccugauugccccaaggggcuauuucaagauccggucugggaaguccucaaucaugcgcagugacgcgccgauuggaaaauguaauagcgaaugcauaacccccaacggcuccaucccuaaugauaagccauuucagaacgucaaucgaauuacguacggugcaugucccagauauguuaaacagaacacucuuaagcuggccacagggaugaggaaugugccugagaaacaaacccggggaaucuucggcgcuauagccggcuuuauugaaaacgggugggagggaaugauggacgguugguacggcuuccgucaccaaaauucugaggggacuggacaggcagcugauuugaagucuacacaggccgcgaucaaccagaucaauggcaaacucaaccgccugauugaaaagaccaaugagaaguuucaucagaucgaaaaagaguucucagaaguagaggguaggauucaggacuuagagaaguauguggaagauacgaaaauagaccuguggaguuacaacgccgagcuccuugucgcacuggaaaaccaacacaccaucgauuugacagacuccgagaugaauaagcuauucgaaagaacuaaaaagcagcugcgggagaacgcugaggauauggggaauggcugcuuuaagauuuaucauaaaugugacaacgccugcaucggaagcauccgaaauggcaccuacgaucacgacguguaccgcgacgaagcucucaacaauagauuccagauuaaggggguugagcugaaaucuggauauaaggauuggauacuuuggaucucauuugccauuaguugcuuccuguuguguaucgugcuccuggguuuuauuaugugggcaugccagaaaggcaacaucagguguaauauaugcaucuga

SEQ ID NO: 128138 - RNA, 1701 nt, Artificial Sequence
  derived and/or modified CDS sequence (opt3) from hemagglutinin__InfluenzaA__AAX57794
augaagaccaucauugcccugagcuacauacucugccuuguguucgcucagaaacugcccgucaacgacaauuccacagcaacuuuguguuuaggccaccaugccguuccuaacgggacgcuggugaagaccaucacaaaugaucacauugagguaacuaacgcgaccgaacuugugcaaucuucaaguacaggaagaaucugcgacagcccacaucagauucucgauggugagaauuguacccugaucgacgcucuacugggcgauccgcacugcgacggguuucagaacaaagaaugggauuuguucgucgagagguccacugccuauucuaauuguuaccccuaugacgugccugauuacgcaucgcuccggucacugguugccagcaguggaacacuggaauuuaacaaugaguccuucaacuggaccggcguggcucagaaugguacgucuagcgcaugcaagcgccgauccauaaaaucauuuuucagucgucucaacugguuacaucaacugaaguauaaguacccagcccuuaaugucacuaugcccaacaaugagaaauuugacaaguuguauaucuggggagugcaccacccuagcaccgauucugaccagauuucccuguacgcucaggccucagggagaguaacaguuagcacuaaaaggagucagcaaaccgugaucccaaacauuggcucucggcccuggguccgcggcguguccagcagaaucucgauacauuggacaauugugaagccuggggauauccuacucauuaacucuaccggaaaucugaucgcgccaagggguuacuucaaaauccgguccggcaagucaaguauuaugcgcagcaacgcaccgauagggaaguguaauuccgaaugcaucacgcccaacggaucuauuccuaaugacaaaccauuucagaacgucaaucgaaucacuuauggcgccugucccagauacguuaagcagaacacacuuaaacuggcuaccgguaugaggaaugugccugagaagcagacucgggggauauucggagccauugcaggcuuuaucgaaaacggcugggaggggaugguagacggaugguaugguuuccgucaccaaaauagcgagggcacagggcaggcugccgauuugaaaucaacccaggcggccaucaaccaaauuaauggaaagcucaaccgccugaucgagaaaacgaaugaaaaguuucaucagauugaaaaggaguucagugaaguggagggcagaauacaggacuuagagaaauacgucgaagauaccaagaucgaccugugguccuauaacgcagagcuccuuguggcucuggaaaaccagcacacaauugauuugacugacagcgagaugaauaaacuauucgaaaggacccggaagcaacugcgagagaacgccgaggauauggguaaugggugcuuuaaaaucuaccacaagugugacaacgcuugcaucggcucuauucgcaauggaacauaugaucaugacguuuacagagaugaagcccucaacaauagguuccagauaaagggcguggagcugaaaucaggguacaaggacuggauccuuuggauuaguuuugcaaucagcugcuuccuguugugugucgugcuccugggauuuauuaugugggccugccagaaagguaacauccgguguaauauaugcaucuga

SEQ ID NO: 128139 - RNA, 1701 nt, Artificial Sequence; identical to SEQ ID NO: 128120
  derived and/or modified CDS sequence (opt3) from hemagglutinin__InfluenzaA__AAX57814

SEQ ID NO: 128140 - RNA, 1701 nt, Artificial Sequence
  derived and/or modified CDS sequence (opt3) from hemagglutinin__InfluenzaA__AAX57824
augaagaccaucauugcccugagcuacauacucugcaugguguucgcucagaaacuucccgucaacgacaauuccacagcaacucuguguuugggccaccaugccguuccuaacgggacguuagugaagaccaucacaaaugaucacauugagguaacuaacgcgaccgaacuggugcaaucuucaaguacaggaagaaucugcgacagcccacaucagauucuagauggugagaauuguacccucaucgacgcucugcuuggcgauccgcacugcgacggguuucagaacaaagaaugggaucuguucgucgagagguccacugccuauucuaauuguuaccccuaugacgugccugauuacgcaucguugcggucacucguugccagcaguggaacacuggaauuuaacaaugaguccuucaacuggaccggcguggcucagaaugguacgucuagcgcaugcaagcgccgauccauaaaaucauuuuucagucgucugaacuggcuccaucaauuaaaguauaaguacccagcccugaaugucacuaugcccaacaaugagaaauuugacaaacuuuauaucuggggagugcaccacccuagcaccgauucugaccagauuuccuuguacgcucaggccucagggagaguaacaguuagcacuaaaaggagucagcaaaccgugaucccaaacauuggcucucggcccuggguccgcggcguguccagcagaaucucgauauacuggacaauugugaagccuggggauauccugcuaauuaacucuaccggaaaucucaucgcgccaagggguuauuucaaaauccgguccggcaagucaaguauuaugcgcagcaacgcaccgauagggaaguguaauuccgaaugcaucacgcccaacggaucuauuccuaaugacaaaccauuucagaacgucaaucgaaucacuuacggcgccugucccagauauguuaagcagaacacacugaaacuugcuaccgguaugaggaaugugccugagaagcagacucgggggauauucggagccauugcaggcuuuaucgaaaacggcugggaggggaugguagacggaugguacgguuuccgucaucaaaauagcgagggcacagggcaggcugccgaucugaaaucaacccaggcggccaucaaccaaauuaauggaaaguugaaccgccucaucgaaaagacgaaugagaaguuucaccagauugaaaaggaguucagugaaguggagggcagaauacaggaccuggagaaauaugucgaagauaccaagaucgacuuaugguccuacaacgcagagcugcucguggcucuugaaaaccagcauacaauugaucugacugacagcgagaugaauaaauuguucgaaaggacccggaagcaacuacgagagaacgccgaggauauggguaaugggugcuuuaaaaucuaucacaagugugacaacgcuugcaucggcucuauucgcaauggaacauacgaucacgacguuuacagagaugaagcccugaacaauagguuccagauaaagggcguggagcucaaaucaggguauaaggacuggauccuguggauuaguuuugcaaucagcugcuuccuucugugugucguguugcucggauuuauuaugugggccugccagaaagguaacauccgguguaauauaugcaucuga

SEQ ID NO: 128141 - RNA, 1701 nt, Artificial Sequence; identical to SEQ ID NO: 128120
  derived and/or modified CDS sequence (opt3) from hemagglutinin__InfluenzaA__AAX57834

SEQ ID NO: 128142 - RNA, 1701 nt, Artificial Sequence; identical to SEQ ID NO: 128120
  derived and/or modified CDS sequence (opt3) from hemagglutinin__InfluenzaA__AAX57844

SEQ ID NO: 128143 - RNA, 1701 nt, Artificial Sequence
  derived and/or modified CDS sequence (opt3) from hemagglutinin__InfluenzaA__AAX57864
augaagaccaucauugcccugagcuacuuccucugccuuguguuugcucagaaacugcccgucaacgacaauuccacagcaacuuuguguuuaggccaccaugccguuccuaacgggacgcuggugaagaccauaacaaaugaucacaucgagguaacuaacgcgaccgaacuugugcaaucuucaaguacaggaagaauuugcgacagcccacaucagauccucgauggugagaauuguacccugauugacgcucuacugggcgauccgcacugcgacggguuccagaacaaagaaugggauuuguuugucgagagguccacugccuauucuaauuguuaccccuaugacgugccugauuacgcaucgcuccggucacugguugccagcaguggaacacuggaguucaacaaugaauccuuuaacuggaccggcguggcucagaaugguacgucuagcgcaugcaagcgccgauccaucaaaucauucuuuagucgucucaacugguuacaucaacugaaguauaaguacccagcccuuaaugucacuaugcccaacaaugagaaauucgacaaguuguauauauggggagugcaccacccuagcaccgauucugaccagaucucccuguacgcucaggccucagggagaguaacaguuagcacuaaaaggagucagcaaaccgugauuccaaacaucggcucucggcccuggguccgcggcguguccagcagaauuucgaucuacuggacaauagugaagccuggggauauucuacucaucaacucuaccggaaaucugauugcgccaagggguuauuuuaaaauccgguccggcaagucaaguaucaugcgcagcaacgcaccgauugggaaguguaauuccgaaugcauaacgcccaacggaucuaucccuaaugacaaaccauuccagaacgucaaucgaauuacuuacggcgccugucccagauauguuaagcagaacacacuuaaacuggcuaccgguaugaggaaugugccugagaagcagacucgggggaucuuuggagccauagcaggcuucauugaaaacggcugggaggggaugguagacggaugguacgguuuucgucaucaaaauagcgagggcacagggcaggcugccgauuugaaaucaacccaggcggccaucaaccaaaucaauggaaagcucaaccgccugauugagaaaacgaaugaaaaguuccaccagaucgaaaaggaguucagugaaguggagggcaggauucaggacuuagagaaauaugucgaagauaccaagauagaccugugguccuacaacgcagagcuccuuguggcucuggaaaaccagcauacaaucgauuugacugacagcgagaugaauaaacuauuugaaagaacccggaagcaacugcgagagaacgccgaggauauggguaaugggugcuucaaaauuuaucacaagugugacaacgcuugcaucggcucuauccgcaauggaacauacgaucacgacguuuacagagaugaagcccucaacaauagguuucagauuaagggcguggagcugaaaucaggguauaaggacuggauacuuuggaucaguuucgcaauuagcugcuuucuguugugugucgugcuccugggauucaucaugugggccugccagaaagguaacauucgguguaauaucugcauauga

SEQ ID NO: 128144 - RNA, 1701 nt, Artificial Sequence; identical to SEQ ID NO: 128120
  derived and/or modified CDS sequence (opt3) from hemagglutinin__InfluenzaA__AAX57874

SEQ ID NO: 128145 - RNA, 1701 nt, Artificial Sequence; identical to SEQ ID NO: 128120
  derived and/or modified CDS sequence (opt3) from hemagglutinin__InfluenzaA__AAX57884

SEQ ID NO: 128146 - RNA, 1701 nt, Artificial Sequence
  derived and/or modified CDS sequence (opt3) from hemagglutinin__InfluenzaA__AAX57894
augaagaccaucauugcccugagcuacauacucugccuuguguucgcucagaaacugcccgucaacgacaauuccacagcaacuuuguguuuaggccaccaugccguuccuaacgggacgcuggugaagaccaucacaaaugaucacauugagguaacuaacgcgaccgaacuugugcaaucuucaaguacaggaagaaucugcgacagcccacaucagguccucgauggugagaauuguacccugauugacgcucuacugggcgauccgcacugcgacggguuucagaacaaagaaugggauuuguucguggagagguccacugccuauucuaauuguuaccccuaugacguuccugauuacgcaucgcuccggucacugguggccagcaguggaacacuggaauuuaacaaugaguccuucaacuggaccggcgucgcucagaaugguacgucuagcgcaugcaagcgccgauccaucaaaucauuuuucagucgucucaacugguuacaucaacugaaguauaaguacccagcccuuaaugugacuaugcccaacaaugagaaauuugacaaguuguauauauggggaguacaccacccuagcaccgauucugaccagaucucccuguacgcucaggccucagggagaguuacagugagcacuaaaaggagucagcaaaccgucauuccaaacaucggcucucggcccugggugcgcggcguguccagcagaauuucgaucuacuggacaauagucaagccuggggauauucuacucaucaacucuaccggaaaucugauugcgccaagggguuauuucaaaauccgguccggcaagucaaguaucaugcgcagcaacgcaccgauugggaaguguaauuccgaaugcauaacgcccaacggaucuaucccuaaugacaaaccauuucagaacguuaaucgaauuacuuacggcgccugucccagauaugugaagcagaacacacuuaaacuggcuaccgguaugaggaauguaccugagaagcagacucgggggaucuucggagccauagcaggcuuuauugaaaacggcugggaggggaugguggacggaugguacgguuuccgucaucaaaauagcgagggcacagggcaggcugccgauuugaaaucaacccaggcggccaucaaccaaaucaauggaaagcucaaccgccugauugagaaaacgaaugaaaaguuucaccagaucgaaaaggaguucagugaagucgagggcaggauucaggacuuagagaaauauguggaagauaccaagauagaccugugguccuacaacgcagagcuccuuguugcucuggaaaaccagcauacaaucgauuugacugacagcgagaugaauaaacuauucgaaagaacccggaagcaacugcgagagaacgccgaggauauggguaaugggugcuuuaaaauuuaucacaagugugacaacgcuugcaucggcucuauccgcaauggaacauacgaucacgacguguacagagaugaagcccucaacaauagguuccagauuaagggcgucgagcugaaaucaggguauaaggacuggauacuuuggaucaguuuugcaauuagcugcuuccuguugugugugguacuccugggauuuaucaugugggccugccagaaagguaacauucgguguaauaucugcauauga

SEQ ID NO: 128147 - RNA, 1701 nt, Artificial Sequence
  derived and/or modified CDS sequence (opt3) from hemagglutinin__InfluenzaA__AAX57924
augaagaccaucauugcccugagcuacauacucugccuuguguucgcucagaaacugcccgucaacgacaauuccacagcaacuuuguguuuaggccaccaugccguuccuaacgggacgcuggugaagaccaucacaaaugaucacauugagguaacuaacgcgaccgaacuugugcaaucuucaaguacaggaagaaucugcgacagcccacaucagauucucgauggugagaauuguacccugaucgacgcucuacugggcgauccgcacugcgacggguuucagaacaaagaaugggauuuguucgucgagagguccacugccuauucuaauuguuaccccuaugacgugccugauuacgcaucgcuccggucacugguugccagcaguggaacacuggaauuuaacaaugaguccuucaacuggaccggcguggcucagaaugguacgucuuuugcaugcaagcgccgaagcauaaaauccuucuuuucacgucucaacugguuacaucaacugaaguauaaguacccagcccuuaaugucacuaugcccaacaaugagaaauucgacaaguuguauaucuggggagugcaccacccuaguaccgauagcgaccagauuucucuguacgcucaggccuccgggagaguaacaguuucaacuaaaaggagccagcaaaccgugaucccaaacauuggcagucggcccuggguccgcggcgugucuuccagaaucagcauauacuggacaauugugaagccuggggauauccuacucauuaacucgaccggaaaucugaucgcgccaagggguuauuuuaaaauccggucuggcaaguccucaauuaugcgcaguaacgcaccgauagggaaguguaauagcgaaugcaucacgcccaacggauccauuccuaaugacaaaccauuccagaacgucaaucgaaucacuuacggcgccugucccagauauguuaagcagaacacacuuaaacuggcuaccgguaugaggaaugugccugagaagcagacucgggggauauuuggagccauugcaggcuucaucgaaaacggcugggaggggaugguagacggaugguacgguuuucgucaucaaaauucugagggcacagggcaggcugccgauuugaaaagcacccaggcggccaucaaccaaauuaauggaaagcucaaccgccugaucgagaaaacgaaugaaaaguuccaccagauugaaaaggaguucucagaaguggagggcagaauacaggacuuagagaaauaugucgaagauaccaagaucgaccuguggaguuacaacgcagagcuccuuguggcucuggaaaaccagcauacaauugauuugacugacuccgagaugaauaaacuauuugaaaggacccggaagcaacugcgagagaacgccgaggauauggguaaugggugcuucaaaaucuaucacaagugugacaacgcuugcaucggcagcauucgcaauggaacauacgaucacgacguuuacagagaugaagcccucaacaauagguuucagauaaagggcguggagcugaaaucuggguauaaggacuggauccuuuggauuucauucgcaaucaguugcuuucuguugugugucgugcuccugggauucauuaugugggccugccagaaagguaacauccgguguaauauaugcaucuga

SEQ ID NO: 128148 - RNA, 1701 nt, Artificial Sequence; identical to SEQ ID NO: 128120
  derived and/or modified CDS sequence (opt3) from hemagglutinin__InfluenzaA__AAX57934

SEQ ID NO: 128149 - RNA, 1701 nt, Artificial Sequence
  derived and/or modified CDS sequence (opt3) from hemagglutinin__InfluenzaA__AAX57944
augaagaccaucauugcccugagcuacauacucugccuuguguucgcucagaaacugcccggcaacgacaauuccacagcaacuuuguguuuagggcaccaugccgucccuaacggaacgcugguuaagaccaucacaaaugaucaaauugaggugacuaacgcgaccgaauugguacagucuucaaguacagguagaaucugcgacagcccacaccagauucucgauggcgagaauuguacccugaucgacgcccuucugggggauccgcauugcgacggauuucagaacaaagaaugggauuuguucguggagagguccaaggcuuauucuaauuguuaccccuaugacgucccugauuacgugucgcuccggucacugguugcaagcaguggcacucuggaauuuaacaaugaguccuucaacuggacagguguggcccaaaaugggaccucuagcgcuugcaaacgccgauccgacaagucauuuuucagucgucucaacugguuacaccagcugaaguauaaauacccagcacuuaaugucacgaugcccaacaaugagaaguuugauaaauuguauauauggggagugcaucacccuggcacugacagcgaucagaucucucuguacgcccaggcuuccggcagaguaaccguuucaacaaagaggagccaacagacugugauuccaaacaucgggaguggacccuggguccggggugugucuucccgcauuagcaucuacuggaccauagugaaaccuggcgacauucuacucaucaacucgacagggaaucugauugccccaagaggauauuucaagaucaggucuggcaaguccucaaucaugcggagugacgcgccgauugguaaauguaacagcgaaugcauaacccccaauggguccaucccuaacggaaagccauuucagaaugucaaccgcauuacguacggcgcauguccccgauauguuaaacagaauacucuuaagcuggccacaggcaugagaaacgugccugagaaacaaaccagggggaucuucggagcuauagccgguuuuauugaaaauggcugggaggggaugauggauggaugguacggcuuccggcaccagaacucugaggguacugggcaggcagcugaccuaaagagcacacaagccgcgaucaaucagaucaacggcaaacucaaucgucugauugaaaagaccaacgagaaguuucaucagaucgaaaaagaguucucagaaguagagggacgcauucaggauuuagagaaguauguggaagacacgaaaauagaucuguggaguuacaaugccgagcuccuugucgcacuggaaaaccaacacaccaucgacuugacagauuccgagaugaacaagcuauucgaaagaacuaaaaagcagcugagggagaaugcugaggacaugggcaacgggugcuuuaagauuuaucauaaaugugauaaugccugcaucggaagcauccggaacgguaccuacgaccacgauguguaccgagacgaagcucucaauaaccgcuuccagauuaagucuguugagcugaaaucaggcuauaaggacuggauacuuuggaucaguuuugccauuagcugcuuccuguuguguaucgugcuccugggguuuauuaugugggcaugccagaaaggaaauaucagauguaacauaugcaucuga

SEQ ID NO: 128150 - RNA, 1701 nt, Artificial Sequence
  derived and/or modified CDS sequence (opt3) from hemagglutinin__InfluenzaA__AAX76623
augaagaccaucauugcccugagcuacauacucugccuuguguucgcucagaaacugcccggcaacgacaaguccacagcaacuuuguguuuagggcaccaugccgucccuaauggaacgaucguuaaaaccauuacaaacgaucaaaucgaggugacuaaugcgaccgaacugguacagucuucaaguacagguggcauuugcgacagcccacaccagauccuagauggggagaacuguacccucauagacgcucugcuuggagauccgcagugcgacggcuuucaaaauaagaaaugggaucuguucguggaaagauccaaggccuauucuaacuguuaccccuaugacgucccugauuacgcaucguugaggucacucguggccagcagugguacucuggaguuuaauaacgaauccuucgacuggacagggguuacccagaauggaacgucuagcgcuugcaagcggcgcuccaacaaaucauuuuucagucgacugaauuggcucacucauuuaaaguauaaauacccagcacugaacgugaccaugcccaauaacgagaaguuugauaaacuuuauaucuggggcguccaccauccuggcacagacagcgaucagauuucuuuguacgcccaggcuuccgggcguaucacugugucaaccaagagaagccaacagacaguaauuccaaauaucggaaguaggccccggguucgcgacauaucuuccagaauuagcaucuacuggaccauugugaagccuggugacauccugcuaaucaacucgacgggcaaccucauugccccaaggggguauuucaaaauacggucuggaaaguccucaaucaugcgcagugaugcgccgauuggcaaauguaauagcgagugcaucacucccaacgguuccauaccuaaugacaagccauuucagaacgucaaucgaauuacauacggggcaugucccagauaugugaaacagaacacccugaagcuggccacuggaaugaggaaugugccugaaaaacaaacacggggcaucuucggcgcuaucgccggguuuauugagaacggaugggaagguauggucgauggcugguacggguuccgucaccagaauagcgagggaaccggccaggcagcugaccuuaagagcacgcaagccgcgaucaaccagauuaaugguaaguugaaccgccucauagggaaaaccaaugagaaguuucaccagaucgaaaaagaguucucagaaguugagggcaggauucaggaucuggaaaaguauguggaggacacaaaaaucgauuuauggaguuacaacgccgagcugcucguagcacuugaaaaucaacauacuaucgaccugaccgauuccgagaugaacaaguuguucgaaagaacaaagaaacagcuacgggagaacgcugaagacaugggaaauggcugcuuuaagauuuaucacaaaugugauaacgccugcauagggagcauccgaaauggaacuuacgaccaugacguguaccgcgaugaggcucugaacaauagauuccagauuaagggugucgagcucaggucuggcuauaaagacuggauccuguggauuucauuugccaucaguugcuuccuucuguguguggcaucuuugggguuuauaaugugggccugccagaagggaaacauccgguguaauauuugcaucuga

SEQ ID NO: 128151 - RNA, 1701 nt, Artificial Sequence
  derived and/or modified CDS sequence (opt3) from hemagglutinin__InfluenzaA__AAX76643
augaagaccaucauugcccugagcuacuuccucugccuuguguuugcucagaaacugcccggcaacgacaauuccacagcaacuuuguguuuagggcaccaugccgucccuaacggaacgauaguuaagaccaucacaaaugaucaaauugaggugacuaacgcgaccgaacugguacagucuucaaguacagguggcaucugcgacagcccacaccagauucuagauggggagaauuguacccucaucgacgcucugcuuggagauccgcagugcgacggcuuccaaaacaaaaagugggaucuguuuguggaaagauccaaagccuauucuaauuguuaccccuaugacgucccugauuacgcaucguugaggucacucguggccagcagugguacucuggaguucaacaaugaauccuuuaacuggacagggguuacccagaauggaacgucuagcgcuugcgagcggcgcuccaacaagucauucuuuagucgacugaauuggcucacucauuuaaaguauaaauacccagcacugaacgugaccaugcccaauaacgagaaguucgacaaacuuuauauauggggcguccaccauccuggcacagauagcgaccagaucucuuuguacgcccaggcuuccgggcguauuacugugucaaccaagagaagccaacagacaguaaucccaaacauuggaaguaggccccggguucgcgaugugucuuccagaaucagcauauacuggaccauugucaaaccuggugacauccugcuaauuaauucgacgggcaaccucaucgccccaaggggguauuuuaagauccggucuggaaaguccucaauuaugcgcagugacgcgccgauaggcaaauguaauagcgaaugcaucacucccaacgguuccauuccuaaugauaagccauuccagaacgugaaucgaaucacauacggggcaugucccagauaugugaaacagaacacccugaaacuugccacuggaaugaggaaugucccugagaaacaaacacggggcauauuuggcgcuauugccggguucaucgaaaacggaugggaggguaugguugacggcugguacggguuucgucaccagaauagcgagggaaccggccaggcagcugaucugaagucuacgcaagccgcgaucaaccagauuaaugguaaauugaaccgccucaucgggaagaccaaugaaaaguuccaccagauugagaaagaguucucagaaguggaaggcagaauacaggaccuggagaaguauguagaggauacaaaaaucgacuuauggaguuacaacgccgaacugcucguggcacuugagaaccaacauacuauugaucugaccgacuccgaaaugaauaaguuguuugagaggacaaagaagcagcuacgggaaaacgcugaggauaugggaaauggcugcuucaagaucuaucacaaaugugacaacgccugcaucgggagcauucgaaauggaacuuacgaucaugacgucuaccgcgacgaggcucugaacaauagauuucagauaaaggguguggaacucaaaucuggcuauaaggauuggauccuguggauuucauucgccaucaguugcuuucuucuguguguugcauugcucggguucauuaugugggccugccagaaaggaaacaucaggugugacauaugcaucuga

SEQ ID NO: 128152 - RNA, 1701 nt, Artificial Sequence
  derived and/or modified CDS sequence (opt3) from hemagglutinin__InfluenzaA__AAX76653
augaagaccaucauugcccugagcuacuuccucugccuuguguuugcucagaaacugcccggcaacgacaauuccacagcaacuuuguguuuagggcaccaugccgucccuaacggaacgauaguuaagaccaucacaaaugaucaaauugaggugacuaacgcgaccgaacugguacagucuucaaguacagguggcaucugcgacagcccacaccagauucuagauggggagaauuguacccucaucgacgcucugcuuggagauccgcagugcgacggcuuccaaaacaaaaagugggaucuguuuguggaaagauccaaagccuauucuaauuguuaccccuaugacgucccugauuacgcaucguugaggucacucguggccagcagugguacucuggaguucaacaaugaauccuuuaacuggacagggguuacccagaauggaacgucuagcgcuugcgagcggcgcuccaacaagucauucuuuagucgacugaauuggcucacucauuuaaaguauaaauacccagcacugaacgugaccaugcccaauaacgagaaguucgacaaacuuuauauauggggcguccaccauccuggcacagauagcgaccagaucucuuuguuugcccaggcuuccgggcguauuacugugucaaccaagagaagccaacagacaguaaucccaaacauuggaaguggucccaggguucgggaugugucuucccgcaucagcauauacuggaccauugucaaaccuggcgacauccugcuaauuaauucgacggggaaccucaucgccccaagaggauacuucaagaucaggucuggcaaguccucaauuaugcggagugacgcgccgauagguaaauguaauagcgaaugcaucacucccaacggguccauuccuaaugauaagccauuucagaacgugaaucgcaucacauauggagcauguccccgauacgugaaacagaacacccugaaacuugccacuggcaugagaaaugucccugagaaacaaacaaggggcauauucggggcuauugccggauuuaucgaaaacgguugggagggcaugguugacgggugguauggauuccggcaccagaauagcgagggcaccggucaggcagcugaucugaagucuacgcaagccgcgaucaaccagauuaaugggaaauugaaccgucucaucggcaagaccaaugaaaaguuccaccagauugagaaagaauuuucagagguggaaggacgcauacaggaccuggagaaguacguagaggauacaaaaaucgacuuauggaguuauaacgccgaacugcucguggcacuugagaaccaacauacuauugaucugaccgacuccgaaaugaauaaguuguucgagagaacaaagaagcagcuaagggaaaacgcugaggauaugggcaaugggugcuuuaagaucuaccacaaaugugacaacgccugcaucggaagcauucggaaugguacuuaugaucaugacgucuaccgagacgaggcucugaacaaucgcuuccagauaaagggcguggaacucaaaucuggguacaaggauuggauccuguggauuucauuugccaucaguugcuuccuucuguguguugcauugcucggauuuauuaugugggccugccagaaaggcaacaucagaugugacauaugcaucuga

SEQ ID NO: 128153 - RNA, 1701 nt, Artificial Sequence
  derived and/or modified CDS sequence (opt3) from hemagglutinin__InfluenzaA__AAX76663
augaagaccaucauugcccugagcuacauacucugccuuguguucgcucagaaacugcccggcaacgacaauuccacagcaacuuuguguuuagggcaccaugccgucccuaacggaacgcugguuaagaccaucacaaaugaucaaauugaggugacuaacgcgaccgaauugguacagucuucaaguacagguagaaucugcgacagcccacaccagauucucgauggcgagaauuguacccugaucgacgcccuucugggggauccgcauugcgacggauuucagaacaaagaaugggauuuguucguggagagguccaaggcuuauucuaauuguuaccccuaugacgucccugauuacgugucgcuccggucacugguugcaagcaguggcacucuggaauuuaacaaugaguccuucaacuggacagguguggcccaaaaugggaccucuagcgcuugcaaacgccgauccgacaagucauuuuucagucgucucaacugguuacaccagcugaaguauaaauacccagcacuuaaugucacgaugcccaacaaugagaaguuugauaaauuguauauauggggagugcaucacccuggcacugacagcgaucagaucucucuguacgcccaggcuuccggcagaguaaccguuucaacaaagaggagccaacagacugugauuccaaacaucgggaguggacccuggguccggggugugucuucccgcauuagcaucuacuggaccauagugaaaccuggcgacauucuacucaucaacucgacagggaaucugauugccccaagaggauauuucaagaucaggucuggcaaguccucaaucaugcggagugacgcgccgauugguaaauguaacagcgaaugcauaacccccaauggguccaucccuaacgauaagccauuucagaaugucaaccgcauuacguacggacccuguccucgauauguuaaacagaauacucuuaagcuggcaacaggcaugagaaacgugccagagaaacaaaccaggggcaucuucggggccauagcuggauuuauugaaaaugguugggagggcaugauggacgggugguacggauuccggcaccagaacucugagggcacuggucaggccgcagaucuaaagagcacacaagcugccaucaaucagaucaacgggaaacucaaucgucugauugaaaagaccaacgagaaguuucaucagaucgaaaaagaguucucagaaguagagggccgcauucaggacuuagagaaguauguggaagauacgaaaauagaccuguggaguuacaaugcggagcuccuugucgcccuggaaaaccaacacaccaucgauuugacagacuccgagaugaacaagcuauucgaaagaacuaaaaagcagcugagggagaaugcagaggauaugggaaacggcugcuuuaagauuuaucauaaaugugacaaugcuugcaucgggagcauccggaacggaaccuacgaucacgacguguaccgagacgaagcccucaauaaccgcuuccagauuaaggguguugagcugaaaucuggcuauaaggauuggauacuuuggaucucauuugcuauuaguugcuuccuguuguguaucgugcuccugggguuuauuaugugggccugccagaaaggaaauaucagauguaacauaugcaucuga

SEQ ID NO: 128154 - RNA, 1701 nt, Artificial Sequence
  derived and/or modified CDS sequence (opt3) from hemagglutinin__InfluenzaA__AAX76673
augaagaccaucauugcccugagcuacauacucugccuuguguucgcucagaaacugcccgucaacgacaauuccacagcaacuuuguguuuaggccaccaugccguuccuaacgggacgcuggugaagaccaucacaaaugaucacauugagguaacuaacgcgaccgaacuugugcaaucuucaaguacaggaagaaucugcgacagcccacaucagauucucgauggugagaauuguacccugaucgacgcucuacugggcgauccgcacugcgacggguuucagaacaaagaaugggauuuguucgucgagagguccacugccuauucuaauuguuaccccuaugacgugccugauuacgcaucgcuccggucacugguugccagcaguggaacacuggaauuuaacaaugaguccuucaacuggaccggcguggcucagaaugguacgucuagcgcaugcaagcgccgauccauaaaaucauuuuucagucgucucaacugguuacaucaacugaaguauaaguacccagcccuuaaugucacuaugcccaacaaugagaaauuugacaaguuguauaucuggggagugcaccacccuagcaccgauucugaccagauuucccuguacgcucaggccucagggagaguaacaguuagcacuaaaaggagucagcaaaccgugaucccaaacauuggcucucggcccuggguccgcggcguguccagcagaaucucgauauacuggacaauugugaagccuggggauauccuacucauuaacucuaccggaaaucugaucgcgccaagggguuauuucaaaauccgguccggcaagucaaguauuaugcgcagcaacgcaccgauagggaaguguaauuccgaaugcaucacgcccaacggaucuauuccuaaugacaaaccauuucagaacgucaaucgaaucacuuacggcgccugucccagauauguuaagcagaacacacuuaaacuggcuaccgguaugaggaaugugccugagaagcagacucgggggauauucggagccauugcaggcuuuaucgaaaacggcugggaggggaugguagacggaugguacgguuuccgucaucaaaauagcgagggcacagggcaggcugccgauuugaaaucaacccaggcggccaucaaccaaauuaauggaaagcucaaccgccugaucgagaaaacgaaugaaaaguuucaccagauugaaaaggaguucagugaaguggagggcagaauacaggacuuagagagguaugucgaagauaccaaaaucgaccugugguccuacaacgcagagcuccuuguggcucuggaaaaccagcauacaauugauuugacugacagcgagaugaauaagcuauucgaacggacccgaaaacaacugcgcgagaacgccgaggauauggguaaugggugcuuuaagaucuaucacaaaugugacaacgcuugcaucggcucuauuagaaauggaacauacgaucacgacguuuacagggaugaagcccucaacaaucgguuccagauaaagggcguggagcugaagucaggguauaaagacuggauccuuuggauuaguuuugcaaucagcugcuuccuguugugugucgugcuccugggauuuauuaugugggccugccagaaggguaacauccgcuguaauauaugcaucuga

SEQ ID NO: 128155 - RNA, 1701 nt, Artificial Sequence
  derived and/or modified CDS sequence (opt3) from hemagglutinin__InfluenzaA__AAX76683
augaagaccaucauugcccugagcuacauacucugccuuguguucgcucagaaacugcccgucaacgacaauuccacagcaacuuuguguuuaggccaccaugccguuccuaacgggacgcuggugaagaccaucacaaaugaucacauugagguaacuaacgcgaccgaacuugugcaaucuucaaguacaggaagaaucugcgacagcccacaucagauucucgauggugagaauuguacccugaucgacgcucuacugggcgauccgcacugcgacggguuucagaacaaagaaugggauuuguucgucgagagguccacugccuauucuaauuguuaccccuaugacgugccugauuacgcaucgcuccggucacugguugccagcaguggaacacuggaauuuaacaaugaguccuucaacuggaccggcguggcucagaaugguacgucuagcgcaugcaagcgccgauccauaaaaucauuuuucagucgucucaacugguuacaucaacugaaguauaaguacccagcccuuaaugucacuaugcccaacaaugagaaauuugacaaguuguauaucuggggagugcaccacccuagcaccgauucugaccagauuucccuguacgcucaggccucagggagaguaacaguuagcacuaaaaggagucagcaaaccgugaucccaaacauuggcucucggcccuggguccgcggcguguccagcagaaucucgauauacuggacaauugugaagccuggggauauccuacucauuaacucuaccggaaaucugaucgcgccaagggguuauuucaaaauccgguccggcaagucaagugucaugcgcagcaacgcaccgauugggaaguguaauuccgaaugcauaacgcccaacggaucuaucccuaaugacaaaccauuucagaacguuaaucgaauuacuuacggcgccugucccagauaugugaagcagaacacacuuaaacuggcuaccgguaugaggaauguaccugagaagcagacucgggggaucuucggagccauagcaggcuuuauugaaaacggcugggaggggaugguggacggaugguacgguuuccgucaucaaaauagcgagggcacagggcaggcugccgauuugaaaucaacccaggcggccaucaaccaaaucaauggaaagcucaaccgccugauugagaaaacgaaugaaaaguuucaccagaucgaaaaggaguucagugaagucgagggcaggauucaggacuuagagaaauauguggaagauaccaagauagaccugugguccuacaacgcagagcuccuuguugcucuggaaaaccagcauacaaucgauuugacugacagcgagaugaauaaacuauucgaaagaacccggaagcaacugcgagagaacgccgaggauauggguaaugggugcuuuaaaauuuaucacaagugugacaacgcuugcaucggcucuauccgcaauggaacauacgaucacgacguguacagagaugaagcccucaacaauagguuccagauuaagggcgucgagcugaaaucaggguauaaggacuggauacuuuggaucaguuuugcaauuagcugcuuccuguugugugugguacuccugggauuuaucaugugggccugccagaaagguaacauucgguguaauaucugcauauga

SEQ ID NO: 128156 - RNA, 1701 nt, Artificial Sequence; identical to SEQ ID NO: 128120
  derived and/or modified CDS sequence (opt3) from hemagglutinin__InfluenzaA__AAX76713

SEQ ID NO: 128157 - RNA, 1701 nt, Artificial Sequence
  derived and/or modified CDS sequence (opt3) from hemagglutinin__InfluenzaA__AAX76723
augaagaccaucauugcccugagcuacauacucugccuuguguucgcucagaaacugcccgucaacgacaauuccacagcaacuuuguguuuaggccaccaugccguuccuaacgggacgcuggugaagaccaucacaaaugaucacauugagguaacuaacgcgaccgaacuugugcaaucuucaaguacaggaagaaucugcgacagcccacaucagauucucgauggugagaauuguacccugaucgacgcucuacugggcgauccgcacugcgacggguuucagaacaaagaaugggauuuguucgucgagagguccacugccuauucuaauuguuaccccuaugacgugccugauuacgcaucgcuccggucacugguugccagcaguggaacacuggaauuuaacaaugaguccuucaacuggaccggcguggcucagaaugguacgucuagcgcaugcaagcgccgauccauaaaaucauuuuucagucgucucaacugguuacaucaacugaaguauaaguacccagcccuuaaugucacuaugcccaacaaugaggaauuugacaaauuguauaucuggggagugcaccacccuagcaccgauucugaccagauuucccuguacgcucaggccucagggagaguaacaguuagcacuaagaggagucagcaaaccgugaucccaaacauuggcucucggcccuggguccgcggcguguccagcaucauaucgauuuacuggacaaucgugaaaccuggggauauucuacucaucaacucuaccggaaaucugaucgcgccaagagguuauuucaagauuagguccggcaaaucaaguauaaugcggagcaacgcaccgaucgggaaguguaauuccgagugcauuacgcccaacggaucuaucccuaaugacaagccauuucagaacgucaaucgcauaacuuacggcgccuguccccgauauguuaaacagaacacacuuaagcuggcuaccgguaugagaaaugugccugaaaaacagacuagggggauuuucggagccaucgcaggcuuuaucgagaacggcugggaggggaugguagacggaugguacgguuuccggcaucaaaauagcgaaggcacagggcaggcugccgauuugaagucaacccaggcggccauuaaccaaaucaauggaaaacucaaccgucugauugagaagacgaaugaaaaauuucaccagauagagaaggaguucagugaaguggagggccgcauccaggacuuagaaaaguaugucgaggauaccaaaauugaccugugguccuacaacgcagaacuccuuguggcucuggagaaccagcauacaaucgauuugacugacagcgaaaugaauaagcuauucgagagaaccaggaaacaacugcgggagaacgccgaagauauggguaaugggugcuuuaagaucuaucacaaaugugacaacgcuugcauuggcucuauacgaaauggaacauacgaucacgacguuuaccgcgaugaggcccucaacaauagauuccagaucaagggcguggaacugaagucaggguauaaagacuggauucuuuggaucaguuuugcaauuagcugcuuccuguugugugucgugcuccugggauuuaucaugugggccugccagaaggguaacauaagguguaauaucugcauuuga

SEQ ID NO: 128158 - RNA, 1701 nt, Artificial Sequence
  derived and/or modified CDS sequence (opt3) from hemagglutinin__InfluenzaA__AAX76733
augaagaccaucauugcccugagcuacauacucugccuuguguucgcucagaaacugcccggcaacgacaauuccacagcaacuuuguguuuagggcaccaugccgucccuaacggaacgcugguuaagaccaucacaaaugaucaaauugaggugacuaacgcgaccgaacuuguacagucuucaaguacagacagaaucugcgauagcccacaccagauucucgacgguggcaauuguacccugaucgaugcucuacugggggacccgcauugcgauggauuucagaacaaagagugggacuuguucguggaaagguccaaggccuauucuaauuguuaccccuaugaugucccugacuacgugucgcuccggucacugguugcaagcaguggcacucuggaguuuaacaaugaauccuucaacuggacagguguggcccaaaaugggaccucuagcgcuugcaaacgccgauccgauaagucauuuuucagucgucucaacugguuacaccagcugaagaauaaauauccagcacuuaacgucgccaugcccaauaacgagaaguuugacaaauuguacauauggggagugcaucacccuggcacggauagcgaccagaucucucuguaugcucaggccuccggcagaguaacuguuucaaccaagaggagccaacagacagugauuccaaacaucgggagucggccccgcgucagagacauuucuuccaggaucagcauauacuggacuauugugaaaccuggagauauccuacucauuaauucgaccgguaaccugaucgcgccacggggcuacuucaagauccgcucugggaaguccucaauuaugcgaagugacgcaccgauaggaaaauguaauagcgagugcaucacacccaacggcuccauuccuaaugauaagccauuucagaacgugaauagaaucaccuauggugccugucccagguacgucaaacagaacacgcuuaagcuggcuacugggaugcggaauguuccugaaaaacaaacacguggaauauucggcgccauugcaggcuuuaucgagaacgggugggaaggaaugguggacgguugguauggcuuccgccaccagaauuacgaggggaccggacaggcugccgauuugaagucuacucaagcggccaucaaccagauuaauggcaaacucaacagacugaucgagaagacaaaugaaaaguuucaucagauugagaaagaguucagcgaaguagaagguaggauacaggacuuagagaaguauguggaggauaccaaaaucgaccuguggucauacaacgcagaacuccuugucgcucuggagaaccaacacacgauugauuugaccgacagugaaaugaauaagcuauucgagcggacuaaaaagcagcugcgagaaaacgccgaggauauggggaauggcugcuuuaagaucuaucauaaaugugacaacgcuugcaucggauccauucgcaauggcacauacgaccacgauguguacagagacgaggcccucaacaauagguuccagauaaaggggguugaacugaaaagcggauauaaggauuggauccuuuggauuucuuuugcaaucucaugcuuccuguuguguauugugcuccuggguuuuaucaugugggccugccagaaaggcaacauacgguguaauaucugcauuuga

SEQ ID NO: 128159 - RNA, 1701 nt, Artificial Sequence
  derived and/or modified CDS sequence (opt3) from hemagglutinin__InfluenzaA__AAX76743
augaagaccaucauugcccugagcuacauacucugccuuguguucgcucagaaacugcccggcaacgacaauuccacagcaacuuuguguuuagggcaccaugccgucccuaacggaacgcugguuaagaccaucacaaaugaucaaauugaggugacuaacgcgaccgaacuuguacagucuucaaguacagguagaaucugcgacagcccacaccagauucucgauggcgagaauuguacccugaucgacgcucuacugggggauccgcauugcgacggauuucagaacaaagaaugggauuuguucguggagagguccaaggccuauucuaauuguuaccccuaugacgucccugauuacgugucgcuccggucacugguugcaagcaguggcacucuggaauuuaacaaugaguccuucaacuggacagguguggcccaaaaugggaccucuagcgcuugcaaacgccgauccaacaagucauuuuucagucgucucaauugguuacaccagcugaagaacaaauauccagcacuuaaugucgccaugcccaacaacgagaaguuugacaaauuguacauauggggagugcaucacccuggcacggauagcgaccagaucucucuguaugcucaggccuccggcagaguaacuguuucaaccaagaggagccaacagacagugauuccaaauaucgggagucggccccgcgucagagauauuucuuccaggaucagcauauacuggacuauugugaaaccuggagacauccuacucauuaacucgaccgguaaucugaucgcgccacggggcuacuucaagauccgcucugggaaguccucaauuaugcgaagugacgcaccgauaggaaaauguaacagcgaaugcaucacacccaauggcuccauuccuaacgauaagccauuucagaaugugaacagaaucaccuauggugccugucccagguacgucaaacagaauacgcuuaagcuggcuacugggaugcggaacguuccugagaaacaaacacguggaauauucggcgccauugcaggcuuuaucgaaaaugggugggagggaaugauggacgguugguauggcuuccgccaccagaacucugaggggaccggacaggcugccgauuugaaaagcacucaagcggccaucaaucagauuaacggcaaacucaauagacugaucgaaaagacaaacgagaaguuucaucagauugaaaaagaguucucagaaguggaggguaggauacaggacuuagagaaguacguagaagauaccaaaaucgaccuguggaguuauaacgcagagcuccuuguggcucuggaaaaucaacacacgauugauuugaccgacuccgagaugaacaagcuauucgaacggacaaagaagcagcugcgagagaaugccgaggauauggggaacggcugcuuuaagaucuaccauaaaugugacaaugcuugcaucggaagcauucgcaacggcacuuaugaucacgacgucuacagagacgaagcccucaauaacagguuccagauaaaggggguggagcugaaaucuggauacaaggauuggauccuuuggauuucauuugcaaucaguugcuuccuguuguguauuguucuccuggguuuuaucaugugggccugccagaaaggcaauauacgguguaacaucugcauuuga

SEQ ID NO: 128160 - RNA, 1701 nt, Artificial Sequence
  derived and/or modified CDS sequence (opt3) from hemagglutinin__InfluenzaA__AAX76763
augaagaccaucauugcccugagcuacauacucugccuuguguucgcucagaaacugcccggcaacgacaauuccacagcaacuuuguguuuagggcaccaugccgucccuaacggaacgaucguuaagaccauuacaaaugaucaaaucgaggugacuaacgcgaccgaacugguacagucuucaaguacagguggcauuugcgacagcccacaccagauccuagauggggagaauuguacccucauagacgcucugcuuggagauccgcagugcgacggcuuucaaaacaaaaagugggaucuguucguggaaagauccaaagccuauucuaauuguuaccccuaugacgucccugauuacgcaucguugaggucacucguggccagcagugguacucuggaguuuaacaaugaauccuucgacuggacagggguuacccagaacggaacgucuagcgcuugcaagcggcgcuccaauaagucauuuuucagucgacugaacuggcucacucauuuaaaauauaaguacccagcacugaaugugaccaugcccaacaaugagaaauuugauaaacuuuauaucuggggcguccaccauccuggcacagacagcgaucagauuucuuuguacgcccaggcuuccgggcguaucacugugucaaccaagagaagccaacagacaguaauuccaaacaucggaaguaggccccggguucgcgacauaucuuccagaauuagcaucuacuggaccauugugaagccuggugacauccugcuaaucaacucgacgggcaaucucauugccccaaggggguauuucaagauacggucuggaaaauccucaaucaugcgcagugaugcgccgauuggcaaguguaacagcgagugcaucacucccaaugguuccauaccuaacgacaaaccauuucagaaugucaaccgaauuacauacggggcaugucccagauaugugaagcagaauacccugaaacuugccacuggaaugaggaacgugccugaaaagcaaacacggggcaucuucggcgcuaucgccggguuuauugagaauggaugggaagguauggucgauggcugguacggguuccgucaccagaacucugagggaaccggccaggcagcugaccugaaaagcacgcaagccgcgaucaaucagauuaacgguaaguugaaucgccucauagggaagaccaacgagaaauuucaccagaucgaaaaggaguucucagaaguugagggcaggauucaggaucuggaaaaauauguggaggacacaaagaucgauuuauggaguuacaaugccgagcugcucaucgcacuugaaaaccaacauacuauugaccugaccgauuccgagaugaacaaauuguucgaaagaacaaagaagcagcuacgggagaaugcugaagacaugggaaacggcugcuuuaaaauauaucacaagugugauaaugccugcaucgggagcauucgaaacggaacuuacgaccaugacguauaccgcgaugaggcucugaauaacagauuccagaucaaagguguggagcucaagucuggcuauaaagacuggauucuguggaucucauuugccauaaguugcuuccuucugugugucgcauugcucggguuuaucaugugggccugccagaagggaaauauuagguguaacaucugcauuuga

SEQ ID NO: 128161 - RNA, 1701 nt, Artificial Sequence; identical to SEQ ID NO: 128080
  derived and/or modified CDS sequence (opt3) from hemagglutinin__InfluenzaA__AAY18086

SEQ ID NO: 128162 - RNA, 1701 nt, Artificial Sequence
  derived and/or modified CDS sequence (opt3) from hemagglutinin__InfluenzaA__AAY18096
augaagaccaucauugcccugagcugcauacucugucuuguguucgcucagaaacugcccggcaacgacaauuccacagcaacuuugugcuuagggcaccaugccgucccuaacggaacgaucguuaagaccauuacaaaugaucaaaucgaggugacuaacgcgaccgaacugguacagucuucaaguacagguggcauuugugacagcccacaccagauccuagauggggagaauugcacccucauagacgcucugcuuggagauccgcagugugacggcuuucaaaacaaaaagugggaucuguucguggaaagauccaaagccuacucuaauugcuaucccuacgacgucccugauuaugcaucguugaggucacucguggccagcagugguacucuggaguuuaacaaugaauccuucaacuggacagggguuacccagaauggaacgucuagcgcuugugagcggcgcuccaacaagucauuuuucagucgacugaauuggcucacucauuuaaaguacaaauauccagcacugaacgugaccaugcccaauaacgagaaguuugacaaacuuuacaucuggggcguccaccauccuggcacagauagcgaccagauuucuuuguaugcccaggcuuccgggcguaucacugugucaaccaagagaagccaacagacaguaauuccaaacaucggaaguaggccccggguucgcgaugugucuuccagaauaagcauuuacuggaccaucgucaaaccuggugacauucugcuaaucaauucgacgggcaaccucaucgccccaaggggguacuucaagauucggucuggaaaguccucaauaaugcgcagugacgcgccgaucggcaaaugcaauagcgaauguauuacucccaacgguuccaucccuaaugauaagccauuucagaacgugaaucgaauaacauauggggcaugccccagauacgugaaacagaacacccugaaacuugccacuggaaugaggaaugucccugagaaacaaacacggggcauuuucggcgcuaucgccggguuuaucgaaaacggaugggaggguaugguugacggcugguauggguuccgucaccagaauagcgagggaaccggccaggcagcugaucugaagucuacgcaagccgcgauuaaccagaucaaugguaaauugaaccgccucauugggaagaccaaugaaaaguuucaccagauagagaaagaguucucagaaguggaaggcagaauccaggaccuggagaaguacguagaggauacaaaaauugacuuauggaguuauaacgccgaacugcucguggcacuugagaaccaacauacuaucgaucugaccgacuccgaaaugaauaaguuguucgagaggacaaagaagcagcuacgggaaaacgcugaggauaugggaaauggcuguuuuaagaucuaccacaaaugcgacaacgccugcauugggagcauacgaaauggaacuuaugaucaugacgucuaccgcgacgaggcucugaacaauagauuccagaucaaggguguggaacucaaaucuggcuacaaggauuggauucuguggaucucauuugccauuaguuguuuccuucugugcguugcauugcucggguuuaucaugugggccugucagaaaggaaacauaaggugcgacaucuguauuuga

SEQ ID NO: 128163 - RNA, 1701 nt, Artificial Sequence; identical to SEQ ID NO: 128095
  derived and/or modified CDS sequence (opt3) from hemagglutinin__InfluenzaA__AAY18106

SEQ ID NO: 128164 - RNA, 1701 nt, Artificial Sequence; identical to SEQ ID NO: 128095
  derived and/or modified CDS sequence (opt3) from hemagglutinin__InfluenzaA__AAY18116

SEQ ID NO: 128165 - RNA, 1701 nt, Artificial Sequence
  derived and/or modified CDS sequence (opt3) from hemagglutinin__InfluenzaA__AAY18126
augaagaccaucauugcccugagcuacauacucugccuuguguucgcucagaaacugcccggcaacgacaauuccacagcaacuuuguguuuagggcaccaugccgucccuaacggaacgaucguuaagaccauuacaaaugaucaaaucgaggugacuaacgcgaccgaacugguacagucuucaaguacagguggcauuugcgacagcccacaccagauccuagauggggagaauuguacccucauagacgcucugcuuggagauccgcagugcgacggcuuucaaaacaaaaagugggaucuguucguggaaagauccaaagccuauucuaauuguuaccccuaugacgucccugauuacgcaucguugaggucacucguggccagcagugguacucuggaguuuaacaaugaaggguucaacuggacaggaguuacccagaauggcacguccucugcuugcaagcgcaagagcaacaaauccuuuuucucacggcugaauuggcucacucauuuaaaguauaaauacccagcacugaacgugaccaugcccaauaacgagaaguuugacaaacuuuauaucuggggcguccaccauccugggacagauaacgaccagauuaguuuguacgcccaggcuagcggacgaaucacugugucuaccaagcguucccaacagacaguaauuccaaauaucgguucaagacccaggguucgggaugugagcagucgcauaucuauuuacuggaccaucgucaagccuggcgacauucugcuaaucaacuccacggggaaucucaucgccccaagaggauauuucaaaauuaggagcggcaagucgucuauaaugcgguccgacgcgccgaucgguaaauguaacucagagugcauuacucccaaugggaguaucccuaacgauaagccauuucagaaugugaaccgcauaacauacggagcauguccccgauaugugaaacagaauacccugaaacuugccacuggcaugagaaacgucccugaaaagcaaacaaggggcauuuucggggcuaucgccggauuuaucgagaaugguugggaaggcaugguugacgggugguacggauuccggcaccagaacagcgagggcaccggucaggcagcugaucugaaguccacgcaagccgcgauuaaucagaucaacgggaaguugaaucgucucauuggcaaaaccaacgagaaguuucaccagauagaaaaagaguucucugaaguggagggacgcauccaggaccuggaaaaguauguagaggauacaaaaauugacuuauggagcuacaacgccgagcugcucguggcacuugaaaaucaacauacuaucgaucugaccgacucagagaugaacaaguuguucgaaagaacaaagaaacagcuaagggagaaugcugaagauaugggcaacgggugcuuuaagaucuaucacaaaugugacaaugccugcauuggaaguauacggaacgguacuuacgaucaugacgucuaccgagacgaggcucugaauaaccgcuuccagaucaagggcguggagcucaaauccggguauaaggauuggauucuguggaucagcuuugccauuucuugcuuccuucuguguguugcauugcucggauuuaucaugugggccugccagaagggcaauauaagauguaacaucugcauuuga

SEQ ID NO: 128166 - RNA, 1701 nt, Artificial Sequence
  derived and/or modified CDS sequence (opt3) from hemagglutinin__InfluenzaA__AAY18136
augaagaccaucauugcccugagcuacauacucugccuuguguucgcucagaaacugcccggcaacgacaauuccacagcaacuuuguguuuagggcaccaugccgucccuaacggaacgaucguuaagaccauuacaaaugaucaaaucgaggugacuaacgcgaccgaacugguacagucuucaaguacagguggcauuugcgacagcccacaccagauccuagauggggagaauuguacccucauagacgcucugcuuggagauccgcagugcgacggcuuucaaaacaaaaagugggaucuguucguggaaagauccaaagccuauucuaauuguuaccccuaugacgucccugauuacgcaucguugaggucacucguggccagcagugguacucuggaguuuaacaaugaauccuucgacuggacagggguuacccagaacggaacgucuagcgcuugcaagcggcgcuccaauaagucauuuuucagucgacugaacuggcucacucauuuaaaauauaaguacccagcacugaaugugaccaugcccaacaaugagaaauuugauaaacuuuauaucuggggcguccaccauccuggcacagacagcgaucagauuucuuuguacgcccaggcuuccgggcguaucacugugucaaccaagagaagccaacagacaguaauuccaaacaucggaaguaggccccggguucgcgacgugucuuccagaauaagcauuuacuggaccaucgucaagccuggugacauucugcuaaucaacucgacgggcaaucucaucgccccaaggggguauuucaagauucggucuggaaaauccucaauaaugcgcagugaugcgccgaucggcaaguguaacagcgagugcauuacucccaaugguuccaucccuaacgacaaaccauuucagaaugugaaccgaauaacauacggggcaugucccagauauauuaagcagaauacccugaaacuugccacuggaaugaggaacgugccugaaaagcaaacacggggcaucuucggcgcuaucgccggguuuauugagaauggaugggaagguauggucgauggcugguacggguuccgucaccagaacucugagggaaccggccaggcagcugaccugaaaagcacgcaagccgcgaucaaucagauuaacgguaaguugaaucgccucauagggaagaccaacgagaaauuucaccagaucgaaaaggaguucucagaaguugagggcaggauucaggaucuggaaaaauauguggaggacacaaagaucgauuuauggaguuacaaugccgagcugcucguagcacuugaaaaccaacauacuaucgaccugaccgauuccgagaugaacaaauuguucgaaagaacaaagaagcagcuacgggagaaugcugaagacaugggaaacggcugcuuuaaaauuuaucacaagugugauaaugccugcauagggagcauccgaaacggaacuuacgaccaugacguguaccgcgaugaggcucugaauaacagauuccagauuaaaggugucgagcucaagucuggcuauaaagacuggauccuguggauuucauuugccaucaguugcuuccuucuguguguggcauugcucggguuuauaaugugggccugccagaagggaaauaucagguguaacauuugcaucuga

SEQ ID NO: 128167 - RNA, 1701 nt, Artificial Sequence; identical to SEQ ID NO: 128120
  derived and/or modified CDS sequence (opt3) from hemagglutinin__InfluenzaA__AAY18156

SEQ ID NO: 128168 - RNA, 1701 nt, Artificial Sequence; identical to SEQ ID NO: 128120
  derived and/or modified CDS sequence (opt3) from hemagglutinin__InfluenzaA__AAY18176

SEQ ID NO: 128169 - RNA, 1701 nt, Artificial Sequence; identical to SEQ ID NO: 128120
  derived and/or modified CDS sequence (opt3) from hemagglutinin__InfluenzaA__AAY18186

SEQ ID NO: 128170 - RNA, 1701 nt, Artificial Sequence; identical to SEQ ID NO: 128121
  derived and/or modified CDS sequence (opt3) from hemagglutinin__InfluenzaA__AAY18564

SEQ ID NO: 128171 - RNA, 1701 nt, Artificial Sequence
  derived and/or modified CDS sequence (opt3) from hemagglutinin__InfluenzaA__AAY18585
augaagaccaucauugcccugagcuacauacucugccuuguguucgcucagaaacugcccgagaacgacaauuccacagcaacuuuguguuuaggccaccaugccgucccuaacgggacgcugguuaagaccaucacaaaugaucaaauugaagugacuaacgcgaccgagcuaguacagucuucaaguacaggaagaaucugcgacagcccacaccagauucucgauggugaaaauuguacccugaucgacgcuuugcugggcgauccgcauugcgacggguuucagaacaaagagugggauuuguucguggaaagguccaaggccuauucuaauuguuaccccuaugacgucccugauuacgugucgcuccggucacugguugcaagcaguggaacucuggaguuuaacaaugaguccuucaacuggacaggcguggcccaaaaugguaccucuagcgcuugcaaacgccgauccgacaagucauuuuucagucgucucaacugguuacaccagcugaaguauaaauacccagcacuuaaugucacgaugcccaacaaugaaaaguuugauaaauuguauauauggggagugcaucacccugggacugacagcgaucagaucucucuguacgcccaggcuuccggcagaguaaccguuucaacaaagaggagccaacagacugugauuccaaacaucggcagucggcccuggguccgcggggugucuuccagaauuagcaucuacuggaccauagugaaaccuggagacauucuacucaucaacucgacagguaaucugauugccccaaggggcuauuucaagauccggucugggaaguccucaaucaugcgcagugacgcgccgauuggaaaauguaacagcgagugcauaacccccaauggcuccaucccuaacgauaagccauuucagaaugucaaccgaauuacguacggucccuguccuagauauguuaaacagaauacucuuaagcuggcaacagggaugaggaacgugccagaaaaacaaacccggggaaucuucggcgccauagcuggcuuuauugagaaugggugggagggaaugauggacgguugguacggcuuccgucaccagaacucugaagggacuggacaggccgcagaucuuaagagcacacaagcugccaucaaucagaucaacggcaaacucaaucgccugauugagaagaccaacgaaaaguuucaucagaucgagaaagaguucucagaaguagaggguaggauucaggacuuagaaaaguauguggaggauacgaaaauagaccuguggaguuacaaugcggaacuccuugucgcccuggagaaccaacacaccaucgauuugacagacuccgaaaugaacaagcuauucgagagaacuaaaaagcagcugcgggagaaugcagaagauauggggaacggcugcuuuaagauuuaucauaaaugugacaaugcuugcaucggaagcauccgaaacggcaccuacgaucacgacguguaccgcgacgaggcccucaauaacagauuccagauuaaggggguugaacugaaaucuggauauaaggauuggauacuuuggaucucauuugcuauuaguugcuuccuguuguguaucgugcuccuggguuuuauuaugugggccugccagaaaggcaauaucagguguaacauaugcaucuga

SEQ ID NO: 128172 - RNA, 1701 nt, Artificial Sequence; identical to SEQ ID NO: 128080
  derived and/or modified CDS sequence (opt3) from hemagglutinin__InfluenzaA__AAY18611

SEQ ID NO: 128173 - RNA, 1701 nt, Artificial Sequence; identical to SEQ ID NO: 128121
  derived and/or modified CDS sequence (opt3) from hemagglutinin__InfluenzaA__AAY27843

SEQ ID NO: 128174 - RNA, 1701 nt, Artificial Sequence; identical to SEQ ID NO: 128080
  derived and/or modified CDS sequence (opt3) from hemagglutinin__InfluenzaA__AAY27853

SEQ ID NO: 128175 - RNA, 1701 nt, Artificial Sequence
  derived and/or modified CDS sequence (opt3) from hemagglutinin__InfluenzaA__AAY27863
augaagaccaucauugcccugagcuacauacucugccuuguguucgcucagaaacugcccggcaacgacaauuccacagcaacuuuguguuuagggcaccaugccgucccuaacggaacgaucguuaagaccauuacaaaugaucaaaucgaggugacuaacgcgaccgaacugguacagucuucaaguacagguggcauuugcgacagcccacaccagaucauagauggggagaauuguacccuaaucgacgcucuccugggagauccgcagugcgacggcuuucaaaacaaaaagugggaucuuuucguggaaagauccaaagccuauucuaauuguuaccccuaugacgucccugauuacgcaucgcugaggucauugguggccagcagugguacucucgaguuuaacaaugaauccuucgacuggacagggguuacccagaacggaacgucuagcgcuugcaagcggcgcuccaauaagucauuuuucagucgacugaacuggcugacucaucucaaauauaaguacccagcauuaaaugugaccaugcccaacaaugagaaauuugauaagcuguauauuuggggcguccaccauccuggcacagacagcgaucagaucucucuuuacgcccaggcuuccgggcguauuacugugucaaccaaaagaagccaacagacaguaaucccaaacauaggaaguaggccccggguucgcgacgugucuuccagaauuagcaucuacuggaccauugucaagccuggugacaucuugcugaucaacucgacgggcaaucuaauugccccaaggggguauuucaagauacggucuggaaaauccucaaucaugauuagugaugcgccgaucggcaaguguaacagcgagugcauaacucccaaugguuccauuccuaacgacaaaccauuucagaaugugaaccgcaucacauacggggcauguccccgauaugugaagcagaauacccucaaacuggccacuggaaugagaaacgucccugaaaagcaaacaaggggcaucuucggcgcuauugccggguuuaucgagaauggaugggaagguaugguugauggcugguacggguuccggcaccagaacucugagggaaccggccaggcagcugaccuuaaaagcacgcaagccgcgauuaaucagauaaacgguaagcugaaucguuugaucgggaagaccaacgagaaauuucaccagauugaaaaggaguucucagaaguggagggccgcauccaggaucucgaaaaauauguagaggacacaaagaucgaucuguggaguuacaaugccgaguuacugguggcacucgaaaaccaacauacuauugaccuuaccgauuccgagaugaacaaacuguucgaaagaacaaagaagcaguugagggagaaugcugaagacaugggaaacggcugcuuuaaaauauaucacaagugugauaaugccugcaucgggagcauucggaacggaacuuacgaccaugacgucuaccgagaugaggcucuaaauaaccgcuuccagaucaaagguguggagcugaagucuggcuauaaagacuggauucucuggaucucauuugccauaaguugcuuccugcuuuguguugcacuguugggguuuaucaugugggccugccagaagggaaauauuagauguaacaucugcauuuga

SEQ ID NO: 128176 - RNA, 1701 nt, Artificial Sequence; identical to SEQ ID NO: 128099
  derived and/or modified CDS sequence (opt3) from hemagglutinin__InfluenzaA__AAY27959

SEQ ID NO: 128177 - RNA, 1701 nt, Artificial Sequence; identical to SEQ ID NO: 128079
  derived and/or modified CDS sequence (opt3) from hemagglutinin__InfluenzaA__AAY27994

SEQ ID NO: 128178 - RNA, 1701 nt, Artificial Sequence; identical to SEQ ID NO: 128079
  derived and/or modified CDS sequence (opt3) from hemagglutinin__InfluenzaA__AAY28004

SEQ ID NO: 128179 - RNA, 1701 nt, Artificial Sequence; identical to SEQ ID NO: 128079
  derived and/or modified CDS sequence (opt3) from hemagglutinin__InfluenzaA__AAY28265

SEQ ID NO: 128180 - RNA, 1701 nt, Artificial Sequence
  derived and/or modified CDS sequence (opt3) from hemagglutinin__InfluenzaA__AAY28275
augaagaccaucauugcccugagcuacauacucugccuuguguucgcucagaaacugcccggcaacgacaauuccacagcaacuuuguguuuagggcaccaugccgucccuaacggaacgcugguuaagaccaucacaaaugaucaaauugaggugacuaacgcgaccgaacuuguacagucuucaaguacagguagaaucugcgacagcccacaccagauucucgauggcgagaauuguacccugaucgacgcucuacugggggauccgcauugcgacggauuucagaacaaagaaugggauuuguucguggagagguccaaggccuauucuaauuguuaccccuaugacgucccugauuacgcaucgcuccggucacugguggccagcaguggcacucuggaauuuaacaaugaguccuucaacuggacagguguugcucaaaaugggaccucuagcgcaugcaaacgccgauccaacaagucauuuuucagucgucucaauugguuacaccagcugaaguauaaauacccagcccuuaacgugacgaugcccaauaacgagaaguuugacaaauuguauauauggggaguccaucacccuagcacugauucugaccagaucucccuguacgcucaggccucaggcagagugaccguaagcacaaagaggagucaacagacuguuauuccaaacaucggcucucggcccugggugcgcggggucuccagcagaauuucgaucuacuggaccauagugaaaccuggagauauucuacucaucaauucuacagguaaccugauugcgccaaggggcuauuucaagauccgguccgggaagucaagugugaugcgcagcgacgcauccaucggaaaauguaauucugaaugcauuaccccgaacggcagcauacccaaugacaagccuuuucagaacgucaaucgaaucacguacggugccuguccaagauauguuaaacagaacacucuuaagcuggcuacagggaugaggaaugugcccgagaaacaaacccggggaauuuucggcgccaucgcaggcuuuauagaaaacgggugggagggaaugguagaugguugguacggcuuccgucaccagaauagcgaggggacuggacaggcugccgacuugaagaguacacaagcggccauuaaccagaucaauggcaaacucaaccgccugaucgaaaagaccaaugagaaguuucaucagauugaaaaagaguucuccgaaguggaggguagaauccaggauuuagagaaguaugucgaagacacgaaaauugaucuguggagcuacaacgcagagcuccuuguggcucuggaaaaccaacacaccauagacuugacagauucugagaugaauaagcuauucgaaaggacuaaaaagcagcugcgggagaacgccgaggacauggggaauggcugcuuuaagaucuaucauaaaugugauaacgcuugcauuggaucaauccgaaauggcaccuacgaccacgauguuuaccgcgacgaagcccucaacaauagauuccagaucaaggggguggagcugaaaaguggauauaaggacuggauucuuuggauaucauuugcaaucuccugcuuccuguugugugucgugcuccuggguuuuauuaugugggccugccagaaaggcaacaucagguguaauauuugcaucuga

SEQ ID NO: 128181 - RNA, 1701 nt, Artificial Sequence
  derived and/or modified CDS sequence (opt3) from hemagglutinin__InfluenzaA__AAY28285
augaagaccaucauugcccugagcuacauacucugccuuguguucgcucagaaacugcccggcaacgacaauuccacagcaacuuuguguuuagggcaccaugccgucccuaacggaacgcugguuaagaccaucacaaaugaucaaauugaggugacuaacgcgaccgaacuuguacaaaauucuucaacagguagaaucugcgacaguccacaccagauucucgauggcgagaacuguacccugaucgacgcucuacugggggauccgcauugcgacggauuucagaauaaagaaugggauuuguucguggagaggagcaaggccuauuccaacuguuaccccuaugacgucccugauuacgugucucuccggucgcugguugcaucaagcggcacucuggaauuuaauaacgagaguuucaauuggacagguguggcccagaacgggaccuccucugcuugcaaacgccgaagcgacaaguccuuuuucucacgucucaauugguuacaccagcugaaguauaaauacccagcacuuaacgucacgaugcccaauaacgagaaguuugauaaauuguauauauggggagugcaucacccuggcacugacaacgaucagaucagucuguacgcccaggcuagcggcagaguaaccguuucuacaaagaggucccaacagacugugauuccaaauaucgggucacggcccuggguccgcggagugagcaguagaauuucuaucuacuggaccauagugaaaccuggugacauucuacucaucaacuccacaggcaaucugauugccccaaggggguauuucaagauccggagcggaaagucgucuaucaugcgcuccgacgcgccgauuggcaaauguaacucagaaugcauaacccccaaugguaguaucccuaacgauaagccauuucagaaugucaaccgaauuacguacgggcccuguccuagauauguuaaacagaauacucuuaagcuggcaacaggaaugaggaacgugccagagaaacaaacccggggcaucuucggcgccauagcuggguuuauugaaaauggaugggaggguaugauggacggcugguacggguuccgucaccagaacagcgagggaacuggccaggccgcagauuugaaguccacacaagcugccaucaaucagaucaacgguaaacucaaucgccugauugaaaagaccaacgagaaguuucaucagaucgaaaaagaguucucugaaguagaggggaggauucaggacuuagagaaguauguggaagauacgaaaauagaccuguggagcuacaacgcggagcuccuugucgcccuggaaaaucaacacaccaucgauuugacagacucagagaugaacaagcuauucgaaagaacuaaaaagcagcugcgggagaaugcagaggauaugggcaacggaugcuuuaagauuuaucauaaaugugacaaugcuugcaucggcaguauccgaaacgggaccuacgaucacgacguguaccgcgacgaagcccucaauaacagauuccagauuaagggaguugagcugaaauccgguuauaaggauuggauacuuuggaucagcuuugcuauuucuugcuuccuguuguguaucgugcuccugggcuuuauuaugugggccugccagaaagggaauaucagguguaacauaugcaucuga

SEQ ID NO: 128182 - RNA, 1701 nt, Artificial Sequence
  derived and/or modified CDS sequence (opt3) from hemagglutinin__InfluenzaA__AAY28295
augaagaccaucauugcccugagcuacauacucugccuuguguucgcucagaaacugcccggcaacgacaauuccacagcaacuuuguguuuagggcaccaugccgucccuaacggaacgaucguuaagaccauuacaaaugaucaaaucgaggugacuaacgcgaccgaacugguacagucuucaaguacagguggcauuugcgacagcccacaccagauccuagauggggagaauuguacccucauagacgcucugcuuggagauccgcagugcgacggcuuucaaaacaaaaagugggaucuguucguggaaagauccaaagccuauucuaauuguuaccccuaugacgucccugauuacgcaucguugaggucacucguggccagcagugguacucuggaguuuaacaaugaauccuucgacuggacagggguuacccagaacggaacgucuagcgcuugcaagcggcgcuccaauaagucauuuuucagucgacugaacuggcucacucauuuaaaauauaaguacccagcacugaaugugaccaugcccaacaaugagaaauuugauaaacuuuauaucuggggcguccaccauccuggcacagacagcgaucagauuucuuuguacgcccaggcuuccgggaaaaucacugugucaaccaagcguagccaacagacaguaauuccaaacaucggaaguagacccaggguucgggacgugucuucccgcauaagcauuuacuggaccaucgucaagccuggugacauucugcuaaucaacucgacgggcaaucucaucgccccaagaggguauuucaaaauucagucuggaaaguccucaauaaugaggagugaugcgccgaucggcaaauguaacagcgagugcauuacucccaaugguuccaucccuaacgacaagccauuucagaaugugaaccggauaacauacggggcauguccccgcuaugugaaacaaaagacccugaaacuugccacuggaaugcgaaaugucccugaaaagcagacaagaggcauuuucggcgcuaucgccggguuuaucgagaacggaugggaagguaugguugauggcugguacggguucaggcaccagaauagcgagggaaccggccaagcagcugaccugaagucuacgcaggccgcgauuaaccagaucaaugguaaauugaaccggcucauugggaagaccaaugagaaauuucaccagauagaaaaggaguucucagaaguggagggccguauccaagaucuggaaaaauauguagaggacacaaagauugauuuauggaguuacaacgccgagcugcucguggcacuugaaaaucagcauacuaucgaccugaccgauuccgagaugaacaaguuguucgaacgcacaaagaagcagcuaagagagaacgcugaagacaugggaaauggcugcuuuaaaaucuaucacaagugugauaacgccugcauugggagcauaaggaauggaacuuacgaccaugacgucuaccgggaugaggcucugaacaaucgauuccagaucaaagguguggagcucaagucuggcuauaaggacuggauucuguggaucucauuugccauuaguugcuuccuucuguguguugcauugcucggguuuaucaugugggccugccaaaaaggaaacauacgcuguaauaucugcauuuga

SEQ ID NO: 128183 - RNA, 1701 nt, Artificial Sequence
  derived and/or modified CDS sequence (opt3) from hemagglutinin__InfluenzaA__AAY28305
augaaggccaucauugcucugagcuacauacucugccuuguguucgcacagaaacugcccggcaacgacaauuccaccgccacauuguguuuagggcaccaugcggucccuaacggaacucugguuaagacgaucaccaaugaucaaauugaggugacaaacgcuacugaauugguacagucuucaaguaccgguagaaucugcgacagcccacaccagauucucgauggcgagaauuguacacugaucgacgcccuucugggggauccgcauugcgacggauuucagaacaaagaaugggauuuguucguggagagguccaaggcauauucuaauuguuaccccuaugacgucccugauuacgugucgcuccggucacugguugccagcaguggcacccuggaauuuaacaaugaguccuucaacuggacugguguggcucaaaaugggacaucuagcgcaugcaaacgccgauccgacaagucauuuuucagucgucucaacugguuacaccagcugaaguauaaauacccagcccuuaaugucaccaugcccaacaaugagaaguuugauaaauuguauauauggggagugcaucacccuggcacggacagcgaucagaucucucuguacgcucaggccuccggcagaguaacuguuucaaccaagaggagccaacagacagugauuccaaacaucgggaguggacccuggguccggggugugucuucccgcauuagcaucuacuggacuauagugaaaccuggcgacauucuacucaucaacucgaccgggaaucugauugcgccaagaggauauuucaagaucaggucuggcaaguccucaaucaugcggagugacgcaccgauugguaaauguaacagcgaaugcauaacacccaauggguccaucccuaacgauaagccauuucagaaugucaaccgcauuaccuacggagccuguccccgauauguuaaacagaauacgcuuaagcuggcuacuggcaugagaaacgugccugagaaacaaacaaggggcaucuucggggccauagcaggauuuauugaaaaugguugggagggcaugauggacgggugguacggauuccggcaccagaacucugagggcaccggucaggcugccgaucuaaagagcacucaagcggccaucaaucagaucaacgggaaacucaaucgucugauugaaaagacaaacgagaaguuucaucagaucgaaaaagaguucucagaaguagagggccgcauucaggacuuagagaaguauguggaagauaccaaaauagaccuguggaguuacaaugcagagcuccuugucgcucuggaaaaccaacacacgaucgauuugaccgacuccgagaugaacaagcuauucgaaagaacuaaaaagcagcugagggagaaugccgaggauaugggaaacggcugcuuuaagauuuaucauaaaugugacaaugcuugcaucgggagcauccggaacggaacauacgaucacgacguguaccgagacgaagcccucaauaaccgcuuccagauuaaggguguugagcugaaaucuggcuauaaggauuggauacuuuggaucucauuugcaauuaguugcuuccuguuguguaucgugcuccugggguuuauuaugugggccugccagaaaggaaauaucagauguaacauaugcaucuga

SEQ ID NO: 128184 - RNA, 1701 nt, Artificial Sequence
  derived and/or modified CDS sequence (opt3) from hemagglutinin__InfluenzaA__AAY28325
augaagaccaucauugcccugagcuacauacucugccuuguguucgcucagaaacugcccggcaacgacaauuccacagcaacuuuguguuuagggcaccaugccgucccuaacggaacgcugguuaagaccaucacaaaugaucaaauugaggugacuaacgcgaccgaacuuguacagucuucaaguacaagcagaaucugcgacuccccacaccagauucucgauggugagaauuguacccugaucgacgcucuacugggcgauccgcauugcgacggguuucagaacaaagaaugggauuuguucguggagaggucuaaggccuauucgaauuguuaccccuaugacgucccugauuacgugucacuccggagccugguugcaaguuccggaacucuggaauuuaacaaugagucuuucaacuggacaggcguggcccaaaaugguaccagcuccgcuugcaaacgccgaucagacaagagcuuuuucagucgucucaacugguuacaccagcugaaguauaaauacccagcacuuaaugucacgaugcccaacaaugagaaguuugauaaauuguauauauggggagugcaucacccugggacugacucugaucagaucucccuguacgcccaggcuucaggcagaguaauuguuagcaccaagaggagucaacagacagugaucccaaacauuggcucugggcccuggguccggggaguguccagccgcaucucgauauacuggacuauugugaaaccuggugacauccuacucauuaacucuaccggcaaucugaucgccccaagaggguauuucaagaucagguccggaaagucaaguauuaugcggagcgacgcgccgauaggcaaauguaacuccgaaugcaucacacccaaugguucuauuccuaacgauaagccauuucagaaugucaaccgcaucaccuacggggcauguccccgauauguuaaacagaauacgcuuaagcuggccacuggaaugagaaacgugccugagaaacaaacaaggggcauauucggcgcuauugccggguuuaucgaaaauggaugggaggguaugauggacggcugguacggguuccggcaccagaacagcgagggaaccggccaggcagcugauuugaagucaacucaagccgcgaucaaucagauuaacgguaaacucaaucgucugaucgaaaagacaaacgagaaguuucaucagauugaaaaagaguucgccgaaguagaggggcgcauacaggacuuagagaaguauguggaagauaccaaaaucgaccuguggaguuacaaugcagagcuccuugucgcucuggaaaaccaacacacgauugauuugaccgacuccgagaugaacaagcuauucgaaagaacuaaaaagcagcugagggagaaugccgaggauaugggcaacggaugcuuuaagaucuaucauaaaugugacaaugcuugcaucggcagcauucggaacgggacauacgaucacgacguguaccgagacgaagcccucaauaaccgcuuccagauaaagggaguugagcugaaaucugguuauaaggauuggauccuuuggauuucauuugcaaucaguugcuuccuguuguguauugugcuccugggcuuuaucaugugggccugccagaaagggaauauaagauguaacaucugcauuuga

SEQ ID NO: 128185 - RNA, 1701 nt, Artificial Sequence
  derived and/or modified CDS sequence (opt3) from hemagglutinin__InfluenzaA__AAY28335
augaagaccaucauugcccugagcuacauacucugccuuguguccgcucagaaacugcccggcaacgacaauucuacagcaacuuuguguuuagggcaccaugccgucccuaacggaacgcugguuaagaccaucacaaaugaucaaauugaggugacuaacgcgaccgaacuuguacagucaaguagcacauccagaaucugcgacucuccacaccagauucucgauggugagaauuguacccugaucgacgcucuacugggcgauccgcauugcgacggguuccagaacaaagaaugggauuuguuuguggagaggucgaaggccuauucaaauuguuaccccuaugacgucccugauuacgugagccuccggagucugguugcauccucuggaacucuggaauuuaacaaugagagcuucaacuggacaggcguggcccaaaaugguaccuccucagcuugcaaacgccgaagugacaagagcuucuuuucucgucucaacugguuacaccagcugaaguauaaauacccagcacuuaaugucacgaugcccaacaaugagaaguucgauaaauuguauauauggggagugcaucacccugggacugacuccgaucagaucucacuguacgcccaggcuagcggcagaguaaccguuaguacaaagaggucucaacagacugugauuccaaacaucggcucccggcccuggguccgcggggugagcucgagaauuucuaucuacuggaccauagugaaaccuggagacauucuacucaucaacuccacagguaaucugauugccccaaggggcuauuuuaagauccggucagggaagaguagcaucaugcgcuccgacgcgccgauuggaaaauguaacucugaaugcauaacccccaauggcagcaucccuaacgauaagccauuccagaaugucaaccgaauuacguacggugcaugucccagauauguuaaacagaauacucuuaagcuggccacagggaugaggaacgugccugagaaacaaacccggggaaucuuuggcgcuauagccggcuucauugaaaaugggugggagggaaugauggacgguugguacggcuuucgucaccagaacucagaggggacuggacaggcagcugauuugaagaguacacaagccgcgaucaaucagaucaacggcaaacucaaucgccugauugaaaagaccaacgagaaguuccaucagaucgaaaaagaguuuuccgaaguagaggguagaauacaggacuuagagaaguauguggaagauacgaaagucgaccuguggagcuacaaugccgagcuccuuguggcacuggaaaaccaacacaccauagauuugacagacucugagaugaacaagcuauucgaaaggacuaaaaagcagcugcgggagaaugcugaggauauggggaacggcugcuucaagaucuaucauaaaugugacaaugccugcauuggaucaauccgaaacggcaccuacgaucacgacguuuaccgcgacgaagcucucaauaacagauuucagaucaaggggguggagcugaaaaguggauauaaggauuggauucuuuggauuagcuucgccaucuccugcuuucuguuguguauuguccuccuggguuucaucaugugggcaugccagaaaggcaauauuagguguaacaucugcauauga

SEQ ID NO: 128186 - RNA, 1701 nt, Artificial Sequence; identical to SEQ ID NO: 128080
  derived and/or modified CDS sequence (opt3) from hemagglutinin__InfluenzaA__AAY28345

SEQ ID NO: 128187 - RNA, 1701 nt, Artificial Sequence; identical to SEQ ID NO: 128120
  derived and/or modified CDS sequence (opt3) from hemagglutinin__InfluenzaA__AAY28355

SEQ ID NO: 128188 - RNA, 1701 nt, Artificial Sequence
  derived and/or modified CDS sequence (opt3) from hemagglutinin__InfluenzaA__AAY28363
augaagaccaucauugcccugagcuacauacucugcaugguguucgcucagaaacuucccgucaacgacaauuccacagcaacucuguguuugggccaccaugccguuccuaacgggacguuagugaagaccaucacaaaugaucacauugagguaacuaacgcgaccgaacuggugcaaucuucaaguacaggaagaaucugcgacagcccacaucagauucuagauggugagaauuguacccucaucgacgcucugcuuggcgauccgcacugcgacggguuucagaacaaagaaugggaucuguucgucgagagguccacugccuauucuaauuguuaccccuaugacgugccugauuacgcaucguugcggucacucguugccagcaguggaacacuggaauuuaacaaugaguccuucaacuggaccggcguggcucagaaugguacgucuagcgcaugcaagcgccgauccauaaaaucauuuuucagucgucugaacuggcuccaucaauuaaaguauaaguacccaagccugaaugucacuaugcccaacaaugagaaauuugacaaacuuuauaucuggggagugcaccacccuucuaccgauuccgaccagauuucauuguacgcccaggcuagcgggagaguaacaguuaguacuaaaaggucucagcaaaccgugaucccaaacauuggcucccggcccuggguccgcggcgugagcucgagaaucucuauauacuggacaauugugaagccuggggauauccugcuaauuaacuccaccggaaaucucaucgccccaagggguuauuucaaaauccggucaggcaagaguagcauuaugcgcuccaacgcgccgauagggaaguguaauucugaaugcaucacgcccaacggaagcauuccuaaugacaaaccauuucagaacgucaaucgaaucacuuacggcgcaugucccagauauguuaagcagaacacacugaaacuugccaccgguaugaggaaugugccugagaagcagacucgggggauauucggagcuauugccggcuuuaucgaaaacggcugggaggggaugguagacggaugguacgguuuccgucaucaaaauucagagggcacagggcaggcagcugaucugaaaaguacccaggccgcgaucaaccaaauuaauggaaaguugaaccgccucaucgaaaagacgaaugagaaguuucaccagauugaaaaggaguucuccgaaguggagggcagaauacaggaccuggagaaauaugucgaagauaccaagaucgacuuauggagcuacaacgccgagcugcucguggcacuugaaaaccagcauacaauugaucugacugacucugagaugaauaaauuguucgaaaggacccggaagcaacuacgagagaacgcugaggauauggguaaugggugcuuuaaaaucuaucacaagugugacaacgccugcaucggcucaauucgcaauggaacauacgaucacgacguuuacagagaugaagcucugaacaauagguuccagauaaagggcguggagcucaaaaguggguauaaggacuggauccuguggauuagcuuugccaucuccugcuuccuucugugugucguguugcucggauuuauuaugugggcaugccagaaagguaacauccgguguaauauaugcaucuga

SEQ ID NO: 128189 - RNA, 1701 nt, Artificial Sequence; identical to SEQ ID NO: 128120
  derived and/or modified CDS sequence (opt3) from hemagglutinin__InfluenzaA__AAY28375

SEQ ID NO: 128190 - RNA, 1701 nt, Artificial Sequence; identical to SEQ ID NO: 128080
  derived and/or modified CDS sequence (opt3) from hemagglutinin__InfluenzaA__AAY28385

SEQ ID NO: 128191 - RNA, 1701 nt, Artificial Sequence
  derived and/or modified CDS sequence (opt3) from hemagglutinin__InfluenzaA__AAY28395
augaagaccaucauugcccugagcuacauacucugccuuguguucgcucagaaacugcccggcaacgacaauuccacagcaacuuuguguuuagggcaccaugccgucccuaacggaacgaucguuaagaccauuacaaaugaucaaaucgaggugacuaacgcgaccgaacugguacagucuucaaguacagguggcauuugcgacagcccacaccagauccuagauggggagaauuguacccucauagacgcucugcuuggagauccgcagugcgacggcuuucaaaacaaaaagugggaucuguucguggaaagauccaaagccuauucuaauuguuaccccuaugacgucccugauuacgcaucguugaggucacucguggccagcagugguacucuggaguuuaacaaugaauccuucgacuggacagggguuacccagaacggaacgucuagcgcuugcaagcggcgcuccaauaagucauuuuucagucgacugaacuggcucacucauuuaaaauauaaguacccagcacugaaugugaccaugcccaacaaugagaaauuugauaaacuuuauaucuggggcguccaccauccuggcacagacagcgaucagauuaacuuguacgcccaggcuucugggcguaucacuguguccaccaagagaucacaacagacaguaauuccaaacaucggaagcaggccccggguucgcgacgugaguucuagaauauccauuuacuggaccaucgucaagccuggugacauucugcuaaucaauagcacgggcaaccucaucgccccaaggggguauuucaagauucggucgggaaaaucuuccauaaugcgcucagaugcgccgaucggcaaguguaauagugagugcauuacucccaacgguagcaucccuaaugacaaaccauuucagaacgugaaucgaauaacauacggggcaugucccagauauauuaagcagaacacccugaaacuugccacuggaaugaggaaugugccugaaaagcaaacacggggcaucuucggcgcuaucgccggguuuauugagaacggaugggaagguauggucgauggcugguacggguuccgucaccaaaauuccgagggaaccggccaggcagcugaccugaaaucuacgcaggccgcgaucaaccagauuaaugguaaguugaaccgccucauagggaagaccaaugagaaauuucaccagaucgaaaaggaguucagcgaaguugagggcaggauucaggaucuggaaaaauauguggaggacacaaagaucgauuuauggucauacaacgccgagcugcucguagcacuugaaaaccaacauacuaucgaccugaccgauagugagaugaauaaauuguucgaaagaacaaagaagcagcuacgggagaacgcugaagacaugggaaauggcugcuuuaaaauuuaucacaagugugauaacgccugcauaggguccauccgaaauggaacuuacgaccaugacguguaccgcgaugaggcucugaacaauagauuccagauuaaaggugucgagcucaagagcggcuauaaagacuggauccuguggauuucuuuugccaucucaugcuuccuucuguguguggcauugcucggguuuauaaugugggccugccagaagggaaacaucagguguaauauuugcaucuga

SEQ ID NO: 128192 - RNA, 1701 nt, Artificial Sequence
  derived and/or modified CDS sequence (opt3) from hemagglutinin__InfluenzaA__AAY28405
augaagaccaucauugcccugagcuacauacucugccuuguguucgcucagaaacugcccggcaacgacaauuccacagcaacuuuguguuuagggcaccaugccgucccuaacggaacgcugguuaagaccaucacaaaugaucaaauugaggugacuaacgcgaccgaacuuguacagaucucuucaacagguagaauuugcgacaauccacaccagauccucgauggcgagaacuguacccugauagacgcucuacugggggauccgcauugcgacggauuucagaauaaagaaugggauuuguucguggagaggaguaaggccuauagcaacuguuaccccuaugacgucccugauuacgugucccuccggucucugguugcaucgucaggcacucuggaauuuaauaacgagagcuucaauuggacagguguggcccaaaacgggaccaguuccgcuugcaaacgccgaucugacaagagcuuuuucucccgucucaauugguuacaccagcugaaguauaaauacccagcacuuaacgucacgaugcccaauaacgagaaguuugauaaauuguauaucuggggagugcaucacccuggcacugacucagaucagauuagucuguacgcccaggcuagcggcagaguaaccguuucuacaaagaggucccaacagacugugaucccaaacauugggucacggcccuggguccgcggagugagcaguagaaucucuauauacuggaccauugugaaaccuggugacauccuacucauuaauuccacaggcaaccugaucgccccaaggggguauuucaagauccggagcggaaagucgucuauuaugcgcuccgacgcgccgauaggcaaauguaauucagaaugcaucacccccaacgguaguauuccuaaugauaagccauuucagaacgucaaucgaaucacguacgggcccuguccuagauauguuaaacagaacacucuuaagcuggcaacaggaaugaggaaugugccagagaaacaaacccggggcauauucggcgccauugcuggguuuaucgaaaacggaugggaggguaugauggacggcugguacggguuccgucaccagaauagcgagggaacuggccaggccgcagauuugaaguccacacaagcugccaucaaccagauuaaugguaaacucaaccgccugaucgaaaagaccaaugagaaguuucaucagauugaaaaagaguucucugaaguagaggggagaauacaggacuuagagaaguauguggaagauacgaaaaucgaccuguggagcuacaacgcggagcuccuugucgcccuggaaaaccaacacaccauugauuugacagacucagagaugaauaagcuauucgaaaggacuaaaaagcagcugcgggagaacgcagaggauaugggcaauggaugcuuuaagaucuaucauaaaugugacaacgcuugcaucggcaguauucgaaaugggaccuacgaucacgacguguaccgcgacgaagcccucaacaauagauuccagauaaagggaguugagcugaaauccgguuauaaggauuggauccuuuggauuagcuuugcuaucucuugcuuccuguuguguauugugcuccugggcuuuaucaugugggccugccagaaagggaacauaagguguaauaucugcgucuga

SEQ ID NO: 128193 - RNA, 1701 nt, Artificial Sequence; identical to SEQ ID NO: 128080
  derived and/or modified CDS sequence (opt3) from hemagglutinin__InfluenzaA__AAY28486

SEQ ID NO: 128194 - RNA, 1701 nt, Artificial Sequence; identical to SEQ ID NO: 128080
  derived and/or modified CDS sequence (opt3) from hemagglutinin__InfluenzaA__AAY28521

SEQ ID NO: 128195 - RNA, 1701 nt, Artificial Sequence; identical to SEQ ID NO: 128079
  derived and/or modified CDS sequence (opt3) from hemagglutinin__InfluenzaA__AAY28531

SEQ ID NO: 128196 - RNA, 1701 nt, Artificial Sequence; identical to SEQ ID NO: 128080
  derived and/or modified CDS sequence (opt3) from hemagglutinin__InfluenzaA__AAY28541

SEQ ID NO: 128197 - RNA, 1701 nt, Artificial Sequence
  derived and/or modified CDS sequence (opt3) from hemagglutinin__InfluenzaA__AAY28551
augaagaccaucauugcccugagcuacauacucugccuuguguucgcucagaaacugcccgucaacgacaauuccacagcaacuuuguguuuaggccaccaugccguuccuaacgggacgcuggugaagaccaucacaaaugaucacauugagguaacuaacgcgaccgaacuugugcaaucuucaaguacaggaagaaucugcgacagcccacaucagauucucgauggugagaauuguacccugaucgacgcucuacugggcgauccgcacugcgacggguuucagaacaaagaaugggauuuguucgucgagagguccacugccuauucuaauuguuaccccuaugacgugccugauuacgcaucgcuccggucacugguugccagcaguggaacacuggaauuuaacaaugaguccuucaacuggaccggcguggcucagaaugguacgucuagcgcaugcaagcgccgauccauaaaaucauuuuucagucgucucaacugguuacaucaacugaaguauaaguacccagcccuuaaugucacuaugcccaacaaugagaaauuugacaaguuguauaucuggggagugcaccacccuagcaccgauucugaccagauuucccuguacgcucaggccucagggagaguaacaguuagcacuaaaaggagucagcaaaccgugaucccaaacauuggcucuggccccuggguccgcgggguguccagccggaucucgauauacuggacaauugugaagccuggagauauccuacucauuaacucuaccgguaaucugaucgcgccaagaggcuauuucaaaaucagguccgggaagucaaguauuaugcggagcaacgcaccgauaggaaaguguaauuccgaaugcaucacgcccaacggcucuauuccuaaugacaaaccauuucagaacgucaaucgcaucacuuacggugccuguccccgauauguuaagcagaacacacuuaaacuggcuaccgggaugagaaaugugccugagaagcagacuaggggaauauucggcgccauugcaggcuuuaucgaaaacgggugggagggaaugguagacgguugguacggcuuccggcaucaaaauagcgaggggacaggacaggcugccgauuugaaaucaacccaggcggccaucaaccaaauuaauggcaagcucaaccgucugaucgagaaaacgaaugaaaaguuucaccagauugaaaaggaguucagugaaguggagggucgcauacaggacuuagagaaauaugucgaagauaccaagaucgaccugugguccuacaacgcagagcuccuuguggcucuggaaaaccagcauacaauugauuugacugacagcgagaugaauaaacuauucgaaagaaccaggaagcaacugcgggagaacgccgaggauauggggaauggcugcuuuaaaaucuaucacaagugugacaacgcuugcaucggaucuauucgaaauggcacauacgaucacgacguuuaccgcgaugaagcccucaacaauagauuccagauaaaggggguggagcugaaaucaggauauaaggacuggauccuuuggauuaguuuugcaaucagcugcuuccuguugugugucgugcuccuggguuuuauuaugugggccugccagaaaggcaacaucagguguaauauaugcaucuga

SEQ ID NO: 128198 - RNA, 1701 nt, Artificial Sequence; identical to SEQ ID NO: 128080
  derived and/or modified CDS sequence (opt3) from hemagglutinin__InfluenzaA__AAY28561

SEQ ID NO: 128199 - RNA, 1701 nt, Artificial Sequence; identical to SEQ ID NO: 128095
  derived and/or modified CDS sequence (opt3) from hemagglutinin__InfluenzaA__AAY28581

SEQ ID NO: 128200 - RNA, 1701 nt, Artificial Sequence
  derived and/or modified CDS sequence (opt3) from hemagglutinin__InfluenzaA__AAY28591
augaagaccaucauugcccugagcuacauacucugccuuguguucgcucagaaacugcccgucaacgacaauuccacagcaacuuuguguuuaggccaccaugccguuccuaacgggacgcuggugaagaccaucacaaaugaucacauugagguaacuaacgcgaccgaacuugugcaaucuucaaguacaggaagaaucugcgacagcccacaucagauucucgauggugagaauuguacccugaucgacgcucuacugggcgauccgcacugcgacggguuucagaacaaagaaugggauuuguucgucgagagguccacugccuauucuaauuguuaccccuaugacgugccugauuacgcaucgcuccggucacugguugccagcaguggaacacuggaauuuaacaaugaguccuucaacuggaccggcguggcucagaaugguacgucuagcgcaugcaagcgccgauccauaaaaucauuuuucagucgucucaacugguuacaucaacugaaguauaaguacccagcccuugacgucacuaugcccaauaacgagaaauuugauaaguuguauaucuggggagugcaccacccuagcaccgacucugaucagauuucccuguacgcucaggccucagggagaguaacaguuagcacuaaaaggagucagcaaaccgugaucccaaauauuggcucucggcccuggguccgcggcguguccagcagaaucucgauauacuggacaauugugaagccuggggacauccuacucauuaacucuaccggaaaccugaucgcgccaagggguuauuucaaaauccgguccggcaagucaaguauuaugcgcagcaaugcaccgauagggaaguguaacuccgaaugcaucacgcccaauggaucuauuccuaacgacaaaccauuucagaaugucaaccgaaucacuuacggcgccugucccagauauguuaagcagaauacacuuaaacuggcuaccgguaugaggaacgugccugagaagcagacucgggggauauucggagccauugcaggcuuuaucgaaaauggcugggaggggaugguagauggaugguacgguuuccgucaucaaaacagcgagggcacagggcaggcugccgacuugaaaucaacccaggcggccaucaaucaaauuaacggaaagcucaaucgccugaucgagaaaacgaacgaaaaguuucaccagauugaaaaggaguucagugaaguggagggcagaauacaggauuuagagaaauaugucgaagacaccaagaucgaucugugguccuacaaugcagagcuccuuguggcucuggaaaaccagcauacaauugacuugacugauagcgagaugaacaaacuauucgaaaggacccggaagcaacugcgagagaaugccgaggacauggguaacgggugcuuuaaaaucuaucacaagugugauaaugcuugcaucggcucuauucgcaacggaacauacgaccacgauguuuacagagacgaagcccucaauaacagguuccagauaaagggcguggagcugaaaucaggguauaaggacuggauccuuuggauuaguuuugcaaucagcugcuuccuguugugugucgugcuccugggauuuauuaugugggccugccagaaagguaauauccgguguaacauaugcaucuga

SEQ ID NO: 128201 - RNA, 1701 nt, Artificial Sequence; identical to SEQ ID NO: 128120
  derived and/or modified CDS sequence (opt3) from hemagglutinin__InfluenzaA__AAY28608

SEQ ID NO: 128202 - RNA, 1701 nt, Artificial Sequence
  derived and/or modified CDS sequence (opt3) from hemagglutinin__InfluenzaA__AAY28618
augaagaccaucauugcccugagcuacauacucugccuuguguucgcucagaaacugcccggcaacgacaauuccacagcaacuuuguguuuagggcaccaugccgucccuaacggaacgaucguuaagaccauuacaaaugaucaaaucgaggugacuaacgcgaccgaacugguacagucuucaaguacagguggcauuugcgacagcccacaccagauccuagauggggagaauuguacccucauagacgcucugcuuggagauccgcagugcgacggcuuucaaaacaaaaagugggaucuguucguggaaagauccaaagccuauucuaauuguuaccccuaugacgucccugauuacgcaucguugaggucacucguggccagcagugguacucuggaguuuaacaaugaauccuucaacuggacagggguuacccagaauggaacgucuagcgcuugcaagcggcgcuccaacaagucauuuuucagucgacugaauuggcucacucauuuaaaauauaaguacccagcacugaacgugaccaugcccaauaacgagaaauuugacaaacuuuauaucuggggcguccaccauccuggcacagauagcgaccagauuucuuuguacgcccaggcuuccgggcguaucacugugucaaccaagagaagccaacagacaguaauuccaaacaucggaaguaggccccggguucgcgaugugucuuccagaaugagcauauacuggaccauugucaagccuggugacauccugcuaauuaauucgacgggcaaccucaucgccccaaggggguauuucaagauccggucuggaaaauccucaauuaugcgcagugacgcgccgauaggcaaguguaauagcgagugcaucacucccaacgguuccauuccuaaugauaaaccauuucagaacgugaaucgaaucacauacggggcaugucccagauaugugaagcagaacacccugaaacuugccacuggaaugaggaaugucccugaaaagcaaacacggggcauauucggcgcuauugccggguuuaucgagaacggaugggaagguaugguugacggcugguacggguuccgucaccaaaauucugagggaaccggccaggcagcugaucugaaaagcacgcaggccgcgaucaaccagauuaaugguaaguugaaccgccucaucgggaagaccaaugagaaauuucaccagauugaaaaggaguucucagaaguggagggcagaauacaggaccuggaaaaauauguagaggauacaaagaucgacuuauggaguuacaacgccgagcugcucguggcacuugaaaaccaacauacuauugaucugaccgacuccgagaugaauaaauuguucgaaaggacaaagaagcagcuacgggagaacgcugaagauaugggaaauggcugcuuuaaaaucuaucacaagugugacaacgccugcaucgagagcauucgaaaugggacuuacgaucaugacgucuaccgcgacgaggcucugaacaauagauuccagauaaaaggaguggaacucaagucugguuauaaagauuggauccuguggauuucauuugccaucaguugcuuccuucuguguguugcauugcucggcuuuauuaugugggccugccagaaggggaacaucagguguaauauaugcaucuga

SEQ ID NO: 128203 - RNA, 1701 nt, Artificial Sequence; identical to SEQ ID NO: 128095
  derived and/or modified CDS sequence (opt3) from hemagglutinin__InfluenzaA__AAY28638

SEQ ID NO: 128204 - RNA, 1701 nt, Artificial Sequence
  derived and/or modified CDS sequence (opt3) from hemagglutinin__InfluenzaA__AAY28648
augaagaccaucauugcccugagcuacauacucugccuuguguucgcucagaaacugcccggcaacgacaauuccacagcaacuuuguguuuagggcaccaugccgucccuaacggaacgcugguuaagaccaucacaaaugaucaaauugaggugacuaacgcgaccgaauugguacagucuucaaguacagguagaaucugcgacagcccacaccagauucucgauggcgagaauuguacccugaucgacgcccuucugggggauccgcauugcgacggauuucagaacaaagaaugggauuuguucguggagagguccaaggcuuauucuaauuguuaccccuaugacgucccugauuacgugucgcuccggucacugguugcaagcaguggcacucuggaauuuaacaaugaguccuucaacuggacagguguggcccaaaaugggaccucuagcgcuugcaaacgccgauccgacaagucauuuuucagucgucucaacugguuacaccagcugaaguauaaauacccagcacuuaaugucacgaugcccaacaaugagaaguuugauaaauuguauauauggggagugcaucacccuggcacugacagcgaucagaucucucuguacgcccaggcuuccggcagaguaaccguuucaacaaagaggagccaacagacugugauuccaaacaucgggaguggacccuggguccggggugugucuucccgcauuagcaucuacuggaccauagugaaaccuggcgacauucuacucaucaacucgacagggaaucugauugccccaagaggauauuucaagaucaggucuggcaaguccucaaucaugcggagugacgcgccgauugguaaauguaacagcgaaugcauaacccccaauggguccaucccuaacgauaagccauuucagaaugucaaccgcauuacguacggagcauguccccgauauguuaaacagaauacucuuaagcuggccacaggcaugagaaacgugccugagaaacaaaccaggggcaucuucggggcuauagccggauuuauugaaaaugguugggagggcaugauggacgggugguacggauuccggcaccagaacucugagggcacuggucaggcagcugaucuaaagagcacacaagccgcgaucaaucagaucaacgggaaacucaaucgucugauugaaaagaccaacgagaaguuucaucagaucgaaaaagaguucucagaaguagagggccgcauucaggacuuagagaaguauguggaagauacgaaaauagaccuguggaguuacaaugccgagcuccuugucgcacuggaaaaccaacacaccaucgauuugacagacuccgagaugaacaagcuauucgaaagaacuaaaaagcagcugagggagaaugcugaggauaugggaaacggcugcuuuaagauuuaucauaaaugugacaaugccugcaucgggagcauccggaacggaaccuacgaucacgacguguaccgagacgaagcucucaauaaccgcuuccagauuaaggguguugagcugaaaucuggcuauaaggauuggauacuuuggaucucauuugccauuaguugcuuccuguuguguaucgugcuccugggguuuauuaugugggcaugccagaaaggaaauaucagauguaacauaugcaucuga

SEQ ID NO: 128205 - RNA, 1701 nt, Artificial Sequence
  derived and/or modified CDS sequence (opt3) from hemagglutinin__InfluenzaA__AAY44610
augaagaccaucauugcccugagcuacauacucugccuuguguucgcucagaaacugcccggcaacgacaauuccacagcaacuuuguguuuagggcaccaugccgucccuaacggaacgaucguuaagaccauuacaaaugaucaaaucgaggugacuaacgcgaccgaacugguacagucuucaaguacagguggcauuugcgacagcccacaccagauccuagauggggagaauuguacccucauagacgcucugcuuggagauccgcagugcgacggcuuucaaaacaaaaagugggaucuguucguggaaagaaauaaagccuauuccaacuguuaccccuaugacgucccugauuacgcaucuuugaggucgcucguggccucaagcgguacucuggaguuuaauaacgaaaguuucgacuggacagggguuacccagaauggaacguccucugcuugcaagcggcgcagcaacaaguccuuuuucucacgacugaauuggcucacucauuuaaaauauaaguacccagcacugaacgugaccaugcccaauaacgagaaauuugauaaacuuuauaucuggggcguccaccauccuggcacagacagugaucagauuagcuuguacgcccaggcuucugggcguaucacuguguccaccaagagaucacaacagacaguaauuccaaacaucggaagcaggccccggguucgcgacgugaguucuagaauauccauuuacuggaccaucgucaagccuggugacauucugcuaaucaauagcacgggcaaccucaucgccccaaggggguauuucaagauucggucgggaaaaucuuccauaaugcgcucagaugcgccgaucggcaaguguaauagugagugcauuacucccaacgguagcaucccuaaugacaaaccauuucagaacgugaaucgaauaacauacggggcaugucccagauaugugaagcagaacacccugaaacuugccacuggaaugaggaaugucccugaaaagcaaacacggggcauuuucggcgcuaucgccggguuuaucgagaacggaugggaagguaugguugauggcugguacggguuccgucaccaaaauuccgagggaaccggccaggcagcugaccugaaaucuacgcaggccgcgauuaaccagaucaaugguaaguugaaccgccucauugggaagaccaaugagaaauuucaccagauagaaaaggaguucagcgaaguggagggcagaauccaggaucuggaaaaauauguagaggacacaaagauugauuuauggucauacaacgccgagcugcucguggcacuugaaaaccaacauacuaucgaccugaccgauagugagaugaauaaauuguucgaaaggacaaagaagcagcuacgggagaacgcugaagacaugggaaauggcugcuuuaaaaucuaucacaagugugauaacgccugcauuggguccauacgaaauggaacuuacgaccaugacgucuaccgcgaugaggcucugaacaauagauuccagaucaaagguguggagcucaagagcggcuauaaagacuggauucuguggaucucuuuugccauuucaugcuuccuucuguguguugcauugcucggguuuaucaugugggccugccagaagggaaacauaagguguaauaucugcauuuga

SEQ ID NO: 128206 - RNA, 1701 nt, Artificial Sequence
  derived and/or modified CDS sequence (opt3) from hemagglutinin__InfluenzaA__AAY44620
augaagaccaucauugcccugagcuacauacucugccuuguguucgcucagaaacugcccggcaacgacaauuccacagcaacuuuguguuuagggcaccaugccgucccuaacggaacgcugguuaagaccaucacaaaugaucaaauugaggugacuaacgcgaccgaauugguacagucuucaaguacagguagaaucugcgacagcccacaccagauucucgauggcgagaauuguacccugaucgacgcccuucugggggauccgcauugcgacggauuucagaacaaagaaugggauuuguucguggagagguccaaggcuuauucuaauuguuaccccuaugacgucccugauuacgugucgcuccggucacugguugcaagcaguggcacucuggaauuuaacaaugaguccuucaacuggacagguguggcccaaaaugggaccucuagcgcuugcaaacgccgauccgacaagucauuuuucagucgucucaacugguuacaccagcugaaguauaaauacccagcacuuaaugucacgaugcccaacaaugagaaguuugauaaauuguauauauggggagugcaucacccuggcacugacagcgaucagaucucucuguacgcccaggcuuccggcagaguaaccguuucaacaaagaggagccaacagacugugauuccaaacaucgggagucggcccuggguccgcggagugucuuccagaauuagcaucuacuggaccauagugaaaccuggugacauucuacucaucaacucgacaggcaaucugauugccccaaggggguauuucaagauccggucuggaaaguccucaaucaugcgcagugacgcgccgauuggcaaauguaacagcgaaugcauaacccccaaugguuccaucccuaacgauaagccauuucagaaugucaaccgaauuacguacgggcccuguccuagauauguuaaacagaauacucuuaagcuggcaacaggaaugaggaacgugccagagaaacaaacccggggcaucuucggcgccauagcuggguuuauugaaaauggaugggaggguaugauggacggcugguacggguuccgucaccagaacucugagggaacuggccaggccgcagaucuaaagagcacacaagcugccaucaaucagaucaacgaaaaacucaaucgccugauugagaagaccaacgaaaaguuucaucagaucgagaaagaguucucagaaguagaggguaggauucaggacuuagaaaaguauguggaggauacgaaaauagaccuguggaguuacaaugcggaacuccuugucgcccuggagaaccaacacaccaucgauuugacagacuccgaaaugaacaagcuauucgagagaacuaaaaagcagcugcgggagaaugcagaagauauggggaacggcugcuuuaagauuuaucauaaaugugacaaugcuugcaucggaagcauccgaaacggcaccuacgaucacgacguguaccgcgacgaggcccucaauaacagauuccagauuaaggggguugaacugaaaucuggauauaaggauuggauacuuuggaucucauuugcuauuaguugcuuccuguuguguaucgugcuccuggguuuuauuaugugggccugccagaaaggcaauaucagguguaacauaugcaucuga

SEQ ID NO: 128207 - RNA, 1701 nt, Artificial Sequence; identical to SEQ ID NO: 128128
  derived and/or modified CDS sequence (opt3) from hemagglutinin__InfluenzaA__AAY44621

SEQ ID NO: 128208 - RNA, 1701 nt, Artificial Sequence; identical to SEQ ID NO: 128095
  derived and/or modified CDS sequence (opt3) from hemagglutinin__InfluenzaA__AAY44631

SEQ ID NO: 128209 - RNA, 1701 nt, Artificial Sequence
  derived and/or modified CDS sequence (opt3) from hemagglutinin__InfluenzaA__AAY44641
augaagaccaucauugcccugagcuacauacucugccuuguguucgcucagaaacugcccggcaacgacaauuccacagcaacuuuguguuuagggcaccaugccgucccuaacggaacgcugguuaagaccaucacaaaugaucaaauugaggugacuaacgcgaccgaauugguacagucuucaaguacagguagaaucugcgacagcccacaccagauucucgauggcgagaauuguacccugaucgacgcccuucugggggauccgcauugcgacggauuucagaacaaagaaugggauuuguucguggagagguccaaggcuuauucuaauuguuaccccuaugacgucccugauuacgugucgcuccggucacugguugcaagcaguggcacucuggaauuuaacaaugaguccuucaacuggacagguguggcccaaaaugggaccucuagcgcuugcaaacgccgauccgacaagucauuuuucagucgucucaacugguuacaccagcugaaguauaaauacccagcacuuaaugucacgaugcccaacaaugagaaguuugauaaauuguauauauggggagugcaucacccuggcacugacagcgaucagaucucucuguacgcccaggcuuccggcagaguaaccguuucaacaaagaggagccaacagacugugauuccaaacaucgggagucggcccuggguccgcggagugucuuccagaauuagcaucuacuggaccauagugaaaccuggugacauucuacucaucaacucgacaggcaaucugauugccccaaggggguauuucaagauccggucuggaaaguccucaaucaugcgcagugacgcgccgauuggcaaauguaacagcgaaugcauaacccccaaugguuccaucccuaacgauaagccauuucagaaugucaaccgaauuacguacgggcccuguccuagauauguuaaacagaauacucuuaagcuggcaacaggaaugaggaacgugccagagaaacaaacccggggcaucuucggcgccauagcuggguuuauugaaaauggaugggaggguaugauggacggcugguacggguuccgucaccagaacucugagggaacuggccaggccgcagaucuaaagagcacacaagcugccaucaaucagaucaacgguaaacucaaucgccugauugaaaagaccaacgagaaguuucaucagaucgaaaaagaguucucagaaguagaggggaggauucaggacuuagagaaguauguggaagauacgaaaauagaccuguggaguuacaaugcggagcuccuugucgcccuggaaaaccaacacaccaucgauuugacagacuccgagaugaacaagcuauucgaaagaacuaaaaagcagcugcgggagaaugcagaggauaugggcaacggaugcuuuaagauuuaucauaaaugugacaaugcuugcaucggcagcauccgaaacgggaccuacgaucacgacguguaccgcgacgaagcccucaauaacagauuccagauuaagggaguugagcugaaaucugguuauaaggauuggauacuuuggaucucauuugcuauuaguugcuuccuguuguguaucggccuccugggguuuauuaugugggccugccagaaaggaaauaucagguguaacauaugcaucuga

SEQ ID NO: 128210 - RNA, 1701 nt, Artificial Sequence
  derived and/or modified CDS sequence (opt3) from hemagglutinin__InfluenzaA__AAY44651
augaagaccaucauugcccugagcuacauacucugccuuguguucgcucagaaacugcccgucaacgacaauuccacagcaacuuuguguuuaggccaccaugccguuccuaacgggacgcuggugaagaccaucacaaaugaucacauugagguaacuaacgcgaccgaacuugugcaaucuucaaguacaggaagaaucugcgacagcccacaucagauucucgauggugagaauuguacccugaucgacgcucuacugggcgauccgcacugcgacggguuucagaacaaagaaugggauuuguucgucgagagguccacugccuauucuaauuguuaccccuaugacgugccugauuacgcaucgcuccggucacugguugccagcaguggaacacuggaauuuaacaaugaguccuucaacuggaccggcguggcucagaaugguacgucuagcgcaugcaagcgccgauccauaaaaucauuuuucagucgucucaacugguuacaucaacugaaguauaaguacccagcccuuaaugucacuaugcccaacaaugagaaauuugacaaguuguauaucuggggagugcaccacccuagcaccgauucugaccagauuucccuguacgcucaggccucagggagaguaacaguuagcacuaaaaggagucagcaaaccgugaucccaaacauuggcucucggcccugggaacgcggcgucuccagcagaaucucgauauacuggacaauugugaagccuggggauauccuacucauuaacucuaccggaaaucugaucgcgccaagggguuauuucaaaauccgguccggcaagucaaguauuaugcgcagcaacgcaccgauagggaaguguaauuccgagugcaucacgcccaacggaucuauuccuaaugacaaaccauuucagaacgugaaucgaaucacuuacggcgccugucccagauaugucaagcagaacacacuuaaacuggcuaccgguaugaggaauguuccugaaaagcagacucgggggauauucggagccauugcaggcuuuaucgagaacggcugggaggggaugguggacggaugguacgguuuccgucaucaaaauagcgaaggcacagggcaggcugccgauuugaaaucaacccaggcggccaucaaccaaauuaauggaaagcucaaccgccugaucgagaaaacgaaugaaaaguuucaccagauugagaaggaguucagugaaguagagggcagaauacaggacuuagaaaaauauguggaggauaccaagaucgaccugugguccuacaacgcagaacuccuugucgcucuggagaaccagcauacaauugauuugacugacagcgaaaugaauaaacuauucgagaggacccggaagcaacugaaagagaacgccgaagauauggguaaugggugcuuuaagaucuaucacaagugugacaacgcuugcaucggcucuauucgaaauggaacauacgaucacgacguguaccgcgaugaggcccucaacaauagauuccagauaaaaggcguugaacugaagucaggguauaaagacuggauccuuuggauuaguuuugcaaucagcugcuuccuguugugugugguccuccugggauuuauuaugugggccugccagaaggguaacaucagguguaauauaugcaucuga

SEQ ID NO: 128211 - RNA, 1701 nt, Artificial Sequence
  derived and/or modified CDS sequence (opt3) from hemagglutinin__InfluenzaA__AAY44755
augaagaccaucauugcccugagcuacauacucugccuuguguucgcucagaaacugcccggcaacgacaauuccacagcaacuuuguguuuagggcaccaugccgucccuaacggaacgcugguuaagaccaucacaaaugaucaaauugaggugacuaacgcgaccgaacuuguacagucuucaaguacagguagaaucugcgacagcccacaccagauucucgauggcgagaauuguacccugaucgacgcucuacugggggauccgcauugcgacggauuucagaacaaagaaugggauuuguucguggagagguccaaggccuauucuaauuguuaccccuaugacgucccugauuacgcaucgcuccggucacugguggccagcaguggcacucuggaauuuaacaaugaguccuucaacuggacagguguugcucaaaaugggaccucuagcgcaugcaaacgccgauccaacaagucauuuuucagucgucucaauugguuacaccagcugaaguauaaauacccagcccuuaacgugacgaugcccaauaacgagaaguuugacaaauuguauauauggggaguccaucacccuagcacugauucugaccagaucucccuguacgcucaggccucaggcagagugaccguaagcacaaagaggggccaacagacuguuauuccaaacaucgggagucggcccugggugcgcggagucucuuccauuaucagcauauacuggaccauugugaaaccuggugauauccuacucauuaauucgacaggcaaccugaucgcgccaagaggguauuucaagaucaggucuggaaaguccucagugaugcggagugacgcaagcauuggcaaauguaauuccgaaugcauaaccccgaacgguucuauccccaaugacaagccuuuucagaacgucaaucgcauuacguacggggccuguccacgauauguuaaacagaacacucuuaagcuggcuacaggaaugagaaaugugcccgagaaacaaaccaggggcaucuucggcgccauagcaggguuuauugaaaacggaugggaggguaugguagauggcugguacggguuccggcaccagaauagcgagggaacuggccaggcugccgacuugaagucaacacaagcggccaucaaccagaucaaugguaaacucaaccgucugauugaaaagaccaaugagaaguuucaucagaucgaaaaagaguucagugaaguggaggggcgcauucaggauuuagagaaguaugucgaagacacgaaaauagaucugugguccuacaacgcagagcuccuuguggcucuggaaaaccaacacaccaucgacuugacagauagcgagaugaauaagcuauucgaaagaacuaaaaagcagcugagggagaacgccgaggacaugggcaauggaugcuuuaagauuuaucauaaaugugauaacgcuugcaucggcucuauccggaaugggaccuacgaccacgauguuuaccgagacgaagcccucaacaaucgcuuccagauuaagggaguggagcugaaaucagguuauaaggacuggauacuuuggaucaguuuugcaauuagcugcuuccuguugugugucgugcuccugggcuuuaucaugugggccugccagaaagggaacauuagauguaauaucugcauauga

SEQ ID NO: 128212 - RNA, 1701 nt, Artificial Sequence
  derived and/or modified CDS sequence (opt3) from hemagglutinin__InfluenzaA__AAY44775
augaagaccaucauugcccugagcuacauacucugccuuguguucgcucagaaacugcccgucaacgacaauuccacagcaacuuuguguuuaggccaccaugccguuccuaacgggacgcuggugaagaccaucacaaaugaucacauugagguaacuaacgcgaccgaacuugugcaaucuucaaguacaggaagaaucugcgacagcccacaucagauucucgauggugagaauuguacccugaucgacgcucuacugggcgauccgcacugcgacggguuucaggauaaagaaugggacuuguucgucgagagguccacugccuauucuaacuguuaccccuaugaugugccugacuacgcaucgcuccggucacugguugccagcaguggaacacuggaauuuaauaacgaguccuucaauuggaccggcguggcucagaacgguacgucuagcgcaugcaagcgccgauccauaaaaucauuuuucagucgucucaauugguuacaucaacugaaguauaaguacccagcccuuaacgucacuaugcccaauaacgagaaauuugauaaguuguauaucuggggagugcaccacccuagcaccgacucugaucagauuucccuguacgcucaggccucagggagaguaacaguuagcacuaaaaggagucagcaaaccgugaucccaaauauuggcucucggcccuggguccgcggcguguccagcagaaucucgauauacuggacaauugugaagccuggggacauccuacucauuaacucuaccggaaaccugaucgcgccaagggguuauuucaaaauccgguccggcaagucaaguauuaugcgcagcaaugcaccgauagggaaguguaacuccgaaugcaucacgcccaauggaucuauuccuaacgacaaaccauuucagaaugucaaccgaaucacuuacggcgccugucccagauauguuaagcagacaacccuuaaacuggcuacugguaugaggaaugugccugagaagcagacacgggggauauucggagccauugcaggcuuuaucgaaaacggcugggaggggaugguagauggaugguacgguuuccgucaucaaaauagcgagggcaccgggcaggcugccgacuugaaaucaacgcaggcggccaucaaccaaauuaauggaaagcucaaccgccugaucgagaaaaccaaugaaaaguuucaccagauugaaaaggaguucagugaaguggagggcagaauacaggauuuagagaaauaugucgaagacacaaagaucgaucugugguccuacaacgcagagcuccuuguggcucuggaaaaucagcauacuauugacuugaccgauagcgagaugaacaaacuauucgaaaggacacggaagcaacugcgagagaacgccgaggacauggguaaugggugcuuuaaaaucuaucacaagugugauaacgcuugcaucggcucuauucgcaauggaacuuacgaccacgauguuuacagagacgaagcccucaacaauagguuccagauaaagggcguggagcugaaaucaggguauaaggacuggauccuuuggauuaguuuugcaaucagcugcuuccuguugugugucgugcuccugggauuuauuaugugggccugccagaaagguaacauccgguguaauauaugcaucuga

SEQ ID NO: 128213 - RNA, 1701 nt, Artificial Sequence; identical to SEQ ID NO: 128120
  derived and/or modified CDS sequence (opt3) from hemagglutinin__InfluenzaA__AAY44785

SEQ ID NO: 128214 - RNA, 1701 nt, Artificial Sequence
  derived and/or modified CDS sequence (opt3) from hemagglutinin__InfluenzaA__AAY44795
augaagaccaucauugcccugagcuacauacucugccuuguguucgcucagaaacugcccgucaacgacaauuccacagcaacuuuguguuuaggccaccaugccguuccuaacgggacgcuggugaagaccaucacaaaugaucacauugagguaacuaacgcgaccgaacuugugcaaucuucaaguacaggaagaaucugcgacagcacccaucagauucucgauggugagaauuguacucugaucgacgcucuacugggcgauccacacugcgacggguuucagaacaaagaaugggauuuguucgucgagagguccacagccuauucuaauuguuacccguaugacgugcccgauuacgcaucgcuccggucacugguugccagcaguggaacccuggaauuuaacaaugaguccuucaacuggacgggcguggcucagaaugguacuucuagcgcaugcaagcgccgauccauaaaaucauuuuucagucgucucaacugguuacaucaacugaaguauaaguacccugcccuuaaugucaccaugccaaacaaugagaaauuugacaaguuguauaucuggggagugcaccaccccagcacagauucugaccagauuucccuguacgcucaggccucagggagaguaacuguuagcaccaaaaggagucagcaaacagugaucccuaacauuggcucucggccauggguccgcggcguguccagcagaaucucgauauacuggaccauugugaagcccggggauauccuacucauuaacucuacgggaaaucugaucgcgccuagggguuauuucaaaauccgguccggcaagucaaguauuaugcgcagcaacgcaccaauagggaaguguaauuccgaaugcaucacuccgaacggaucuauucccaaugacaaaccuuuucagaacgucaaucgaaucacauacggcgccuguccaagauauguuaagcagaacacccuuaaacuggcuacugguaugaggaaugugcccgagaagcagacacgggggauauucggagccauugcaggcuuuaucgaaaacggcugggaggggaugguagacggaugguacgguuuccgucaucaaaauagcgagggcaccgggcaggcugccgauuugaaaucaacgcaggcggccaucaaccaaauuaauggaaagcucaaccgccugaucgagaaaaccaaugaaaaguuucaccagauugaaaaggaguucagugaaguggagggcagaauacaggacuuagagaaauaugucgaagauacaaagaucgaccugugguccuacaacgcagagcuccuuguggcucuggaaaaccagcauacuauugauuugaccgacagcgagaugaauaaacuauucgaaaggacacggaagcaacugcgagagaacgccgaggauauggguaaugggugcuuuaaaaucuaucacaagugugacaacgcuugcaucggcucuauucgcaauggaacuuacgaucacgacguuuacagagaugaagcccucaacaauagguuccagauaaagggcguggagcugaaaucaggguauaaggacuggauccuuuggauuaguuuugcaaucagcugcuuccuguugugugucgugcuccugggauuuauuaugugggccugccagaaagguaacauccgguguaauauaugcaucuga

SEQ ID NO: 128215 - RNA, 1701 nt, Artificial Sequence
  derived and/or modified CDS sequence (opt3) from hemagglutinin__InfluenzaA__AAY44796
augaagaccaucauugcccugagcuacacacucugccuuguguucgcucagaaacugcccggcaacgacaauuccacugcaacguuguguuuagggcaccaugccgucccuaacggaaccauaguuaagacaaucacuaaugaucaaauugaggugaccaacgcgacagaacugguacagucuucaaguaccgguggcaucugcgacagcccacaccagauucuagauggggagaauuguacucucaucgacgcucugcuuggagauccgcagugcgacggcuuucaaaacaaaaagugggaucuguucguggaaagauccaaagccuauucuaauuguuaccccuaugacgucccugauuacgcaucguugaggucacucguggccagcagugguacacuggaguuuaacaaugaauccuucgacuggaccgggguuacgcagaacggaacuucuagcgcuugcaagcggcgcuccaauaagucauuuuucagucgacugaacuggcucacccauuuaaaauauaaguacccagcacugaaugugacaaugcccaacaaugagaaauuugauaaacuuuauauauggggcguccaccauccuggcacugacagcgaucagaucucuuuguacgcccaggcuuccgggcguauuaccgugucaacaaagagaagccaacagaccguaaucccaaacauuggaaguaggccccggguucgcgacgugucuuccagaaucagcauauacuggacgauugucaagccuggugacauccugcuaauuaacucgacuggcaaucucaucgccccaaggggguauuucaagauccggucuggaaaauccucaauuaugcgcagugaugcgccgauaggcaaguguaacagcgagugcaucacacccaaugguuccauuccuaacgacaaaccauuucagaaugugaaccgaaucaccuacggggcaugucccagauauauaaagcagaauacucugaaacuugccacaggaaugaggaacgugccugaaaagcaaacccggggcauuuucggcgcuaucgccggguuuaucgagaauggaugggaagguauggucgauggcugguacggguuccgucaccagaacucugagggaacgggccaggcagcugaccugaaaagcacccaagccgcgauuaaucagaucaacgguaaguugaaucgccucauugggaagacaaacgagaaauuucaccagauagaaaaggaguucucagaaguugagggcagaauccaggaucuggaaaaauauguggaggacacuaagauugauuuauggaguuacaaugccgagcugcucguagcacuugaaaaccaacauaccaucgaccugacagauuccgagaugaacaaauuguucgaaaggacuaagaagcagcuacgggagaaugcugaagacaugggaaacggcugcuuuaaaaucuaucacaagugugauaaugccugcauugggagcauacgaaacggaaccuacgaccaugacguguaccgcgaugaggcucugaauaacagauuccagaucaaaggugucgagcucaagucuggcuauaaagacuggauucuguggaucucauuugccauuaguugcuuccuucuguguguggcauugcucggguuuaucaugugggccugccagaagggaaauauaagguguaacaucugcauuuga

SEQ ID NO: 128216 - RNA, 1701 nt, Artificial Sequence; identical to SEQ ID NO: 128095
  derived and/or modified CDS sequence (opt3) from hemagglutinin__InfluenzaA__AAY44896

SEQ ID NO: 128217 - RNA, 1701 nt, Artificial Sequence
  derived and/or modified CDS sequence (opt3) from hemagglutinin__InfluenzaA__AAY44906
augaagaccaucauugcccugagcuacauacucugccuuguguucgcucagaaacugcccggcaacgacaauuccacagcaacuuuguguuuagggcaccaugccgucccuaacggaacgaucguuaagaccauuacaaaugaucaaaucgaggugacuaacgcgaccgaacugguacagucuucaaguacagguggcauuugcgacagcccacaccagauccuagauggggagaauuguacccucauagacgcucugcuuggagauccgcagugcgacggcuuucaaaacaaaaagugggaucuguucguggaaagauccaaagccuauucuaauuguuaccccuaugacgucccugauuacgcaucguugaggucacucguggccagcagugguacucuggaguuuaacaaugaauccuucgacuggacagggguuacccagaacggaacgucuagcgcuugcaagcggcgcuccaauaagucauuuuucagucgacugaacuggcucacucauuuaaaauauaaguacccagcacugaaugugaccaugcccaacaaugagaaauuugauaagcuguauaucuggggcguccaccauccuggcacagacagcgaucagauuucuuuguacgcccaggcuuccgggcguaucacugugucaaccaaaagaagccaacagacaguaauuccaaacaucggaaguaggccccggguucgcgacgugucuuccagaauaagcauuuacuggaccaucgucaagccuggugacauucugcuaaucaacucgacgggcaaucucaucgccccaaggggguauuucaagauucggucuggaaaauccucaauaaugcgcagugaugcgccgaucggcaaguguaacagcgagugcauuacucccaaugguuccaucccuaacgacaaaccauuucagaaugugaaccgaauaacauacggggcaugucccagauaugugaagcagaauacccugaaacuugccacuggaaugaggaacgucccugaacggcaaacacguggcauuuucggcgcuaucgccggguuuaucgagaauggaugggaagguaugguugauggcugguacggguuccgccaccagaacucugagggaaccggccaggcagcugaccuuaagagcacgcaagccgcgauuaaucagaucaacgguaaauugaauagacucauugggaagaccaacgagaaguuucaccagauagaaaaagaguucucagaaguggagggcaggauccaggaucuggaaaaguauguagaggacacaaaaauugauuuauggaguuacaaugccgagcugcucguggcacuugaaaaccaacauacuaucgaccugaccgauuccgagaugaacaaguuguucgaacggacuaaaaagcagcuacgagagaaugcugaagacaugggaaacggcugcuuuaagaucuaucacaaaugugauaaugccugcauugggagcauacgcaacggaacauacgaccaugacgucuacagagaugaggcucugaauaacagguuccagaucaaggguguggagcucaaaucuggcuauaaggacuggauucuguggaucucauuugccauuaguugcuuccuucuguguguugcauugcucggguuuaucaugugggccugccagaaaggaaauauacgguguaacaucugcauuuga

SEQ ID NO: 128218 - RNA, 1701 nt, Artificial Sequence
  derived and/or modified CDS sequence (opt3) from hemagglutinin__InfluenzaA__AAY46371
augaagaccaucauugcccugagcuacauacucugccuuguguucgcucagaaacugcccggcaacgacaauuccacagcaacuuuguguuuagggcaccaugccgucccuaacggaacgcugguuaagaccaucacaucugaucaaauugaggugacuaaugcgaccgaacugguacagucaaguagcacagguagaaucugcgacuccccacacaggauucucgauggcgagaacuguacccugaucgacgcuuugcugggggauccgcauugcgacggauuucagaauaaagaaugggauuuguucguggagcggucuaaggccuauucgaacuguuaccccuaugacgucccugauuacgcaucacuccgcagccugguggccaguuccggcacucuggaauuuaauaacgagucuuucaauuggacagguguugcucagaacgggaccagcuuugcaugcaaacgacguuccauaaagucauucuuuaguagacucaauugguuacaccaacugaaguauaaauacccagcccuuaacgugacgaugcccaauaacgacaaguucgauaaauuguauaucuggggaguccaucacccuggcacugacagcgaucagaccucucuguacgcucaggccuccggcagggugacaguaucaacuaagcggagccagcaaaccguuauuccaaauaucgggagucgccccugggugagaggagucucuuccaggauuagcaucuacuggacaauagugaaaccuggugacauucuacucaucaacucgaccggcaaccugauugcgccacggggguauuuuaagauccgcucuggaaaguccucaaucaugcgaagugacgcaccgauuggcaaauguaauagcgagugcauaacgcccaacgguuccaucccuaaugggaagccauuccagaacgugaauagaauuacuuacggagccugucccagguaugucaaacagaacacacuuaagcuggcuaccggcaugcggaauguuccugaaaaacagacucguggcaucuuuggggccauagcaggauucauugagaacgguugggaaggcaugguggaugggugguacggauuucgccaccaaaauucugagggcacaggucaggcugccgaccuuaagagcacccaggcggccaucaaccaaaucaaugggaaacucaacagacugauugagaagacgaaugaaaaguuccaucagaucgagaaagaguucaccgaaguagaaggcaggauucaggauuuagagaaguauguggaggacacaaaaauagaucuguggucauacaacgcagaacuccuugucgcucuggagaaucagcacacuaucgacuugaccgauagugaaaugaacaagcuauuugagcggacacgaaaacaacugcgcgaaaacgccgaggacaugggaaauggcugcuucaagauuuaucauaagugugauaacgcuugcaucggguccaucagaaauggaacuuacgaccacgauguguacagggacgaggcccucaacaaucgguuucagauuaaagguguugaacuaaagagcggcuauaaagacuggauacuuuggaucucuuucgcaaccucaugcuuucuguugugugugguccuccugggguucauuaugugggccugccagaagggaaacauccgcuguaauauuugcaucuga

SEQ ID NO: 128219 - RNA, 1701 nt, Artificial Sequence; identical to SEQ ID NO: 128080
  derived and/or modified CDS sequence (opt3) from hemagglutinin__InfluenzaA__AAY46381

SEQ ID NO: 128220 - RNA, 1701 nt, Artificial Sequence
  derived and/or modified CDS sequence (opt3) from hemagglutinin__InfluenzaA__AAY46391
augaagaccaucauugcccugagcuacauacucugccuuguguucgcucagaaacugcccgucaacgacaauuccacagcaacuuuguguuuaggccaccaugccguuccuaacgggacgcuggugaagaccaucacaaaugaucacauugagguaacuaacgcgaccgaacuugugcaaucuucaaguacaggaagaaucugcgacagcccacaucagauucucgauggugagaauuguacccugaucgacgcucuacugggcgauccgcacugcgacggguuucagaacaaagaaugggauuuguucgucgagagguccacugccuauucuaauuguuaccccuaugacgugccugauuacgcaucgcuccggucacugguugccagcaguggaacacuggaauuuaacaaugaguccuucaacuggaccggcguggcucagaaugguacgucuagcgcaugcaagcgccgauccauaaaaucauuuuucagucgucucaacugguuacaucaacugaaguauaaguacccagcccuuaaugucacuaugcccaacaaugagaaauuugacaaguuguauaucuggggagugcaccacccuagcaccgauucugaccagauuucccuguacgcucaggccucagggagaguaacaguuagcacuaaaaggagucagcaaaccgugaucccaaacauuggcucucggcccuggguccgcggcguguccagcaucauaucgauuuacuggacaaucgugaagccuggggauauucuacucaucaacucuaccggaaaucugaucgcgccaagagguuauuucaaaauuagguccggcaagucaaguauaaugcggagcaacgcaccgaucgggaaguguaauuccgaaugcauuacgcccaacggaucuaucccuaaugacaaaccauuucagaacgucaaucgcauaacuuacggcgccuguccccgauauguuaagcagaacacacuuaaacuggcuaccgguaugagaaaugugccugagaagcagacuagggggauuuucggagccaucgcaggcuuuaucgaaaacggcugggaggggaugguagacggaugguacgguuuccggcaucaaaauagcgagggcacagggcaggcugccgauuugaaaucaacccaggcggccauuaaccaaaucaauggaaagcucaaccgucugauugagaaaacgaaugaaaaguuucaccagauagaaaaggaguucagugaaguggagggccgcauccaggacuuagagaaauaugucgaagauaccaagauugaccugugguccuacaacgcagagcuccuuguggcucuggaaaaccagcauacaaucgauuugacugacagcgagaugaauaaacuauucgaaagaaccaggaagcaacugcgggagaacgccgaggauauggguaaugggugcuuuaaaaucuaucacaagugugacaacgcuugcauuggcucuauacgaaauggaacauacgaucacgacguuuaccgcgaugaagcccucaacaauagauuccagaucaagggcguggagcugaaaucaggguauaaggacuggauucuuuggaucaguuuugcaauuagcugcuuccuguugugugucgugcuccugggauuuaucaugugggccugccagaaagguaacauaagguguaauaucugcauuuga

SEQ ID NO: 128221 - RNA, 1701 nt, Artificial Sequence
  derived and/or modified CDS sequence (opt3) from hemagglutinin__InfluenzaA__AAY46426
augaagaccaucauugcccugagcuacauacucugccuuguguucgcucagaaacugcccggcaacgacaauuccacagcaacuuuguguuuagggcaccaugccgucccuaacggaacgcugguuaagaccaucacaaaugaucaaauugaggugacuaacgcgaccgaacuuguacagucuucaaguacagguagaaucugcgacagcccacaccagauucucgauggcgagaauuguacccugaucgacgcucuacugggggauccgcauugcgacggauuucagaacaaagaaugggauuuguucguggagagguccaaggccuauucuaauuguuaccccuaugacgucccugauuacgcaucgcuccggucacugguggccagcaguggcacucuggaauuuaacaaugaguccuucaacuggacagguguugcucaaaaugggaccucuagcgcaugcaaacgccgauccaacaagucauuuuucagucgucucaauugguuacaccagcugaaguauaaauacccagcccuuaacgugacgaugcccaauaacaagaaauuugacaaguuguauauauggggaguccaucacccuagcacugauucugaccagaucucccuguacgcucaggccucaggcagagugaccguaagcacaaaaaggagucaacagacuguuauuccaaacaucggcucucggcccugggugcgcggggucuccagcagaauuucgaucuacuggaccauagugaagccuggagauauucuacucaucaauucuacagguaaccugauugcgccaaggggcuauuucaagauccgguccgggaaaucaaguaucaugcgcagcgacgcaccgauuggaaaguguaauuccgagugcauaacccccaacggcucuaucccuaaugacaaaccauuucagaacgugaaucgaauuacguacggugccugucccagauaugucaagcagaacacucuuaaacuggcuacagggaugaggaauaucccugaaaagcaaacccggggaauauucggcgccauugcaggcuuuaucgagaacgggugggaaggaaugguugaugguugguacggcuuccgucaccagaauagcgaggggacuggacaggcugccgacuugaaaucaacacaagcggccaucaaccagauuaauggcaagcucaaccgccugaucgagaagaccaaugaaaaauuucaucagauugagaaggaguucagugaaguggaagguagaauacaggauuuagagaaauauguagaggacacgaagaucgaucugugguccuacaacgcagaacuccuuguggcucuggagaaccaacacaccauugacuugacagauagcgaaaugaauaaacuauucgagaggacuaagaagcagcugcgggaaaacgccgaggacauggggaauggcugcuuuaaaaucuaucauaagugugauaacgcuugcaucggaucuauucgaaauggcaccuacgaccacgaugucuaccgcgacgaggcccucaacaauagauuccagauaaaagggguggaacugaagucaggauauaaagacuggauccuuuggauuaguuuugcaaucagcugcuuccuguuguguguugugcuccuggguuuuauuaugugggccugccagaagggcaacaucagguguaauauaugcaucuga

SEQ ID NO: 128222 - RNA, 1701 nt, Artificial Sequence
  derived and/or modified CDS sequence (opt3) from hemagglutinin__InfluenzaA__AAY47013
augaagaccaucauugcccugagcuacauacucugccuuguguucgcucagaaacugcccggcaacgacaauuccacagcaacuuuguguuuagggcaccaugccgucccuaacggaacgcugguuaagaccaucacaaaugaucaaauugaggugacuaacgcgaccgaauugguacagucuucaaguacagguagaaucugcgacagcccacaccagauucucgauggcgagaauuguacccugaucgacgcccuucugggggauccgcauugcgacggauuucagaacaaagaaugggauuuguucguggagagguccaaggcuuauucuaauuguuaccccuaugacgucccugauuacgugucgcuccggucacugguugcaagcaguggcacucuggaauuuaacaaugaguccuucaacuggacagguguggcccaaaaugggaccucuagcgcuugcaaacgccgauccgacaagucauuuuucagucgucucaacugguuacaccagcugaaguauaaauacccagcacuuaaugucacgaugcccaacaaugagaaguuugauaaauuguauauauggggagugcaucacccuggcacugacagcgaucagaucucucuguacgcccaggcuuccggcagaguaaccguuucaacaaagaggagccaacagacugugauuccaaacaucgggaguggacccuggguccggggugugucuucccgcauuagcaucuacuggaccauagugaaaccuggcgacauucuacucaucaacucgacagggaaucugauugccccaagaggauauuucaagaucaggucuggcaaguccucaaucaugcggagugacgcgccgauugguaaauguaacagcgaaugcauaacccccaauggguccaucccuaacgauaagccauuucagaaugucaaccgcauuacguacggacccuguccucgauauguuaaacagaauacucuuaagcuggcaacaggcaugagaaacgugccagagaaacaaaccaggggcaucuucggggccauagcuggauuuauugaaaaugguugggagggcaugauggacgggugguacggauuccggcaccagaacucugagggcacuggucaggccgcagaucuaaagagcacacaagcugccaucaaucagaucaacgggaaacucaaucgucugauuaagaagaccaacgaaaaauuucaucagaucgagaaggaguucucagaaguagaaggccgcauucaggacuuagagaaauauguggaggauacgaagauagaccuguggaguuacaaugcggaacuccuugucgcccuggagaaccaacacaccaucgauuugacagacuccgaaaugaacaaacuauucgagagaacuaagaagcagcugagggaaaaugcagaggauaugggaaacggcugcuuuaaaauuuaucauaagugugacaaugcuugcaucgggagcauccggaacggaaccuacgaucacgacguguaccgagacgaggcccucaauaaccgcuuccagauuaaagguguugaacugaagucuggcuauaaagauuggauacuuuggaucucauuugcuauuaguugcuuccuguuguguaucgugcuccugggguuuauuaugugggccugccagaagggaaauaucagauguaacauaugcaucuga

SEQ ID NO: 128223 - RNA, 1701 nt, Artificial Sequence
  derived and/or modified CDS sequence (opt3) from hemagglutinin__InfluenzaA__AAY47023
augaagaccaucauugcccugagcuacauacucugccuuguguucgcucagaaacugcccggcaacgacaauuccacagcaacuuuguguuuagggcaccaugccgucccuaacggaacgcugguuaagaccaucacaaaugaucaaauugaggugacuaacgcgaccgaacuuguacagucuucaaguacaagcagaaucugcgacuccccacaccagauucucgauggugagaauuguacccugaucgacgcucuacugggcgauccgcauugcgacggguuucagaacaaagaauggggauuguucguggagaggucuaaggccuauucgaauuguuaccccuaugaugucccugacuacgugucacuccggagccugguugcaaguuccggcacucuggaauuuaacaaugagucuuucaacuggacagguguggcccaaaaugggaccagcuccgcuugcaaacgccgaucagauaagagcuuuuucagucgucucaacugguuacaccagcugaaguauaaauacccagcacuuaaugucacgaugcccaacaaugagaaguuugacaaauuguauauauggggagugcaucacccuggcacugauucugaccagaucucccuguacgcccaggcuucaggcagaguaaccguuagcacaaagaggagucaacagacugugauuccaaacaucgggucucggcccuggguccgcggaguguccagcagaauuucgaucuacuggaccauagugaaaccuggugauauucuacucaucaacucuacaggcaaucugauugccccaaggggguauuucaagauccgguccggaaagucaaguaucaugcgcagcgacgcgccgauuggcaaauguaacuccgaaugcauaacccccaaugguucuaucccuaacgacaagccauuucagaaugucaaccgaauuacguacggggcaugucccagauauguuaaacagaauacucuuaagcuggccacaggaaugaggaacgugccugagaaacaagcucggggcaucuucggcgccauagcaggguuuauugaaaauggaugggaggguaugauggauggcugguacggguuccgucaccagaacagcgagggaaccggccaggcugccgacuugaagucaacucaagcggccaucaaucagaucaacgguaaacucaaucgccugauugaaaagacaaacgagaaguuucaucagaucgaaaaagaguucagugaaguagaggggaggauucaggauuuagagaaguauguggaagacaccaaaauagaucugugguccuacaaugcagagcuccuugucgcucuggaaaaccaacacacgaucgacuugaccgauagcgagaugaacaagcuauucgaaagaacuaaaaagcagcugcgggagaaugccgaggacaugggcaacggaugcuuuaagauuuaucauaaaugugauaaugcuugcaucggcucuauccgaaacgggacauacgaccacgauguguaccgcgacgaagcccucaauaacagauuccagauuaagggaguugagcugaaaucagguuauaaggacuggauacuuuggaucaguuuugcaauuagcugcuuccuguuguguaucgugcuccugggcuuuauuaugugggccugccagaaagggaauaucagguguaacauaugcaucuga

SEQ ID NO: 128224 - RNA, 1701 nt, Artificial Sequence; identical to SEQ ID NO: 128220
  derived and/or modified CDS sequence (opt3) from hemagglutinin__InfluenzaA__AAY47052

SEQ ID NO: 128225 - RNA, 1701 nt, Artificial Sequence
  derived and/or modified CDS sequence (opt3) from hemagglutinin__InfluenzaA__AAY47075
augaagaccaucauugcccugagcuacauacucugccuuguguucgcucagaaacugcccggcaacgacaauuccauggcaacauuguguuuagggcaccaugccgucccuaacggaacucugguuaagacgaucaccaaugaucaaauugaggugacaaacgcgacugaacuuguacagucuucaaguaccgguagaaucugcgacagcccacaccagauucucgauggcgagaauuguacacugaucgacgcucuacugggggauccgcauugcgacggauuucagaacaaagaaugggauuuguucguggagagguccaaggccuauucuaauuguuaccccuaugacgucccugauuacgugucgcuccggucacugguugcaagcaguggcacccuggaauuuaacaaugaguccuucaacuggacugguguggcccaaaaugggacaucuagcgcuugcaaacgccgauccaacaagucauuuuucagucgucucaauugguuacaccagcugaagaacaaauauccagcacuuaaugucaccaugcccaacaacgagaaguuugacaaauuguacauauggggagugcaucacccuggcacggauagcgaccagaucucucuguaugcccaggcuuccggcagaguaacuguuucaaccaagaggagccaacagacagugauuccaaauaucgggagucggccccgcgucagagauauuucuuccaggaucagcauauacuggacuauugugaaaccuggagacauccuacucauuaacucgaccgguaaucugaucgccccacggggcuacuucaagauccgcucugggaaguccucaauuaugcgaagugacgcgccgauaggaaaauguaacagcgaaugcaucacacccaauggcuccauuccuaacgauaagccauuucagaaugugaacagaaucaccuauggugcaugucccagguacgucaaacagaauacgcuuaagcuggccacugggaugcggaacguuccugagaaacaaacacguggaauauucggcgcuauugccggcuuuaucgaaaaugggugggagggaaugauggacgguugguauggcuuccgccaccagaacucugaggggaccggacaggcagcugauuugaaaagcacucaagccgcgaucaaucagauuaacggcaaacucaauagacugaucgaaaagacaaacgagaaguuucaucagauugaaaaagaguucucagaaguggaggguaggauacaggacuuagagaaguacguagaagauaccaaaaucgaccuguggaguuauaacgccgagcuccuuguggcacuggaaaaucaacacacgauugauuugaccgacuccgagaugaacaagcuauucgaacggacaaagaagcagcugcgagagaaugcugaggauauggggaacggcugcuuuaagaucuaccauaaaugugacaaugccugcaucggaagcauucgcaacggcacuuaugaucacgacgucuacagagacgaagcucucaauaacagguuccagauaaaggggguggagcugaaaucuggauacaaggauuggauccuuuggauuucauuugccaucaguugcuuccuguuguguauuguucuccuggguuuuaucaugugggcaugccagaaaggcaauauacgguguaacaucugcauuuga

SEQ ID NO: 128226 - RNA, 1701 nt, Artificial Sequence
  derived and/or modified CDS sequence (opt3) from hemagglutinin__InfluenzaA__AAY47085
augaagaccaucauugcccugagcuacauacucugccuuguguucgcucagaaacugcccggcaacgacaauuccacagcaacuuuguguuuagggcaccaugccgucccuaacggaacgaucguuaagaccauuacaaaugaucaaaucgaggugacuaacgcgaccgaacugguacagucuucaaguacagguggcauuugcgacagcccacaccagauccuagauggggagaauuguacccucauagacgcucugcuuggagauccgcagugcgacggcuuucaaaacaaaaagugggaucuguucguggaaagauccaaagccuauucuaauuguuaccccuaugacgucccugauuacgcaucguugaggucacucguggccagcagugguacucuggaguuuaacaaugaauccuucaacuggacagggguuacccagaauggaacgucuagcgcuugcaagcggcgcuccaacaagucauuuuucagucgacugaauuggcucacucauuuaaaauauaaguacccagcacugaacgugaccaugcccaauaacgagaaauuugacaaacuuuauaucuggggcguccaccauccuggcacagauagcgaccagauuucuuuguacgcccaggcuuccgggcguaucacugugucaaccaagagaagccaacagacaguaauuccaaacguuggaaguaggccccgggugcgcgaugucucuuccagaaucagcauauacuggaccauugugaagccuggugacauccugcuaauuaauucgacgggcaaccucaucgccccaaggggguauuucaagauccggucuggaaaauccucaauuaugcgcagugacgcgccgauaggcaaguguaauagcgagugcaucacucccaacgguuccauuccuaaugauaaaccauuucagaacgugaaucgaaucacauacggggcaugucccagauaugucaagcagaacacccugaaacuugccacuggaaugaggaauguuccugaaaagcaaacacggggcauauucggcgcuauugccggguuuaucgagaacggaugggaagguaugguggacggcugguacggguuccgucaccaaaauucugagggaaccggccaggcagcugaucugaaaagcacgcaggccgcgaucaaccagauuaaugguaaguugaaccgccucaucgggaagaccaaugagaaauuucaccagauugaaaaggaguucucagaaguagagggcagaauacaggaccuggaaaaauauguggaggauacaaagaucgacuuauggaguuacaacgccgagcugcucgucgcacuugaaaaccaacauacuauugaucugaccgacuccgagaugaauaaauuguucgaaaggacaaagaagcagcuacgggagaacgcugaagauaugggaaauggcugcuuuaaaaucuaucacaagugugacaacgccugcaucgagagcauucgaaaugggacuuacgaucaugacguguaccgcgacgaggcucugaacaauagauuccagauaaaaggaguugaacucaagucugguuauaaagauuggauccuguggauuucauuugccaucaguugcuuccuucuguguguggcauugcucggcuuuauuaugugggccugccagaaggggaacaucagguguaauauaugcaucuga

SEQ ID NO: 128227 - RNA, 1701 nt, Artificial Sequence
  derived and/or modified CDS sequence (opt3) from hemagglutinin__InfluenzaA__AAY58320
augaagaccaucauugcccugagcuacauacucugccuuguguucgcucagaaacugcccggcaacgacaauuccacagcaacuuuguguuuagggcaccaugccgucccuaacggaacgaucguuaagaccauuacaaaugaucaaaucgaggugacuaacgcgaccgaacugguacagucuucaaguacagguggcauuugcgacagcccacaccagauccuagauggggagaauuguacccucauagacgcucugcuuggagauccgcagugcgacggcuuucaaaacaaaaagugggaucuguucguggaaagauccaaagccuauucuaauuguuaccccuaugacgucccugauuacgcaucguugaggucacucguggccagcagugguacucuggaguuuaacaaugaauccuucgacuggacagggguuacccagaacggaacgucuagcgcuugcaagcggcgcuccaauaagucauuuuucagucgacugaacuggcucacucauuuaaaauauaaguacccagcacugaaugugaccaugcccaacaaugagaaauuugauaaacuuuauaucuggggcguccaccauccuggcacagacagcgaucagauuucuuuguacgcccaggcuuccgggcguaucacugugucaaccaagagaagccaacagacaguaauuccaaacaucggaaguaggccccggguucgcgacauaucuuccagaauuagcaucuacuggaccauugugaagccuggugacauccugcuaaucaacucgacgggcaaucucauugccccaaggggguauuucaagauacggucuggaaaauccucaaucaugcgcagugaugcgccgauuggcaaguguaacagcgagugcaucacucccaaugguuccauaccuaacgacaaaccauuucagaaugucaaccgaauuacauacggggcaugucccagauaugugaagcagaauacccugaaacuugccacuggaaugaggaacgugccugaaaagcaaacacggggcaucuucggcgcuaucgccggguuuauugagaauggaugggaagguauggucgauggcugguacggguuccgucaccagaacucugagggaaccggccaggcagcugaccugaaaagcacgcaagccgcgaucaaucagauuaacgguaaguugaaucgccucauagggaagaccaacgagaaauuucaccagaucgaaaaggaguucucagaaguugagggcaggauucaggaucuggaaaaauauguggaggacacaaagaucgauuuauggaguuacaaugccgagcugcucguagcacuugaaaaccaacauacuaucgaccugaccgauuccgagaugaacaaauuguucgaaagaacaaagaagcagcuacgggagaaugcugaagacaugggaaacggcugcuuuaaaauuuaucacaagugugauaaugccugcauagggagcauccgaaacggaacuuacgaccaugacguguaccgcgaugaggcucugaauaacagauuccagauuaaaggugucgagcucaagucuggcuauaaagacuggauccuguggauuucauuugccaucaguugcuuccuucuguguguggcauugcucggguuuauaaugugggccugccagaagggaaauaucagguguaacauuugcaucuga

SEQ ID NO: 128228 - RNA, 1701 nt, Artificial Sequence
  derived and/or modified CDS sequence (opt3) from hemagglutinin__InfluenzaA__AAY59035
augaagaccaucauugcccugagcuacauacucugccuuguguucgcucagaaacugacagucaacgacaauuccacugcaacguuguguuuaggccaccaugccguucccaacgggacccuggugaagacaaucacuaaugaucacauugagguaaccaacgcgacagaacuugugcaaucuucaaguaccggaagaaucugcgacagcccucaucagauucucgauggugagaauuguacucugaucgacgcucuacugggcgauccacacugcgacggguuucagaacaaagaaugggauuuguucgucgagagguccacagccuauucuaauuguuacccguaugacgugcccgauuacgcaucgcuccggucacugguugccagcaguggaacccuggaauuuaacaaugaguccuucaacuggacgggcguggcucagaaugguacuucuagcgcaugcaagcgccgauccauaaaaucauuuuucagucgucucaacugguuacaucaacugaaguauaaguacccugcccuuaaugucaccaugccaaacaaugagaaauuugacaaguuguauaucuggggagugcaccaccccagcacagauucugaccagauuucccuguacgcucaggccucagggagaguaacuguuagcaccaaaaggagucagcaaacagugaucccuaacauuggcucucggccauggguccgcggcguguccagcagaaucucgauauacuggaccauugugaagcccggggauauccuacucauuaacucuacgggaaaucugaucgcgccuagggguuauuucaaaauccgguccggcaagucaaguauuaugcgcagcaacgcaccaauagggaaguguaauuccgaaugcaucacuccgaacggaucuauucccaaugacaaaccuuuucagaacgucaaucgaaucacauacggcgccuguccaagauauguuaagcagaacacccuuaaacuggcuacugguaugaggaaugugcccgagaagcagacacgggggauauucggagccauugcaggcuuuaucgaaaacggcugggaggggaugguagacggaugguacgguuuccgucaucaaaauagcgagggcaccgggcaggcugccgauuugaaaucaacgcaggcggccaucaaccaaauuaauggaaagcucaaccgccugaucgagaaaaccaaugaaaaguuucaccagauugaaaaggaguucagugaaguggagggcagaauacaggacuuagagaaauaugucgaagauacaaagaucgaccugugguccuacaacgcagagcuccuuguggcucuggaaaaccagcauacuauugauuugaccgacagcgagaugaauaaacuauucgaaaggacacggaagcaacugcgagagaacgccgaggauauggguaaugggugcuuuaaaaucuaucacaagugugacaacgcuugcaucggcucuauucgcaauggaacuuacgaucacgacguuuacagagaugaagcccucaacaauagguuccagauaaagggcguggagcugaaaucaggguauaaggacuggauccuuuggauuaguuuugcaaucagcugcuuccuguugugugucgugcuccugggauuuauuaugugggccugccagaaagguaacauccgguguaauauaugcaucuga

SEQ ID NO: 128229 - RNA, 1701 nt, Artificial Sequence
  derived and/or modified CDS sequence (opt3) from hemagglutinin__InfluenzaA__AAY64202
augaagaccaucauugcccugagcuacauacucugccuuguguucgcucagaaacugcccggcaacgacaauuccacagcaacuuuguguuuagggcaccaugccgucccuaacggaacgaucguuaagaccauuacaaaugaucaaaucgaggugacuaacgcgaccgaacugguacagucuucaaguacagguggcauuugcgacagcccacaccagauccuagauggggagaauuguacccucauagacgcucugcuuggagauccgcagugcgacggcuuucaaaacaaaaagugggaucuguucguggaaagauccaaagccuauucuaauuguuaccccuaugacgucccugauuacgcaucguugaggucacucguggccagcagugguacucuggaguuuaacaaugaauccuucaacuggacagggguuacccagaauggaacgucuagcgcuugcgagcggcgcuccaacaagucauuuuucagucgacugaauuggcucacucauuuaaaguauaaauacccagcacugaacgugaccaugcccaauaacgagaaguuugacaaacuuuauaucuggggcguccaccauccuggcacagauagcgaccagauuucuuuguacgcccaggcuuccgggcguaucacugugucaaccaagagaagccaacagacaguaauuccaaacaucggaaguaggccccggguucgcgaugugucuuccagaauaagcauuuacuggaccaucgucaaaccuggugacauucugcuaaucaauucgacgggcaaccucaucgccccaaggggguauuucaagauucggucuggaaaguccucaauaaugcgcagugacgcgccgaucggcaaauguaauagcgaaugcauuacucccaacgguuccaucccuaaugauaagccauuucagaacgugaaucgaauaacauacggggcaugucccagauaugugaaacagaacacccugaagcuggccacuggaaugaggaaugucccugagaaacaaaaccggggcauuuucggcgcuaucgccggguuuaucgaaaauggaugggaggguaugguugacggcugguacggguuccgucaccagaacucugagggaacaggccaggcagcugaucuuaagagcacccaagccgcgauuaaucagaucaacgguaaauugaaucgccucauugggaagacgaacgaaaaguuucaccagauagagaaagaguucucagaaguggaaggcagaauccaggaccuggagaaguauguagaggauaccaaaauugacuuauggaguuacaacgccgaacugcucguggcacuugagaaucaacauacaaucgaucugacugacuccgaaaugaacaaguuguucgagaggaccaaaaagcagcuacgggaaaaugcugaggauaugggaaacggcugcuuuaagaucuaucacaaaugugacaaugccugcauugggagcauacgaaacggaacauacgaucaugacgucuaccgcgacgaggcucugaauaacagauuccagaucaaggguguggaacucaaaucuggcuauaaggauuggauucuguggaucucauuugccauuaguugcuuccuucuguguguugcauugcucggguuuaucaugugggccugccagaaaggaaauauaaggugugacaucugcauuuga

SEQ ID NO: 128230 - RNA, 1701 nt, Artificial Sequence
  derived and/or modified CDS sequence (opt3) from hemagglutinin__InfluenzaA__AAY64212
augaagaccaucauugcccugagcuacauacucugccuuguguucgcucagaaaauccccgucaacgacaauuccacagcaacucuguguuugggccaccaugccguuccuaacgggacguuagugaagaccauuacaaaugagcacaucgaaguaacuaacgcgaccgagcuggugcaaucuucaaguacaggaagaauuugcgauagcccacaucagauccuagacggugaaaauuguacccucauagaugcucugcuuggcgacccgcacugcgauggguuucagaacaaagagugggaccuguucgucgaaagguccacugccuauucuaauuguuaccccuaugaugugccugacuacgcaucguugcggucacucguugccagcaguggaacacuggaguuuaacaaugaguccuucaacuggaccggcguggcucagaaugguacgucuagcgcaugcaagcgccgauccaucaaaucauuuuucagucgucugaacuggcuccaucaauuaaaguauaaguacccagcccugaaugucacuaugcccaacaaugaaaaauuugauaaacuuuauauuuggggagugcaccacccuagcaccgacucugaucagaucuccuuguacgcucaggccucagggagaguaacaguuagcacuaagaggagucagcaaaccgugauuccaaacaucggcucucggcccuggguccgcggcguguccagcagaauaucgauuuacuggacaaucgugaagccuggggacauucugcuaaucaacucuaccggaaaucucaucgcgccaagggguuauuucaaaauucgguccggcaagucaaguauaaugcgcagcaacgcacugaucgggaaguguaauuccgagugcauuacgccgaacggaucuauccccaaugauaaaccuuuucagaacgucaaucgaauaacuuacggcgccuguccaagauauguuaagcagaacacacuuaaacuggcuaccgguaugaggaaugugcccgaaaagcagacucgggggauuuucggagccaucgcaggcuuuaucgagaacggcugggaggggaugguagacggaugguacgguuuccgucaucaaaauagcgaaggcacagggcaggcugccgacuugaaaucaacccaggcggccauuaaccaaaucaauggaaagcucaaccgccugauugagaaaacgaaugaaaaguuucaccagauagagaaggaguucagugaaguggagggcagaauccaggauuuagaaaaauaugucgaggacaccaagauugaucugugguccuacaacgcagaacuccuuguggcucuggagaaccagcauacaaucgacuugacugauagcgaaaugaauaaacuauucgagaggacccggaagcaacugcgagagaacgccgaagacauggguaaugggugcuuuaaaaucuaucacaagugugauaacgcuugcauuggcucuauacgcaauggaacauacgaccacgauguuuacagagacgaggcccucaacaauagguuccagaucaagggcguggaacugaaaucaggguauaaggauuggauucuuuggaucaguuuugcaauuagcugcuuccuguugugugucgugcuccugggauuuaucaugugggccugccagaaagguaacauacgguguaauaucugcauuuga

SEQ ID NO: 128231 - RNA, 1701 nt, Artificial Sequence
  derived and/or modified CDS sequence (opt3) from hemagglutinin__InfluenzaA__AAY64222
augaagaccaucauugcccugagcuacauacucugccuuguguucgcucagaaacugcccggcaacgacaauuccacagcaacuuuguguuuagggcaccaugccgucccuaacggaacgcugguuaagaccaucacaaaugaucaaauugaggugacuaacgcgaccgaacuuguacagucuucaaguaucgguagaauuugcgacagcccacaccagauccucgauggcgagaauuguacacugauagacgcucuacugggggauccgcauugcgacggauuucagaacaaagaaugggauuuguucguggagagguccaaggccuauucuaauuguuaccccuaugacgucccugauuacgugucgcuccggucacugguugcaagcaguggcacccuggaauuuaacaaugaguccuucaacuggacugguguggcccaaaaugggacaucuagcuccugcaaacgccgaucagacaagagcuuuuucagucgucucaacugguuacaccagcugaaguauaaauacccagcucuuaaugucaccaugcccaacaaugagaaguuugauaaauuguauaucuggggagugcaucacccuggcacggacucugaucagauuucccuguacgcacaggccucaggcagaguaacuguuagcaccaagaggagucaacagacagugaucccaaacauugggucucggcccuggguccgcggaguguccagcagaaucucgauauacuggacuauugugaaaccuggugacauccuacucauuaacucuaccggcaaucugaucgcuccaaggggguauuucaagauccgguccggaaagucaaguauuaugcgcagcgacgccccgauaggcaaauguaacuccgaaugcaucacacccaaugguucuauuccuaacgauaagccauuucagaaugucaaccgaaucaccuacgggcccuguccuagauauguuaaacagaauacgcuuaagcuggcgacuggaaugaggaacgugccagagaaacaaacacggggcauauucggcgcaauugccggguuuaucgaaaauggaugggaggguaugauggacggcugguacggguuccgucaccagaacagcgagggaaccggccaggcugccgauuugaagucaacucaagcagcuaucaaucagauuaacgguaaacucaaucgccugaucgaaaagacaaacgagaaguuucaucagauugaaaaagaguucagugaaguagaggggagaauacaggacuuagagaaguauguggaagauaccaaaaucgaccugugguccuacaaugccgagcuccuugucgcgcuggaaaaccaacacacgauugauuugaccgacagcgagaugaacaagcuauucgagaaaacaaagaagcagcugagggaaaaugccgaggauaugggcaacggaugcuuuaaaaucuaucauaagugugacaaugcaugcaucggcucuauucggaacgggacuuacgaucacgacguguaccgagacgaagcucucaauaaccgcuuccagauaaaaggaguugagcugaagucagguuauaaagauuggauccuuuggauuaguuuugccaucagcugcuuccuguuguguauugugcuccugggcuuuaucaugugggcuugccagaaggggaauauaagauguaacaucugcauuuga

SEQ ID NO: 128232 - RNA, 1701 nt, Artificial Sequence
  derived and/or modified CDS sequence (opt3) from hemagglutinin__InfluenzaA__AAY64262
augaagaccaucauugcccugagcuacauacucugccuuguguucgcucagaaacugcccggcaacgacaauuccacagcaacuuuguguuuagggcaccaugccgucccuaacggaacgcugguuaagaccaucacaaaugaucaaauugaggugacuaacgcgaccgaacuuguacagucuucaaguacagguagaaucugcgacagcccacaccagauucucgauggcgagaauuguacccugaucgacgcucuacugggggauccgcauugcgacggauuucagaacaaagaaugggauuuguucguggagagguccaaggccuauucuaauuguuaccccuaugacgucccugauuacgcaucgcuccggucacugguggccagcaguggcacucuggaauuuaacaaugaguccuucaacuggacagguguugcucaaaaugggaccucuagcgcaugcaaacgccgauccaacaagucauuuuucagucgucucaauugguuacaccagcugaaguauaaauacccagcccuuaacgugacgaugcccaauaacgagaaguuugacaaauuguauauauggggaguccaucacccuagcacugauucugaccagaucucccuguacgcucaggccucaggcagagugaccguaagcacaaagaggagucaacagacuguuauuccaaacaucggcucucggcccugggugcgcggggucuccagcagaauuucgaucuacuggaccauagugaaaccuggagauauucuacucaucaauucuacagguaaccugauugcgccaaggggcuauuucaagauccgguccgggaagucaaguaucaugcgcagcgacgcaccgauuggaaaauguaauuccgaaugcauaacccccaacggcucuaucccuaaugacaagccauuucagaacgugaaucgaauuacguacggugccugucccagauaugucaaacagaacacucuuaagcuggcuacagggaugaggaauguuccugagaaacaaacccggggaaucuucggcgccauagcaggcuuuauugaaaacgggugggagggaaugguggaugguugguacggcuuccgucaccagaauagcgaggggacuggacaggcugccgacuugaagucaacacaagcggccaucaaccagaucaauggcaaacucaaccgccugauugaaaagaccaaugagaaguuucaucagaucgaaaaagaguucagugaaguagaggguaggauucaggauuuagagaaguauguggaagacacgaaaauagaucugugguccuacaacgcagagcuccuugucgcucuggaaaaccaacacaccaucgacuugacagauagcgagaugaauaagcuauucgaaagaacuaaaaagcagcugcgggagaacgccgaggacauggggaauggcugcuuuaagauuuaucauaaaugugauaacgcuugcaugggaucuauccgaaauggcaccuacgaccacgauguguaccgcgacgaagcccucaacaauagauuccagaucaaggggguugagcugaaaucaggauauaaggacuggauucuuuggauaaguuuugcaaucagcugcuuccuguugugugugguccuccuggguuuuauuaugugggccugccagaaaggcaacaucagguguaauauuugcaucuga

SEQ ID NO: 128233 - RNA, 1701 nt, Artificial Sequence
  derived and/or modified CDS sequence (opt3) from hemagglutinin__InfluenzaA__AAY64272
augaagaccaucauugcccugagcuacauacucugccuuguguucgcucagaaacugcccggcaacgacaauuccacagcaacuuuguguuuagggcaccaugccgucccuaacggaacgaucguuaagaccauuacaaaugaucaaaucgaggugacuaacgcgaccgaacugguacagucuucaaguacagguggcauuugcgacagcccacaccagauccuagauggggagaauuguacccucauagacgcucugcuuggagauccgcagugcgacggcuuucaaaacaaaaagugggaucuguucguggaaagauccaaagccuauucuaauuguuaccccuaugacgucccugauuacgcaucguugaggucacucguggccagcagugguacucuggaguuuaacaaugaauccuucaacuggacagggguuacccagaauggaacgucuagcgcuugcaagcggcgcuccaacaagucauuuuucagucgacugaauuggcucacucauuuaaaauauaaguacccagcacugaacgugaccaugcccaauaacgagaaauuugacaaacuuuauaucuggggcguccaccauccuggcacagauagcgaccagauuucuuuguacgcccaggcuuccgggcguaucacugugucaaccaagagaagccaacagacaguaauuccaaacaucggaaguaggccccggguucgcgaugugucuuccagaauaagcauuuacuggaccaucgucaagccuggugacauucugcuaaucaauucgacgggcaaccucaucgccccaaggggguauuucaagauucggucuggaaaauccucaauaaugcgcagugacgcgccgaucggcaaguguaauagcgagugcauuacucccaacgguuccaucccuaaugauaaaccauuucagaacgugaaucgaauaacauacggggcaugucccagauaugugaagcagaacacccugaaacuugccacuggaaugaggaaugucccugaaaagcaaacacggggcauuuucggcgcuaucgccggguuuaucgagaacggaugggaagguaugguugacggcugguacggguuccgucaccaaaauucugagggaaccggccaggcagcugaucugaaaagcacgcaggccgcgauuaaccagaucaaugguaaguugaaccgccucauugggaagaccaaugagaaauuucaccagauagaaaaggaguucucagaaguggagggcagaauccaggaccuggaaaaauauguagaggauacaaagauugacuuauggaguuacaacgccgagcugcucguggcacuugaaaaccaacauacuaucgaucugaccgacuccgagaugaauaaauuguucgaaaggacaaagaagcagcuacgggagaacgcugaagauaugggaaauggcugcuuuaaaaucuaucacaagugugacaacgccugcauugagagcauacgaaaugggacuuacgaucaugacgucuaccgcgacgaggcucugaacaauagauuccagaucaaaggaguggaacucaagucugguuauaaagauuggauucuguggaucucauuugccauuaguugcuuccuucuguguguugcauugcucggcuuuaucaugugggccugccagaaggggaacauaagguguaauaucugcauuuga

SEQ ID NO: 128234 - RNA, 1701 nt, Artificial Sequence
  derived and/or modified CDS sequence (opt3) from hemagglutinin__InfluenzaA__AAY64282
augaagaccaucauugcccugagcuacauacucugccuuguguucgcucagaaacugcccggcaacgacaauuccacagcaacuuuguguuuagggcaccaugccgucccuaacggaacgcugguuaagaccaucacaaaugaucaaauugaggugacuaacgcgaccgaacuuguacagucuucaaguacagguagaaucugcgacagcccacaccagauucucgauggcgagaauuguacccugaucgacgcucuacugggggauccgcauugcgacggauuucagaacaaagaaugggauuuguucguggagagguccaaggccuauucuaauuguuaccccuaugacgucccugauuacgcaucgcuccggucacugguggccagcaguggcacucuggaauuuaacaaugaguccuucaacuggacagguguugcucaaaaugggaccucuagcgcaugcaaacgccgauccaacaagucauuuuucagucgucucaauugguuacaccagcugaaguauaaauacccagcccuuaacgugacgaugcccaauaacgagaaguuugacaaauuguauauauggggaguccaucacccuagcacugauucugaccagaucucccuguacgcucaggccucaggcagagugaccguaagcacaaagaggagucaacagacuguuauuccaaacaucggcucucggcccugggugcgcggggucuccagcagaauuucgaucuacuggaccauagugaaaccuggagauauucuacucaucaauucuacagguaaccugauugcgccaaggggcuauuucaagauccgguccgggaagucaaguaucaugcgcagcgacgcaccgauuggaaaauguaauuccgaaugcauaacccccaacggcucuaucccuaaugacaagccauuucagaacgugaaucgaauuacguacggugccugucccagauaugucaaacagaacacucuuaagcuggcuacagggaugaggaauguuccugagaaacaaacccggggaaucuucggcgccauagcaggcuuuauugaaaacgggugggagggaaugguggaugguugguacggcuuccgucaccagaauagcgaggggacuggacaggcugccgacuugaagucaacacaagcggccaucaaccagaucaauggcaaacucaaccgccugauugaaaagaccaaugagaaguuucaucagaucgaaaaagaguucagugaaguagaggguaggauucaggauuuagagaaguauguggaagacacgaaaauagaucugugguccuacaacgcagagcuccuugucgcucuggaaaaccaacacaccaucgacuugacagauagcgagaugaauaagcuauucgaaagaacuaaaaagcagcugcgggagaacgccgaggacauggggaauggcugcuuuaagauuuaucauaaaugugauaacgcuugcaucggaucuauccgaaauggcaccuacgaccacgauguguaccgcgacgaagcccucaacaauagauuccagauuaaggggguugagcugaaaucaggauauaaggacuggauacuuuggaucaguuuugcaauuagcugcuuccuguugugugugguccuccuggguuuuaucaugugggccugccagaaaggcaacauuagguguaauaucugcauauga

SEQ ID NO: 128235 - RNA, 1701 nt, Artificial Sequence
  derived and/or modified CDS sequence (opt3) from hemagglutinin__InfluenzaA__AAY64292
augaagaccaucauugcccugagcuacauacucugccuuguguucgcucagaaacugcccggcaacgacaauuccacagcaacuuuguguuuagggcaccaugccgucccuaacggaacgcugguuaagaccaucacaaaugaucaaauugaggugacuaacgcgaccgaacuuguacagucuucaaguacagacaaaaucugcgauagcccacaccagauucucgacgguggcaauuguacccugaucgaugcucuacugggggacccgcauugcgauggauuucagaacaaggagugggacuuguucguggaaagauccaaagccuauucuaauuguuaccccuaugaugucccugacuacgugucgcucaggucacugguugcaagcaguggcacucuggaguuuaacaaugaauccuucaacuggacagguguggcccaaaaugggaccucuagcgcuugcaagcggcgcuccgauaagucauuuuucagucgacucaacugguuacaccagcugaaaaauaaguauccagcacuuaacgucacgaugcccaauaacgagaaauuugacaaguuguacauauggggagugcaucacccuggcacugauagcgaccagaucucucuguaugcccaggcuuccggccguguaaccguuucaacaaaaagaagccaacagacugugauuccaaacaucgggaguaggccccggguccgcgacauuucuuccagaaucagcauauacuggaccauugugaagccuggagauauccuacucauuaauucgacagguaaccugaucgccccaaggggcuacuucaagauccggucugggaaauccucaauuaugcgcagugacgcgccgauaggaaaguguaauagcgagugcaucacccccaacggcuccauuccuaaugauaaaccauuucagaacgugaaucgaaucacguauggugcaugucccagauacgucaagcagaacacucuuaaacuggccacagggaugaggaauguuccugaaaagcaaacccggggaauauucggcgcuauugccggcuuuaucgagaacgggugggaaggaaugguggacgguugguauggcuuccgucaccaaaauucugaggggacuggacaggcagcugauuugaaaagcacacaggccgcgaucaaccagauuaauggcaagcucaaccgccugaucgagaagaccaaugaaaaauuucaucagauugagaaggaguucucagaaguagaagguagaauacaggacuuagagaaauacguggaggauacgaagaucgaccuguggaguuauaacgccgaacuccuugucgcacuggagaaccaacacaccauugauuugacagacuccgaaaugaauaaacuauucgagaggacuaagaagcagcugcgggaaaacgcugaggauauggggaauggcugcuuuaaaaucuaccauaagugugacaacgccugcaucggaagcauucgaaauggcaccuaugaccacgauguguaccgcgacgaggcucucaacaauagauuccagauaaaagggguugaacugaagucuggauacaaagauuggauccuuuggauuucauuugccaucaguugcuuccuguuguguauugugcuccuggguuuuaucaugugggcaugccagaagggcaacauaagguguaauaucugcauuuga

SEQ ID NO: 128236 - RNA, 1701 nt, Artificial Sequence
  derived and/or modified CDS sequence (opt3) from hemagglutinin__InfluenzaA__AAY64302
augaagaccaucauugcccugagcuacauacucugccuuguguucgcucagaaacugcccggcaacgacaauuccacagcaacuuuguguuuagggcaccaugccgucccuaacggaacgcugguuaagaccaucacaucugaucaaauugaggugacuaaugcgaccgaacuuguacagucaaguagcacagguagaaucugcgacuccccacacaggauucucgauggcgagaacuguacccugaucgacgcucuacugggggauccgcauugcgacggauuucagaauaaagaaugggauuuguucguggagcggucuaaggccuauucgaacuguuaccccuaugacgucccugauuacgcaucacuccgcagccugguggccaguuccggcacucuggaauuuaauaacgagucuuucaauuggacagguguugcucagaacgggaccagcuuugcaugcaaacgacguuccauaaagucauucuuuaguagacucaauugguuacaccaacugaaguauaaauacccagcccuuaacgugacgaugcccaauaacgacaaguucgauaaauuguauaucuggggaguccaucacccuagcacugacucugaucagaccucccuguacgcucaggccucaggcagggugacaguaagcacuaagcggagucagcaaaccguuauuccaaauaucggcucucgccccugggugagaggggucuccagcaggauuucgaucuacuggacaauagugaaaccuggagacauucuacucaucaacucuaccgguaaccugauugcgccacggggcuauuuuaagauccgcuccgggaagucaaguaucaugaaaagcgacgcaccgauuggaaaguguaauuccgagugcauaacgcccaacggcucuaucccuaaugauaaaccauuccagaacgugaaucgaauuacuuacggugccugucccagauaugucaagcagaacacacuuaaacuggcuaccgggaugaggaauguuccugaaaagcagacucggggaaucuuuggcgccauagcaggcuucauugagaacgggugggaaggaaugguggacgguugguacggcuuucgucaccaaaauagcgaggggacaggacaggcugccgauuugaaaucaacccaggcggccaucaaccaaaucaauggcaagcucaaccgccugauugagaagacgaaugaaaaauuccaucagaucgagaaggaguucaccgaaguagaagguaggauucaggacuuagagaaauauguggaggauacaaagauagaccuguggaguuacaacgcagaacuccuugucgcucuggagaaucagcacacuaucgauuugaccgacuccgaaaugaacaaacuauuugagagaacacggaagcaacugcgagaaaacgccgaggauauggggaauggcugcuucaagauuuaucauaaaugugacaacgugugcaucggaagcauccgcaauggcacuuacgaucacgacguuuacagagacgaggcucucaacaauagguuucagauuaaggggguggaacugaaaucuggauauaaggauuggauacuuuggaucucauucgccaccaguugcuuucuguugugugucgugcuccuggguuucauuaugugggcaugccagaaaggcaacauccgguguaauauuugcaucuga

SEQ ID NO: 128237 - RNA, 1701 nt, Artificial Sequence; identical to SEQ ID NO: 128231
  derived and/or modified CDS sequence (opt3) from hemagglutinin__InfluenzaA__AAY64312

SEQ ID NO: 128238 - RNA, 1701 nt, Artificial Sequence; identical to SEQ ID NO: 128234
  derived and/or modified CDS sequence (opt3) from hemagglutinin__InfluenzaA__AAY64322

SEQ ID NO: 128239 - RNA, 1701 nt, Artificial Sequence
  derived and/or modified CDS sequence (opt3) from hemagglutinin__InfluenzaA__AAY64332
augaagaccaucauugcccugagcuacauacucugccuuguguucacacagaaacugcccggcaacgacaauuccacugcuacguuguguuuagggcaccaugcagucccuaacggaaccaucguuaagacaauuacuaaugaucaaaucgaggugaccaacgccacagaacugguacagucuucaaguaccgguggcauuugcgacagcccacaccagauccuagauggggagaauuguacucucauagacgcgcugcuuggagauccgcagugcgacggcuuucaaaacaaaaagugggaucuguucguggaaagauccaaggcuuauucuaauuguuaccccuaugacgucccugauuacgccucguugaggucacucguggcaagcagugguacacuggaguuuaacaaugaauccuucgacuggaccgggguuacgcagaacggaacuucuagcgccugcaagcggcgcuccaauaagucauuuuucagucgacugaacuggcucacccauuuaaaauuuaaguauccagcucugaaugugacaaugcccaacaaugagaaauucgauaaacuuuacaucuggggcguccaccauccuggcacugacagcgaucagauuucuuuguaugcacaggccuccgggcguaucaccgugucaacaaaaagaagccaacagaccguaauuccaaacaucggaaguaggccccggguucgcgacgugucuuccagaauaagcauuuacuggacgaucgucaagccuggugacauucugcuaaucaacucgacuggcaaucucaucgcuccaaggggguacuuuaagauucggucuggaaaauccucaauaaugcgcagugaugccccgaucggcaaguguaacagcgagugcauuacacccaaugguuccaucccuaacgacaaaccauuccagaaugugaaccgaauaaccuauggggcgugucccagauacgugaagcagaauacucugaaacuugcaacaggaaugaggaacgucccugaaaagcaaacccggggcauuuuuggcgccaucgcuggguucaucgagaauggaugggaagguaugguugauggcugguauggguuucgucaccagaacucugagggaacgggccaggccgcagaccugaaaagcacccaagcugccauuaaucagaucaacgguaaguugaaucgccucauugggaagacaaacgagaaauuccaccagauagaaaaggaguucucagaaguggagggcagaauccaggaucuggaaaaauacguagaggacacuaagauugauuuauggaguuauaaugcggagcugcucguggcccuugaaaaccaacauaccaucgaccugacagauuccgagaugaacaaauuguuugaaaggacuaagaagcagcuacgggagaaugcagaagacaugggaaacggcugcuucaaaaucuaccacaagugugauaaugcuugcauugggagcauacgaaacggaaccuaugaccaugacgucuaccgcgaugaggcccugaauaacagauuucagaucaaagguguggagcucaagucuggcuacaaagacuggauucuguggaucucauucgcuauuaguugcuuucuucuguguguugccuugcucggguucaucaugugggcaugccagaagggaaauauaaggugugauaucugcauuuga

SEQ ID NO: 128240 - RNA, 1701 nt, Artificial Sequence
  derived and/or modified CDS sequence (opt3) from hemagglutinin__InfluenzaA__AAY64342
augaagaccaucauugcccugagcuacauacucugccuuguguucgcucagaaacugcccggcaacgacaauuccacagcaacuuuguguuuagggcaccaugccgucccuaacggaacgcugguuaagaccaucacaaaugaucaaauugaggugacuaacgcgaccgaacuuguacagucuucaaguacagguagaaucugcgacagcccacaccagauucucgauggcgagaauuguacccugaucgacgcucuacugggggauccgcauugcgacggauuucagaacaaagaaugggauuuguucguggagagguccaaggccuauucuaauuguuaccccuaugacgucccugauuacgcaucgcuccggucacugguggccagcaguggcacucuggaauuuaacaaugaguccuucaacuggacagguguugcucaaaaugggaccucuagcgcaugcaaacgccgauccaacaagucauuuuucagucgucucaauugguuacaccagcugaaguauaaauacccagcccuuaacgugacgaugcccaauaacgagaaguuugacaaauuguauauauggggaguccaucacccuagcacugauucugaccagaucucccuguacgcucaggccucaggcagagugaccguaagcacaaagaggagucaacagacuguuauuccaaacaucggcucucggcccugggugcgcggggucuccagcagaauuucgaucuacuggaccauagugaaaccuggagauauucuacucaucaauucuacagguaaccugauugcgccaaggggcuauuucaagauccgguccgggaagucaaguaucaugcgcagcgacgcaccgauuggaaaauguaauuccgaaugcauaacccccaacggcucuaucccuaaugacaagccauuucagaacgugaaucgaauuacguacggugccugucccagauaugucaaacagaacacucuuaagcuggcuacagggaugaggaauguuccugagaaacaaacccggggaaucuucggcgccauagcaggcuuuauugaaaacgggugggagggaaugguggaugguugguacggcuuccgucaccagaauagcgaggggacuggacaggcugccgacuugaagucaacacaagcggccaucaaccagaucaauggcaaacucaaccgccugauugaaaagaccaaugagaaguuucaucagaucgaaaaagaguucagugaaguagaggguaggauucaggauuuagagaaguauguggaagacacgaaaauagaucugugguccuacaacgcagagcuccuugucgcucuggaaaaccaacacaccaucgacuugacagauagcgagaugaauaagcuauucgaaagaacuaaaaagcagcugcgggagaacgccgaggacauggggaauggcugcuuuaagauuuaucauaaaugugauaacgcuugcaucggaucuauccgaaauggcaccuacgaccacgauguguaccgcgacgaagcccucaacaauagauuccagauuaaggggguugagcugaaaucaggauauaaggacuggauacuuuggaucaguuuugcaacaagcugcuuccuguugugugugguccuccuggguuuuauuaugugggccugccagaaaggcaacaucagguguaauauuugcaucuga

SEQ ID NO: 128241 - RNA, 1701 nt, Artificial Sequence; identical to SEQ ID NO: 128080
  derived and/or modified CDS sequence (opt3) from hemagglutinin__InfluenzaA__AAY64352

SEQ ID NO: 128242 - RNA, 1701 nt, Artificial Sequence
  derived and/or modified CDS sequence (opt3) from hemagglutinin__InfluenzaA__AAY64362
augaagaccaucauugcccugagcuacauacucugccuuguguucgcucagaaacugcccggcaacgacaauuccacagcaacuuuguguuuagggcaccaugccgucccuaacggaacgaucguuaagaccauuacaaaugaucaaaucgaggugacuaacgcgaccgaacugguacagucuucaaguacaggugagauuugcgacagcccacaccagauccuagauggcgaaaauuguacccucauagacgcucugcuuggggauccgcagugcgacggauuucaaaacaaaaagugggaucuguucguggagagauccaaagccuauucuaauuguuaccccuaugacgucccugauuacgcaucguugaggucacucguggccagcaguggcacucuggaauuuaacaaugaguccuucgacuggacagguguuacccagaacgggacgucuagcgcuugcaagcggcgcuccaauaagucauuuuucagucgacugaacuggcucacucauuuaaaauauaaguacccagcacugaaugugaccaugcccaacaaugagaaauuugauaaacuuuauaucuggggaguccaccauccuggcacagacagcgaucagauuucuuuguacgcccaggcuuccggccguaucacugugucaaccaagagaagccaacagacaguaauuccaaacaucgggaguaggccccggguucgcgacauaucuuccagaauuagcaucuacuggaccauugugaagccuggagacauccugcuaaucaacucgacggguaaucucauugccccaaggggcuauuucaagauacggucugggaaauccucaaucaugcgcagugaugcgccgauuggaaaguguaacagcgaaugcaucacucccaauggcuccauaccuaacgacaaaccauuucagaaugucaaccgaauuacauacggugcaugucccagauauaucaagcagaauacccugaaacuugccacugggaugaggaacgugccugagaagcaaacacggggaaucuucggcgcuauugccggcuuuaucgaaaaugggugggagggaaugguggaugguugguacggcuuccgucaccagaacucugaggggaccggacaggcagcugaccugaaaagcacgcaagccgcgauuaaucagauaaacggcaaguugaaucgccucaucgguaagaccaacgaaaaauuucaccagauugagaaggaguucucagaagucgaagggagaauccaggaucuggagaaauauguugaggacacaaagaucgauuuauggaguuacaaugccgaacugcucguggcacuugagaaccaacauacuauugaccugaccgauuccgaaaugaacaaauuguucgagaggacaaagaagcagcuacgggaaaaugcugaggacaugggcaacggaugcuuuaaaauauaucacaagugugauaaugccugcaucggcagcauucgaaacgggacuuacgaccaugacguauaccgcgaugaggcucugaauaacagauuccagaucaaaggaguggaacucaagucugguuauaaagacuggauucuguggaucucauuugccauaaguugcuuccuucugugugucgcauugcucggcuuuaucaugugggccugccagaaggggaauauuagguguaacaucugcauuuga

SEQ ID NO: 128243 - RNA, 1701 nt, Artificial Sequence; identical to SEQ ID NO: 128234
  derived and/or modified CDS sequence (opt3) from hemagglutinin__InfluenzaA__AAY64382

SEQ ID NO: 128244 - RNA, 1701 nt, Artificial Sequence
  derived and/or modified CDS sequence (opt3) from hemagglutinin__InfluenzaA__AAY64392
augaagaccaucauugcccugagcuacauacucugccuuguguucgcucagaaacugcccggcaacgacaauuccacagcaacuuuguguuuagggcaccaugccgucccuaacggaacgaucguuaagaccauuacaaaugaucaaaucgaggugacuaacgcgaccgaacugguacagucuucaaguacagguggcauuugcgacagcccacaccagauccuagauggggagaauuguacccucauagacgcucugcuuggagauccgcagugcgacggcuuucaaaacaaaaagugggaucuguucguggaaagauccaaagccuauucuaauuguuaccccuaugacgucccugauuacgcaucguugaggucacucguggccagcagugguacucuggaguuuaacaaugaauccuucaacuggacagggguuacccagaauggaacgucuagcgcuugcaagcggcgcuccaacaagucauuuuucagucgacugaauuggcucacucauuuaaaauauaaguacccagcacugaacgugaccaugcccaauaacgagaaauuugacaaacuuuauaucuggggcguccaccauccuggcacagauaacgaccagauuagcuuguacgcccaggcuucugggcguaucacuguguccaccaagagaucacaacagacaguaauuccaaauaucggaagcaggccccggguucgcgaugugaguucuagaauauccauuuacuggaccaucgucaagccuggugacauucugcuaaucaacagcacgggcaaucucaucgccccaaggggguauuucaagauucggucgggaaaaucuuccauaaugcgcucagacgcgccgaucggcaaguguaacagugagugcauuacucccaaugguagcaucccuaacgauaaaccauuucagaaugugaaccgaauaacauacggggcaugucccagauaugugaagcagaauacccugaaacuugccacuggaaugaggaacgucccugaaaagcaaacacggggcauuuucggcgcuaucgccggguuuaucgagaauggaugggaagguaugguugacggcugguacggguuccgucaccagaacuccgagggaaccggccaggcagcugaucugaaaucuacgcaagccgcgauuaaucagaucaacgguaaguugaaucgccucauugggaagaccaacgagaaauuucaccagauagaaaaggaguucagcgaaguggagggcagaauccaggaccuggaaaaauauguagaggauacaaagauugacuuauggucauacaacgccgagcugcucguggcacuugaaaaucaacauacuaucgaucugaccgacagugagaugaacaaauuguucgaaaggacaaagaagcagcuacgggagaaugcugaagauaugggaaacggcugcuuuaaaaucuaucacaagugugacaaugccugcauuggguccauacgaaacggaacuuacgaucaugacgucuaccgcgacgaggcucugaauaacagauuccagaucaaagguguggagcucaagagcggcuauaaagauuggauucuguggaucucuuuugccauuucaugcuuccuucuguguguugcauugcucggguuuaucaugugggccugccagaagggaaauauaagguguaacaucugcauuuga

SEQ ID NO: 128245 - RNA, 1701 nt, Artificial Sequence; identical to SEQ ID NO: 128236
  derived and/or modified CDS sequence (opt3) from hemagglutinin__InfluenzaA__AAY64402

SEQ ID NO: 128246 - RNA, 1701 nt, Artificial Sequence; identical to SEQ ID NO: 128234
  derived and/or modified CDS sequence (opt3) from hemagglutinin__InfluenzaA__AAY98037

SEQ ID NO: 128247 - RNA, 1701 nt, Artificial Sequence; identical to SEQ ID NO: 128234
  derived and/or modified CDS sequence (opt3) from hemagglutinin__InfluenzaA__AAY98047

SEQ ID NO: 128248 - RNA, 1701 nt, Artificial Sequence; identical to SEQ ID NO: 128095
  derived and/or modified CDS sequence (opt3) from hemagglutinin__InfluenzaA__AAY98057

SEQ ID NO: 128249 - RNA, 1701 nt, Artificial Sequence
  derived and/or modified CDS sequence (opt3) from hemagglutinin__InfluenzaA__AAY98067
augaagaccaucauugcccugagcuacauacucugccuuguguucgcucaggagcugcccggcaacgacaauuccacagcaacuuuguguuuagggcaccaugccgucccuaacggaacgcugguuaaaaccaucacaaaugaucaaauugaagugacuaacgcgaccgagcuaguacagucuucaaguacagguagaaucugcgacagcccacaccagauucucgauggcgaaaauuguacccugaucgacgcucugcuuggggauccgcauugcgacggauuucagaacaaggagugggauuuguucguggaaagguccaaagccuauucuaauuguuaccccuaugacgucccugauuacgugucgcuccggucacugguugcaagcaguggcacucuggaguuuaacaaugaguccuucaacuggacagguguggcccaaaaugggaccucuagcgcuugcaagcgccgauccgacaaaucauuuuucagucgucucaacugguuacaccagcugaaguauaaguacccagcacuuaaugucacgaugcccaacaaugaaaaauuugauaaguuguauauauggggagugcaucacccuggcacugacagcgaucagaucucucuguacgcccaggcuuccggcagaguaaccguuucaacaaaaaggagccaacagacugugauuccaaacaucgggaguggacccuggguccggggugugucuucccgcauuagcaucuacuggaccauagugaagccuggcgacauucuacucaucaacucgacagggaaucugauugccccaagaggauauuucaaaaucaggucuggcaaguccucaaucaugcggagugacgcgccgauugguaaguguaacagcgagugcauaacccccaauggguccaucccuaacgauaaaccauuucagaaugucaaccgcauuacguacggacccuguccucgauauguuaagcagaauacucuuaaacuggcaacaggcaugagaaacgugccagaaaagcaaaccaggggcaucuucggggccauagcuggauuuauugagaaugguugggagggcaugauggacgggugguacggauuccggcaccagaacucugaaggcacuggucaggccgcagauuugaaaagcacacaagcugccaucaaucagaucaacgggaagcucaaucgucugauugagaaaaccaacgaaaaguuucaucagaucgagaaggaguucucagaaguagagggccgcauucaggacuuagaaaaauauguggaggauacgaagauagaccuguggaguuacaaugcggaacuccuugucgcccuggagaaccaacacaccaucgauuugacagacuccgaaaugaacaaacuauucgagagaacuaagaaacagcugagggagaaugcagaagauaugggaaacggcugcuuuaagauuuaucauaagugugacaaugcuugcaucgggagcauccggaacggaaccuacgaucacgacguguaccgagacgaggcccucaauaaccgcuuccagauuaaagguguugaacugaagucuggcuauaaagauuggauacuuuggaucucauuugcuauuaguugcuuccuguuguguaucgugcuccugggguuuauuaugugggccugccagaagggaaauaucagauguaacauaugcaucuga

SEQ ID NO: 128250 - RNA, 1701 nt, Artificial Sequence
  derived and/or modified CDS sequence (opt3) from hemagglutinin__InfluenzaA__AAY98077
augaagaccaucauugcccugagcuacauacucugccuuguguucgcucagaaacugcccggcaacgacaauuccacagcaacuuuguguuuagggcaccaugccgucccuaacggaacgcugguuaagaccaucacaaaugaucaaauugaggugacuaacgcgaccgagcuaguacagucuucaagugcuagcagaaucugcgacuccccacaccagauucucgauggugaaaauuguacacugaucgacgcccuucugggcgauccgcauugcgacggguuucagaacaaagaaugggauuuguucguggagaggucuaaggcauauucgaauuguuaccccuaugacgucccugauuacgugucacuccggagccugguugccaguuccggaacccuggaauuuaacaaugagucuuucaacuggacuggcguggcucaaaaugguacaagcuccgcaugcaaacgccgaucagacaagagcuuuuucagucgucucaacugguuacaccagcugaaguauaaauacccagcccuuaaugucaccaugcccaacaaugagaaguuugauaaauuguauauauggggagugcaucacccugggacggacucugaucagaucucccuguacgcucaggccucaggcagaguaacuguuagcaccaagaggagucaacagacagugauuccaaacaucggcucucggcccuggguccgcgggguguccagcagaauuucgaucuacuggacuauagugaaaccuggagacauucuacucaucaacucuaccgguaaucugauugcgccaaggggcuauuucaagauccgguccgggaagucaaguaucaugcgcagcgacgcaccgauuggaaaauguaacuccgaaugcauaacacccaauggcucuaucccuaacgauaagccauuucagaaugucaaccgaauuaccuacggugccugucccagauauguuaaacagaauacgcuuaagcuggcuacugggaugaggaacgugccugagaaacaaacacggggaaucuucggcgccauagcaggcuuuauugaaaaugggugggagggaaugauggacgguugguacggcuuccgucaccagaacagcgaggggaccggacaggcugccgauuugaagucaacucaagcggccaucaaucagaucaacggcaaacucaaucgccugauugaaaagacaaacgagaaguuucaucagaucgaaaaagaguucagugaaguagaggguaggauucaggacuuagagaaguauguggaagauaccaaaauagaccugugguccuacaaugcagagcuccuugucgcucuggaaaaccaacacacgaucgauuugaccgacagcgagaugaacaagcuauucgaaagaacuaaaaagcagcugcgggagaaugccgaggauauggggaacggcugcuuuaagauuuaucauaaaugugacaaugcuugcaucggaucuauccgaaacggcacauacgaucacgacguguaccgcgacgaagcccucaauaacagauuccagauuaaggggguugagcugaaaucaggauauaaggauuggauacuuuggaucaguuuugcaauuagcugcuuccuguuguguaucgugcuccuggguuuuauuaugugggccugccagaaaggcaauaucagguguaacauaugcaucuga

SEQ ID NO: 128251 - RNA, 1701 nt, Artificial Sequence
  derived and/or modified CDS sequence (opt3) from hemagglutinin__InfluenzaA__AAY98087
augaagaccaucauugcccugagcuacauacucugccuuguguucgcucagaaacugcccggcaacgacaauuccacagcaacuuuguguuuagggcaccaugccgucccuaacggaacgcugguuaagaccaucacaaaugaucaaauugaggugacuaacgcgaccgaacuuguacagucuucaaguacagguagaaucugcgacagcccacacaggauucucgauggcgagaauuguacccugaucgacgcucuacugggggauccgcauugcgacggauuucagaacaaagaaugggauuuguucguggagcgguccaaggccuauucuaauuguuaccccuaugacgucccugauuacgcaucgcuccgcucacugguggccagcaguggcacucuggaauuuaacaaugaguccuucaacuggacagguguugcucagaaugggaccucuagcgcaugcaaacgacguuccauaaagucauuuuucaguagacucaacugguuacaccaacugaaguauaaauacccagcccuuaaugugacgaugcccaacaaugacaaguuugauaaauuguauaucuggggaguccaucacccuagcacugacucugaucagaccucccuguacgcucaggccucaggcagggugacaguaagcacuaagcggagucagcaaaccguuauuccaaacaucggcucucgccccugggugagaggggucuccagcaggauuucgaucuacuggacaauagugaaaccuggagacauucuacucaucaacucuaccgguaaucugauugcgccacggggcuauuucaagauccgcuccgggaagucaaguaucaugcgaagcgacgcaccgauuggaaaauguaacuccgagugcauaacgcccaauggcucuaucccuaacgauaagccauuucagaaugugaacagaauuacuuacggugccugucccagguaugucaaacagaauacacuuaagcuggcuaccgggaugcggaacguuccugaaaaacagacucguggaaucuucggcgccauagcaggcuuuauugagaaugggugggaaggaaugguggacgguugguacggcuuccgccaccaaaacagcgaggggacaggacaggcugccgauuugaagucaacccaggcggccaucaaucaaaucaacggcaaacucaauagacugauugagaagacgaacgaaaaguuucaucagaucgagaaagaguucagugaaguagaagguaggauucaggacuuagagaaguauguggaggauaccaaaauagaccugugguccuacaaugcagaacuccuugucgcucuggagaaccagcacacaaucgauuugacugacagcgaaaugaacaagcuauucgagcggacccgaaaacaacugcgcgaaaaugccgaggauauggggaacggcugcuuuaagauuuaucauaagugugacaaugcuugcaucggaucuaucagaaacggcacauacgaucacgacguguacagggacgaggcccucaauaaccgguuccagauuaaagggguugaacugaagucaggauauaaagauuggauacuuuggaucaguuuugcaauuagcugcuuccuguugugugugguccuccuggguuuuaucaugugggccugccagaagggcaauauucgcuguaacaucugcauauga

SEQ ID NO: 128252 - RNA, 1701 nt, Artificial Sequence; identical to SEQ ID NO: 128234
  derived and/or modified CDS sequence (opt3) from hemagglutinin__InfluenzaA__AAY98097

SEQ ID NO: 128253 - RNA, 1701 nt, Artificial Sequence; identical to SEQ ID NO: 128234
  derived and/or modified CDS sequence (opt3) from hemagglutinin__InfluenzaA__AAY98107

SEQ ID NO: 128254 - RNA, 1701 nt, Artificial Sequence
  derived and/or modified CDS sequence (opt3) from hemagglutinin__InfluenzaA__AAY98117
augaagaccaucauugcccugagcuacauacucugccuuguguucgcucagaaacugcccggcaacgacaauuccacagcaacuuuguguuuagggcaccaugccgucccuaacggaacgcugguuaagaccaucacaaaugaucaaauugaggugacuaacgcgaccgaacuuguacagucuucaaguacagguagaaucugcgacagcccacaccagauucucgauggcgagaauuguacccugaucgacgcucuacugggggauccgcauugcgacggauuucagaacaaagaaugggauuuguucguggagagguccaaggccuauucuaauuguuaccccuaugacgucccugauuacgcaucgcuccggucacugguggccagcaguggcacucuggaauuuaacaaugaguccuucaacuggacagguguugcucaaaaugggaccucuagcgcaugcaaacgcggauccaacaagucauuuuucagucgacucaauugguuacaccagcugaaguauaaauacccagcccuuaacgugacgaugcccaauaacgagaaguuugaaaaauuguauauauggggcguccaucacccuagcacugacucugaucagaucucccuguacgcucaggccucaggccgugugaccguaagcacaaagagaagucaacagacuguuauuccaaacaucgggucuaggcccugggugcggggagucuccagccgcauuucgaucuacuggaccauagugaaaccuggugacauucuacucaucaauucuacaggcaaccugauugcgccaagaggguauuucaagaucagguccggaaagucaaguaucaugcggagcgaugcaccgauuggcaaauguaauuccgagugcauaacccccaacgguucuaucccuaaugacaagccauuucagaacgugaaucgcauuacguacggggccuguccccgauaugucaaacagaacacucuuaagcuggcuacaggaaugagaaauguuccugaaaaacaaaccaggggcaucuucggcgccauagcaggguuuauugagaacggaugggaggguaugguggacggcugguacggguuccggcaccagaauagcgaaggaacuggccaggcugccgauuugaagucaacacaagcggccaucaaccagaucaaugguaaacucaaccgucugauugagaagaccaaugaaaaguuucaucagaucgagaaagaguucagugaaguagaggggcgcauucaggacuuagaaaaguauguggaggauacgaaaauagaccugugguccuacaacgcagaacuccuugucgcucuggagaaccaacacaccaucgauuugacagacagcgaaaugaauaagcuauucgagagaacuaaaaagcagcugagggagaacgccgaagauaugggcaauggaugcuuuaagauuuaucauaaaugugacaacgcuugcaucggcucuauccggaaugggaccuacgaucacgacguguaccgagaugaggcccucaacaaucgcuuccagauuaagggaguugaacugaaaucagguuauaaggacuggauacuuuggaucaguuuugcaauuagcugcuuccuguugugugugguccuccugggcuuuaucaugugggccugccagaaagggaacauuagauguaauaucugcauauga

SEQ ID NO: 128255 - RNA, 1701 nt, Artificial Sequence; identical to SEQ ID NO: 128234
  derived and/or modified CDS sequence (opt3) from hemagglutinin__InfluenzaA__AAY98147

SEQ ID NO: 128256 - RNA, 1701 nt, Artificial Sequence; identical to SEQ ID NO: 128234
  derived and/or modified CDS sequence (opt3) from hemagglutinin__InfluenzaA__AAY98157

SEQ ID NO: 128257 - RNA, 1701 nt, Artificial Sequence
  derived and/or modified CDS sequence (opt3) from hemagglutinin__InfluenzaA__AAY98167
augaagaccaucauugcccugagcuacauacucugccuuguguucgcucagaaacugcccggcaacgacaauuccacagcaacuuuguguuuagggcaccaugccgucccuaacggaacgcugguuaagaccaucacaaaugaucaaauugaggugacuaacgcgaccgaacuuguacagucuucaaguacagguagaaucugcgacagcccacaccagauucucgauggcgagaauuguacccugaucgacgcucuacugggggauccgcauugcgacggauuucagaacaaagaaugggauuuguucguggagagguccaaggccuauucuaauuguuaccccuaugacgucccugauuacgcaucgcuccggucacugguggccagcaguggcacucuggaauuuaacaaugaguccuucaacuggacagguguugcucaaaaugggaccucuagcgcaugcaaacgccgauccaacaagucauuuuucagucgucucaauugguuacaccagcugaaguauaaauacccagcccuuaacgugacgaugcccaauaacgagaaguuugacaaauuguauauauggggaguccaucacccuagcacugauucugaccagaucucccuguacgcucaggccucaggcagagugaccguaagcacacaaaggagucagcagacuguuauuccaaacaucggcucucggcccugggugcgcggggucuccagcagaauuucgaucuacuggaccauagugaagccuggagauauucuacucaucaauucuacagguaaccugauugcgccaaggggcuauuucaaaauccgguccgggaagucaaguaucaugcgcagcgacgcaccgauuggaaaguguaauuccgaaugcauaacccccaacggcucuaucccuaaugacaaaccauuucagaacgugaaucgaauuacguacggugccugucccagauaugucaagcaaaacacucuuaaacuggcuacagggaugaggaauguuccugagaagcagacccggggaaucuucggcgccauagcaggcuuuauugaaaacgggugggagggaaugguggaugguugguacggcuuccgucaccagaauagcgaggggacuggacaagcugccgacuugaaaucaacacaggcggccaucaaccagaucaauggcaagcucaaccgccugauugagaaaaccaaugaaaaguuucaucagaucgaaaaggaguucagugaaguagaggguaggauucaagauuuagagaaauauguggaagacacgaagauagaucugugguccuacaacgcagagcuccuugucgcucuggaaaaccagcacaccaucgacuugacagauagcgagaugaauaaacuauucgaaagaacuaagaaacagcugcgggagaacgccgaggacauggggaauggcugcuuuaagauuuaucauaagugugauaacgcuugcaucggaucuauccgaaauggcaccuacgaccacgauguguaccgcgacgaagcccucaacaauagauuccagauuaaagggguugagcugaagucaggauauaaagacuggauacuuuggaucaguuuugcaauuagcugcuuccuguugugugugguccuccuggguuuuaucaugugggccugccaaaagggcaacauuagguguaauaucugcauauga

SEQ ID NO: 128258 - RNA, 1701 nt, Artificial Sequence
  derived and/or modified CDS sequence (opt3) from hemagglutinin__InfluenzaA__AAY98177
augaagaccaucauugcccugagcuacauacucugccuuguguucgcucagaaacugcccggcaacgacaauuccacagcaacuuuguguuuagggcaccaugccgucccuaacggaacgcugguuaagaccaucacaaaugaucaaauugaggugacuaacgcgaccgaacuuguacagucuucaaguacagguagaaucugcgacagcccacaccagauucucgauggcgagaauuguacccugaucgacgcucuacugggggauccgcauugcgacggauuucagaacaaagaaugggauuuguucguggagagguccaaggccuauucuaauuguuaccccuaugacgucccugauuacgcaucgcuccggucacugguggccagcaguggcacucuggaauuuaacaaugaguccuucaacuggacagguguugcucaaaaugggaccucuagcgcaugcaaacgccgauccaacaagucauuuuucagucgucucaauugguuacaccagcugaaguauaaauacccagcccuuaacgugacgaugcccaauaacgagaaguuugacaaauuguauauauggggaguccaucacccuagcacugauucugaccagaucucccuguacgcucaggccucaggcagagugaccguaagcacaaagaggagucaacagacuguuauuccaaacaucggcucucggcccugggugcgcggggucuccagcagaauuucgaucuacuggaccauagugaaaccuggagauauucuacucaucaauucuacagguaaccugauugcgccaaggggcuauuucaagauccgguccgggaagucaaguaucaugcgcagcgacgcaccgauuggaaaauguaauuccgaaugcauaacccccaacggcucuaucccuaaugacaagccauuucagaacgugaaucgaauuacguacggugccugucccagauaugucaaacagaacacucuuaagcuggcuacagggaugaggaauguuccugagaaacaaacccggggaaucuucggcgccauagcaggcuuuauugaaaacgggugggagggaaugguggaugguugguacggcuuccgucaccagaauagcgaggggacuggacaggcugccgacuugaagucaacacaagcggccaucaaccagaucaauggcaaacucaaccgccugauugaaaagaccaaugagaaguuucaucagaucgaaaaagaguucagugaaguagaggguaggauucaggauuuagagaaguauguggaagacacgaaaauagaucugugguccuacaacgcagggcuccuugucgcucuggagaaccaacacaccaucgacuugacagauagcgaaaugaauaagcuauucgagagaacuaaaaagcagcugcgggaaaacgccgaggacaugggcaauggaugcuuuaagauuuaucauaaaugugauaacgcuugcaucggcucuauccgaaaugggaccuacgaccacgauguguaccgcgacgaggcccucaacaauagauuccagauuaagggaguugaacugaaaucagguuauaaggacuggauacuuuggaucaguuuugcaauuagcugcuuccuguugugugugguccuccugggcuuuaucaugugggccugccagaaagggaacauuagguguaauaucugcauauga

SEQ ID NO: 128259 - RNA, 1701 nt, Artificial Sequence
  derived and/or modified CDS sequence (opt3) from hemagglutinin__InfluenzaA__AAY98195
augaagaccaucauugcccugagcuacauacucugccuuguguucgcucagaaacugcccggcaacgacaauuccacagcaacuuuguguuuagggcaccaugccgucccuaacggaacgcugguuaagaccaucacaaaugaucaaauugaggugacuaacgcgaccgaacuuguacagucuucaaguacagguagaaucugcgacagcccacaccagauucucgauggcgagaauuguacccugaucgacgcucuacugggggauccgcauugcgacggauuucagaacaaagaaugggauuuguucguggagagguccaaggccuauucuaauuguuaccccuaugacgucccugauuacgcaucgcuccggucacugguggccagcaguggcacucuggaauuuaacaaugaguccuucaacuggacagguguugcucaaaaugggaccucuagcgcaugcaaacgccgauccaacaagucauuuuucagucgucucaauugguuacaccagcugaaguauaaauacccagcccuuaacgugacgaugcccaauaacgagaaguuugacaaauuguauauauggggaguccaucacccuagcacugauucugaccagaucucccuguacgcucaggccucaggcagagugaccguaagcacaaagaggagucaacagacuguuauuccaaacaucggcucucggcccugggugcgcggggucuccagcagaauuucgaucuacuggaccauagugaaaccuggagauauucuacucaucaauucuacagguaaccugauugcgccaaggggcuauuucaagauccgguccgggaagucaaguaucaugcgcagcgacgcaccgauuggaaaauguaauuccgaaugcauaacccccaacggcucuaucccuaaugacaagccauuucagaacgugaaucgaauuacguacggugccugucccagauaugucaaacagaacacucuuaagcuggcuacagggaugaggaauguuccugagaaacaaacccggggaaucuucggcgccauagcaggcuuuauugaaaacgggugggagggaaugguggaugguugguacggcuuccgucaccagaauagcgaggggacuggacaggcugccgacuugaagucaacacaagcggccaucaaccagaucaauggcaaacucaaccgccugauugaaaagaccaaugagaaguuucaucagaucgaaaaagaguucagugaaguagaggguaggauucaggauuuagagaaguauguggaagacacgaaaauagaucugugguccuacaacgcagagcuccuugucgcucuggaaaaccaacacaccaucgacuugacagauagcgagaugaauaagcuauucgaaagaacucggaaacagcugcgagagaacgccgaggacauggggaauggcugcuuuaagauuuaucauaagugugauaacgcuugcaucggaucuauccgcaauggcaccuacgaccacgauguguacagagacgaagcccucaacaauagguuccagauuaaagggguugagcugaagucaggauauaaagacuggauacuuuggaucaguuuugcaauuagcugcuuccuguugugugugguccuccuggguuuuaucaugugggccugccagaagggcaacauucgguguaauaucugcauauga

SEQ ID NO: 128260 - RNA, 1701 nt, Artificial Sequence; identical to SEQ ID NO: 128234
  derived and/or modified CDS sequence (opt3) from hemagglutinin__InfluenzaA__AAY98207

SEQ ID NO: 128261 - RNA, 1701 nt, Artificial Sequence; identical to SEQ ID NO: 128236
  derived and/or modified CDS sequence (opt3) from hemagglutinin__InfluenzaA__AAY98217

SEQ ID NO: 128262 - RNA, 1701 nt, Artificial Sequence; identical to SEQ ID NO: 128234
  derived and/or modified CDS sequence (opt3) from hemagglutinin__InfluenzaA__AAY98227

SEQ ID NO: 128263 - RNA, 1701 nt, Artificial Sequence; identical to SEQ ID NO: 128234
  derived and/or modified CDS sequence (opt3) from hemagglutinin__InfluenzaA__AAY98237

SEQ ID NO: 128264 - RNA, 1701 nt, Artificial Sequence
  derived and/or modified CDS sequence (opt3) from hemagglutinin__InfluenzaA__AAY98247
augaagaccaucauugcccugagcuacauacucugccuuguguucgcucagaaacugcccggcaacgacaauuccacagcaacuuuguguuuagggcaccaugccgucccuaacggaacgcugguuaagaccaucacaaaugaucaaauugaggugacuaacgcgaccgaacuuguacagucuucaaguacagguagaaucugcgacagcccacaccagauucucgauggcgagaauuguacccugaucgacgcucuacugggggauccgcauugcgacggauuucagaacaaagaaugggauuuguucguggagagguccaaggccuauucuaauuguuaccccuaugacgucccugauuacgcaucgcuccggucacugguggccagcaguggcacucuggaauuuaacaaugaguccuucaacuggacagguguugcucaaaaugggaccucuagcgcaugcaaacgccgauccaacaagucauuuuucagucgucucaauugguuacaccagcugaaguauaaauacccagcccuuaacgugacgaugcccaauaacgagaaguuugacaaauuguauauauggggaguccaucacccuagcacugauucugaccagaucucccuguacgcucaggccucaggcagagugaccguaagcacaaagaggagucaacagacuguuauuccaaacaucggcucucggcccugggugcgcggggucuccagcagaauuucgaucuacuggaccauagugaaaccuggagauauucuacucaucaauucuacagguaaccugauugcgccaaggggcuauuucaagauccgguccgggaagucaaguaucaugcgcagcgacgcaccgauuggaaaauguaauuccgaaugcauaacccccaacggcucuaucccuaaugacaagccauuucagaacgugaaucgaauuacguacggugccugucccagauauaucaaacagaacacucuuaagcuggcuacagggaugaggaaugucccugagaaacaaacccggggaauauucggcgccauugcaggcuuuaucgaaaacgggugggagggaaugguugaugguugguacggcuuccgucaccagaauagcgaggggacuggacaggcugccgacuugaagucaacacaagcggccaucaaccagauuaauggcaaacucaaccgccugaucgaaaagaccaaugagaaguuucaucagauugaaaaagaguucagugaaguggaggguagaauacaggauuuagagaaguauguagaagacacgaaaaucgaucugugguccuacaacgcagagcuccuuguggcucuggaaaaccaacacaccauugacuugacagauagcgagaugaauaagcuauucgaaaggacuaaaaagcagcugcgggagaacgccgaggacauggggaauggcugcuuuaagaucuaucauaaaugugauaacgcuugcaucggaucuauucgaaauggcaccuacgaccacgaugucuaccgcgacgaagcccucaacaauagauuccagauaaaggggguggagcugaaaucaggauauaaggacuggauccuuuggauuaguuuugcaaucagcugcuuccuguuguguguugugcuccuggguuuuauuaugugggccugccagaaaggcaacaucagguguaauauaugcaucuga

SEQ ID NO: 128265 - RNA, 1701 nt, Artificial Sequence; identical to SEQ ID NO: 128234
  derived and/or modified CDS sequence (opt3) from hemagglutinin__InfluenzaA__AAY98319

SEQ ID NO: 128266 - RNA, 1701 nt, Artificial Sequence
  derived and/or modified CDS sequence (opt3) from hemagglutinin__InfluenzaA__AAY98329
augaagaccaucauugcccugagcuacauacucugccuuguguucgcucagaaacugcccggcaacgacaauuccacagcaacuuuguguuuagggcaccaugccgucccuaacggaacgcugguuaagaccaucacaaaugaucaaauugaggugacuaacgcgaccgaacucguacagucuucaaguacagguagaaucugcgacagcccacaccagauucucgauggcgagaauuguacccugaucgacgcucugcugggggauccgcauugcgacggauuucagaacaaagaaugggauuuguucguggagagguccaaggccuauucuaauuguuaccccuaugacgucccugauuacgcaucgcuccggucacugguggccagcaguggcacucuggaauuuaacaaugaguccuucaacuggacagguguugcucaaaaugggaccucuagcgcaugcaaacgccgauccaacaagucauuuuucagucgucucaauugguuacaccagcugaaguauaaauacccagcccuuaacgugacgaugcccaauaacgagaaguuugacaaauuguauauauggggaguccaucacccuagcacugauucugaccagaucucccuguacgcucaggcccuaggcagagugaccguaucaacaaagaggagccaacagacuguuauuccaaacaucggcagucggcccugggugcgcggggucucuuccagaauuagcaucuacuggaccauagugaaaccuggagauauucuccugaucaauucgacagguaaccuuauugcgccaaggggcuauuucaagauccggucugggaaguccucaaucaugcgcagugacgcaccgauuggaaaauguaauagcgaaugcauaacccccaacggcuccaucccuaaugacaagccauuucagaacgugaaucgaauuacguacggugccugucccagauaugucaaacagaacacucugaaguuggcuacagggaugaggaauguuccugagaaacaaacccggggaaucuucggcgccauagcaggcuuuauugaaaacgggugggagggaaugguggaugguugguacggcuuccgucaccucaauucugaggggacuggacaggcugccgaccuuaagagcacacaggcggccaucaaccaaaucaauggcaaauuaaaccgccugauugaaaagaccaaugagaaguuucaucagaucgaaaaagaguucucagaaguagaggguaggauucaggaucucgagaaguauguggaagacacgaaaauagaucuuuggaguuacaacgcagagcuguuggucgcucuagaaaaccagcacaccaucgaccugacagauuccgagaugaauaagcuauucgaaagaacuaaaaagcaacugcgggagaacgccgaggacauggggaauggcugcuuuaagauuuaucauaaaugugauaacgcuugcaucggaagcauccgaaauggcaccuacgaccacgauguguaccgcgacgaagcccuuaacaauagauuccagauuaaggggguugagcugaaaucuggauauaaggacuggauauuguggaucucauuugcaauuaguugcuuccuccuguguguggucuuacuggguuuuaucaugugggccugccagaaaggcaacauuagguguaauaucugcauauga

SEQ ID NO: 128267 - RNA, 1701 nt, Artificial Sequence; identical to SEQ ID NO: 128234
  derived and/or modified CDS sequence (opt3) from hemagglutinin__InfluenzaA__AAY98339

SEQ ID NO: 128268 - RNA, 1701 nt, Artificial Sequence; identical to SEQ ID NO: 128234
  derived and/or modified CDS sequence (opt3) from hemagglutinin__InfluenzaA__AAY98353

SEQ ID NO: 128269 - RNA, 1701 nt, Artificial Sequence
  derived and/or modified CDS sequence (opt3) from hemagglutinin__InfluenzaA__AAY98366
augaagaccaucauugcccugagcuacauacucugccuuguguucgcucagaaacugcccggcaacgacaauuccacagcaacuuuguguuuagggcaccaugccgucccuaacggaacgcugguuaagaccaucacaucugaucaaauugaggugacuaaugcgaccgaacugguacagucaaguagcacagguagaaucugcgacuccccacacaggauucucgauggcgagaacuguacccugaucgacgcuuugcugggggauccgcauugcgacggauuucagaauaaagaaugggauuuguucguggagcggucuaaggccuauucgaacuguuaccccuaugacgucccugauuacgcaucacuccgcagccugguggccaguuccggcacucuggaauuuaauaacgagucuuucaauuggacagguguugcucagaacgggaccagcuuugcaugcaaacgacguuccauaaagucauucuuuaguagacucaauugguuacaccaacugaaguauaaauacccagcccuuaacgugacgaugcccaauaacgacaaguucgauaaauuguauaucuggggaguccaucacccuggcacugacagcgaucagaccucucuguacgcucaggccuccggcagggugacaguaucaacuaagcggagccagcaaaccguuauuccaaauaucgggagucgccccugggugagaggagucucuuccaggauuagcaucuacuggacaauagugaaaccuggugacauucuacucaucaacucgaccggcaaccugauugcgccacggggguauuuuaagauccgcucuggaaaguccucaaucaugcgaagugacgcaccgauuggcaaauguaauagcgagugcauaacgcccaacgguuccaucccuaaugauaagccauuccagaacgugaauagaauuacuuacggggccugucccagguaugucaaacagaacacacuuaagcuggcuaccggaaugcggaauguuccugaaaaacagacucguggcaucuuuggcgccauagcaggguucauugagaacggaugggaagguaugguggacggcugguacggguuucgccaccaaaauucugagggaacaggccaggcugccgaucuuaagagcacccaggcggccaucaaccaaaucaaugguaaacucaacagacugauugagaagacgaaugaaaaguuccaucagaucgagaaagaguucaccgaaguagaagggaggauucaggacuuagagaaguauguggaggauacaaaaauagaccuguggucauacaacgcagaacuccuugucgcucuggagaaucagcacacuaucgauuugaccgacagugaaaugaacaagcuauuugagcggacacgaaaacaacugcgcgaaaacgccgaggauaugggcaauggaugcuucaagauuuaucauaagugugacaacgcuugcaucggcuccaucagaaaugggacuuacgaucacgacguguacagggacgaggcccucaacaaucgguuucagauuaaaggaguugaacuaaagagcgguuauaaagauuggauacuuuggaucucuuucgcaaccucaugcuuucuguugugugugguccuccugggcuucauuaugugggccugccagaaggggaacauccgcuguaauauuugcaucuga

SEQ ID NO: 128270 - RNA, 1701 nt, Artificial Sequence
  derived and/or modified CDS sequence (opt3) from hemagglutinin__InfluenzaA__AAY98376
augaagaccaucauugcccugagcuacauacucugccuuguguucgcucagaaacugcccggcaacgacaauuccacagcaacuuuguguuuagggcaccaugccgucccuaacggaacgcugguuaagaccaucacaaaugaucaaauugaggugacuaacgcgaccgaacuuguacagucuucaaguacagguagaaucugcgacagcccacaccagauucucgauggcgagaauuguacccugaucgacgcucuacugggggauccgcauugcgacggauuucagaacaaagaaugggauuuguucguggagagguccaaggccuauucuaauuguuaccccuaugacgucccugauuacgcaucgcuccggucacugguggccagcaguggcacucuggaauuuaacaaugaguccuucaacuggacagguguugcucaaaaugggaccucuagcgcaugcaaacgccgauccauaaagucauuuuucagucgucucaacugguuacaccagcugaaguauaaauacccagcccuuaaugugacgaugcccaacaaugacaaguuugauaaauuguauaucuggggaguccaucacccuagcacugacucugaucagaccucccuguacgcucaggccucaggcagagugacaguaagcacuaagaggagucaacagaccguuauuccaaacaucggcucucggcccugggugcgcggggucuccagcagaauuucgaucuacuggacaauagugaaaccuggagacauucuacucaucaacucuaccgguaaucugauugcgccaaggggcuauuucaagauccgguccgggaagucaaguaucaugcgcagcgacgcaccgauuggaaaauguaacuccgagugcauaacgcccaauggcucuaucccuaacgauaagccauuucagaaugugaaccgaauuacuuacggugccugucccagauaugucaaacagaauacacuuaagcuggcuaccgggaugaggaacguuccugaaaaacaaacucggggaaucuucggcgccauagcaggcuuuauugagaaugggugggaaggaaugguggacgguugguacggcuuccgucaccagaacagcgaggggacaggacaggcugccgauuugaagucaacccaagcggccaucaaucagaucaacggcaaacucaaucgccugauugagaagacgaacgaaaaguuucaucagaucgagaaagaguucagugaaguagaagguaggauucaggacuuagagaaguauguggaggauaccaaaauagaccugugguccuacaaugcagaacuccuugucgcucuggagaaccaacacacaaucgauuugacugacagcgaaaugaacaagcuauucgagagaacccggaaacagcugcgagaaaaugccgaggauauggggaacggcugcuuuaagauuuaucauaagugugacaaugcuugcaucggaucuauccgcaacggcacauacgaucacgacguguacagagacgaggcccucaauaacagguuccagauuaaagggguugaacugaagucaggauauaaagauuggauacuuuggaucaguuuugcaauuagcugcuuccuguugugugugguccuccuggguuuuaucaugugggccugccagaagggcaauauucgguguaacaucugcauauga

SEQ ID NO: 128271 - RNA, 1701 nt, Artificial Sequence
  derived and/or modified CDS sequence (opt3) from hemagglutinin__InfluenzaA__AAY98386
augaagaccaucauugcccugagcuacauacucugccuuguguucgcucagaaacugcccggcaacgacaauuccacagcaacuuuguguuuagggcaccaugccgucccuaacggaacgcugguuaagaccaucacaaaugaucaaauugaggugacuaacgcgaccgaacuuguacagucuucaaguacagguagaaucugcgacagcccacaccagauucucgauggcgggaauuguacccugaucgacgcucuacugggagauccgcauugcgacggcuuucagaacaaagagugggauuuguucguggaaagguccaaggucuauucuaauuguuaccccuaugacgugccugauuacgccucgcuccggucacugguugcaagcagugguacucuggaguuuaacaaugaauccuucaacuggacagggguggcccaaaauggaaccucuagcgcuugcaaacgccgauccauaaagucauuuuucagucgucucaacugguuacaccagcugaaguauaaauacccagcacuuaaugucacgaugcccaacaaugagaaguuugacaaauuguauaucuggggcgugcaucacccuagcacugauucugaccagauuucccuguacgcccaggcuucaggcagaguaaccguuagcacaaagaggagucaacagacugugaucccaaacauugggucucggcccuggguccgcggaguguccagcagaaucucgauauacuggaccauugugaaaccuggugauauccuacucauuaacucuacaggcaaucugaucgccccaaggggguauuucaagauccgguccggaaagucaaguauuaugcgcagcgacgcgccgauaggcaaauguaacuccgagugcaucacccccaaugguucuauuccuaacgacaagccauuucagaaugucaaccgaaucacguacggggcaugucccagauauguuaaacagaauacucuuaagcuggccacaggaaugaggaacgugccugaaaaacaaacccggggcauauucggcgcuauugccggguuuaucgagaauggaugggaagguaugguagauggcugguacggguuccgucaccagaacagcgagggaacuggccaggcagcugacuugaagucaacacaagccgcgaucaaucagauuaacgguaaacucaaucgccugaucgagaagaccaacgaaaaguuucaucagauugagaaagaguucagugaaguggaagggagaauacaggauuuagagaaguaugucgaggacacgaaaaucgaucugugguccuacaaugccgaacuccuuguggcacuggagaaccaacacaccauugacuugacagauagcgaaaugaacaagcuauucgagaggacuaaaaagcagcugcgggaaaaugcugaggacaugggcaacggaugcuuuaagaucuaucauaaaugugauaaugccugcaucggcucuauucgaaacgggaccuacgaccacgauguuuaccgcgacgaggcucucaauaacagauuccagauaaagggaguggaacugaaaucagguuauaaggacuggauccuuuggauuaguuuugccaucagcugcuuccuguugugugucgugcuccugggcuuuauuaugugggcaugccagaaagggaauaucagguguaacauaugcaucuga

SEQ ID NO: 128272 - RNA, 1701 nt, Artificial Sequence; identical to SEQ ID NO: 128234
  derived and/or modified CDS sequence (opt3) from hemagglutinin__InfluenzaA__AAY98396

SEQ ID NO: 128273 - RNA, 1701 nt, Artificial Sequence; identical to SEQ ID NO: 128234
  derived and/or modified CDS sequence (opt3) from hemagglutinin__InfluenzaA__AAY98406

SEQ ID NO: 128274 - RNA, 1701 nt, Artificial Sequence
  derived and/or modified CDS sequence (opt3) from hemagglutinin__InfluenzaA__AAZ32946
augaagaccaucauugcccugagcuacauacucugccuuguguucgcucagaaacugcccggcaacgacaauuccacagcaacuuuguguuuagggcaccaugccgucccuaacggaacgaucguuaagaccauuacaaaugaucaaaucgaggugacuaacgcgaccgaacugguacagucuucaaguacagguggcauuugcgacagcccacaccagauccuagauggggagaauuguacccucauagacgcucugcuuggagauccgcagugcgacggcuuucaaaacaaaaagugggaucuguucguggaaagauccgaggccuauucuaauuguuaccccuaugacgucccugauuacgcaucguugaggucacucaucgccagcagugguacucuggaauuuacaaacgaguccuucaauuggaccggggugacgcagaacggaacuucuagcgcuugcaaacggcgcuccaauaagucauuuuucagucgacugaacuggcucacccauuuaaaguauaaauacccagcacugaauguuacaaugcccaacaaugagaaguuugacaaacuuuauauuuggggcgugcaccauccuggcacugauagcgaccagaucucuuuguacgcccaggcuuccgggcguauuaccgucucaacaaagagaagccaacagaccgugaucccaaacauaggaaguaggccccggguacgcgauguuucuuccagaauuagcaucuacuggacgauugugaaaccuggugacauccugcuaaucaacucgacuggcaaucucauugccccaaggggguauuucaagauacggucuggaaaguccucaaucaugcgcagugacgcgccgauuggcaaauguaacagcgaaugcaucacacccaaugguuccauaccuaacgauaagccauuucagaauauuaaccgaaucaccuacgggacuugucccagauaugucaaacagaauacacugaagcuggcaaccggaaugaggaacgugccugagaaacaaacgcggggcaucuucggcgccauugcuggguuuaucgaaaauggaugggaggguaugguggacggcugguacggguuccgucaccagaacucugagggaaccggccaggccgcagaucuuaagagcacacaagcugccauuaaucagauaaacgguaaauugaaucgccucaucgggaagacuaacgaaaaguuucaccagauugagaaagaguucucagaagucgaaggcagaauccaggaccuggagaaguauguugaggauaccaaaaucgacuuauggaguuacaaugcggaacugcucguggcccuugagaaccaacauacaauugaucugacugacuccgaaaugaacaaguuguucgagaggaccaaaaagcagcuacgggaaaaugcagaggauaugggaaacggcugcuuuaagauauaucacaaaugugacaaugcuugcaucgggagcauucgaaacggaacauacgaucaugacguauaccgcgacgaggcccugaauaacagauuccagaucaaggguguggaacucaaaucuggcuauaaggauuggauucuguggaucucauuugcuauaaguugcuuccuucugugugucguguugcucggguuuaucaugugggccugccagaaaggaaauauuagguguaacaucugcauuuga

SEQ ID NO: 128275 - RNA, 1701 nt, Artificial Sequence
  derived and/or modified CDS sequence (opt3) from hemagglutinin__InfluenzaA__AAZ32949
augaagaccaucauugcccugagcuacauacucugccuuguguucgcucagaaacugcccggcaacgacaauuccacagcaacuuuguguuuagggcaccaugccgucccuaacggaacgaucguuaagaccauuacaaaugaucaaaucgaggugacuaacgcgaccgaacugguacagucuucaaguacagguggcauuugcgacagcccacaccagauccuagauggggagaauuguacccucauagacgcucugcuuggagauccgcagugcgacggcuuucaaaacaaaaagugggaucuguucguggaaagauccgaggccuauucuaauuguuaccccuaugacgucccugauuacgcaucguugaggucacucaucgccagcagugguacucuggaauuuacaaacgaguccuucaauuggaccggggugacgcagaacggaacuucuagcgcuugcaaacggcgcuccaauaagucauuuuucagucgacugaacuggcucacccauuuaaaguauaaauacccagcacugaauguuacaaugcccaacaaugagaaguuugacaaacuuuauauuuggggcgugcaccauccuggcacugauagcgaccagaucucuuuguacgcccaggcuuccgggcguauuaccgucucaacaaagagaagccaacagaccgugaucccaaacauaggaaguaggccccggguacgcgauauuucuuccagaaucagcauuuacuggacgaucguuaaaccuggugacauccugcuaauuaacucgacuggcaaucucauagccccaaggggguauuucaagauccggucuggaaaguccucaauuaugcgcagugacgcgccgaucggcaaauguaacagcgaaugcauaacacccaaugguuccauuccuaacgauaagccauuucagaauaucaaccgaaucaccuacggggcaugucccagauaugugaaacagaauacucugaagcuggccacaggaaugaggaacgucccugagaaacaaacccggggcauuuucggcgcuaucgccggguuuauugaaaauggaugggaggguaugguggacggcugguacggguuccgucaccagaacucugagggaacgggccaggcagcugaucuuaagagcacccaagccgcgauaaaucagaucaacgguaaauugaaucgccucauugggaagacaaacgaaaaguuucaccagaucgagaaagaguucucagaaguggaaggcagaauccaggaccuggagaaguaugucgaggauacuaaaauugacuuauggaguuacaaugccgaacugcucguugcacuugagaaccaacauaccauagaucugacagacuccgaaaugaacaaguuguucgagaggacuaaaaagcagcuacgggaaaaugcugaggauaugggaaacggcugcuuuaagaucuaucacaaaugugacaaugccugcauugggagcauccgaaacggaaccuacgaucaugacguguaccgcgacgaggcucugaauaacagauuccagauuaaggguguagaacucaaaucuggcuauaaggauuggauccuguggauaucauuugccaucaguugcuuccuucuguguguggucuugcucggguuuauuaugugggcaugccagaaaggaaauaucagguguaacauuugcaucuga

SEQ ID NO: 128276 - RNA, 1701 nt, Artificial Sequence
  derived and/or modified CDS sequence (opt3) from hemagglutinin__InfluenzaA__AAZ32950
augaagaccaucauugcccugagcuacauacucugccuuguguucgcucagaaacugcccggcaacgacaauuccacagcaacuuuguguuuagggcaccaugccgucccuaacggaacgaucguuaagaccauuacaaaugaucaaaucgaggugacuaacgcgaccgaacugguacagucuucaaguacagguggcauuugcgacagcccacaccagauccuagauggggagaauuguacccucauagacgcucugcuuggagauccgcagugcgacggcuuucaaaacaaaaagugggaucuguucguggaaagauccgaggccuauucuaauuguuaccccuaugacgucccugauuacgcaucguugaggucacucaucgccagcagugguacucuggaauuuacaaacgaguccuucaauuggaccggggugacgcagaacggaacuucuagcgcuugcaaacggcgcuccaauaagucauuuuucagucgacugaacuggcucacccauuuaaaguauaaauacccagcacugaauguuacaaugcccaacaaugagaaguuugacaaacuuuauauuuggggcgugcaccauccuggcacugauagcgaccagaucucuuuguacgcccaggcuuccgggcguauuaccgucucaacaaagagaagccaacagaccgugaucccaaacauaggaaguaggccccggguacgcgauguuucuuccagaauuagcaucuacuggacgauugugaaaccuggugacauccugcuaaucaacucgacuggcaaucucauugccccaaggggguauuucaagauacggucuggaaaguccucaaucaugcgcagugacgcgccgauuggcaaauguaacagcgaaugcaucacacccaaugguuccauaccuaacgauaagccauuucagaauauuaaccgaaucaccuacggggcaugucccagauaugucaaacagaauacucugaagcuggccacaggaaugaggaacgugccugagaaacaaacccggggcaucuucggcgcuauugccggguuuaucgaaaauggaugggaggguaugguggacggcugguacggguuccgucaccagaacucugagggaacgggccaggcagcugaucuuaagagcacccaagccgcgauuaaucagauaaacgguaaauugaaucgccucaucgggaagacaaacgaaaaguuucaccagauugagaaagaguucucagaagucgaaggcagaauccaggaccuggagaaguauguugaggauacuaaaaucgacuuauggaguuacaaugccgaacugcucguggcacuugagaaccaacauaccauugaucugacagacuccgaaaugaacaaguuguucgagaggacuaaagaacagcuacgggagaaugcugaggauaugggaaacggcugcuuuaagauauaucacaagugugacaaugccugcaucgggagcauucgaaacggaaccuacgaucaugacguauaccgcgacgaagcucugaauaacagauuccagaucaaagguguggagcucaagucuggcuauaaagauuggauucuguggaucucauuugccauaaguugcuuccuucugugugucguguugcucggguuuaucaugugggcaugccagaagggaaauauuagguguaacaucugcauuuga

SEQ ID NO: 128277 - RNA, 1701 nt, Artificial Sequence
  derived and/or modified CDS sequence (opt3) from hemagglutinin__InfluenzaA__AAZ32951
augaagaccaucauugcccugagcuacauacucugccuuguguucgcucagaaaauccccggcaacgacaauuccacagcaacucuguguuuggggcaccaugccgucccuaacggaacguuaguuaagaccauuacaaaugaucaaaucgaggugacuaacgcgaccgaacugguacagucuucaaguacagguggcauuugcgacagcccacaccagauccuagauggggagaauuguacccucauagacgcucugcuuggagauccgcauugcgacggcuuucagaacaaaaagugggaucuguucguggaaagauccaaagccuauucuaauuguuaccccuaugacgucccugauuacgcaucguugaggucacucguggccagcagugguacucuggaguuuaacaaugaauccuucaacuggacagggguuacccaaaauggaacgucuagcgcuugcaagcggcgcuccaacaagucauuuuucagucgacugaauuggcuccaccaguuaaaauauaaguacccagcacugaacguggccaugcccaauaacgagaaauuugacaaacuuuauaucuggggcguccaucacccuggcacugauagcgaccagauuucuuuguacgcucaggccuccgggcguaucaccgugucaacaaagagaagccaacagacuguaauuccaaacaucggaaguaggccccggguucgcgauauaucuuccagaauuagcaucuacuggaccauugugaagccuggugacauccugcuaaucaauucgacaggcaaccucauugcgccaaggggguauuucaagauacggucuggaaaauccucaaucaugcgcagugacgcaccgauuggcaaguguaauagcgagugcaucacccccaacgguuccauaccuaaugauaaaccauuucagaacgucaaucgaauuacguacggggccugucccagauaugugaagcagaacacucugaaacuugcuacaggaaugaggaaugugccugaaaagcaaacccggggcaucuucggcgccaucgcaggguuuauugagaacggaugggaagguauggucgacggcugguacggguuccgucaccaaaauucugagggaacuggccaggcugccgaucugaaaagcacacaggcggccaucaaccagauuaaugguaaguugaaccgccucauagggaagaccaaugagaaauuucaucagaucgaaaaggaguucucagaaguugagggcaggauucaggaccuggaaaaauauguggaggauacgaagaucgacuuauggaguuacaacgcagagcugcucguagcucuugaaaaccaacacaccaucgaucugacagacuccgagaugaauaaauuguucgaaagaacuaagaagcagcuacgggagaacgccgaagauaugggaaauggcugcuuuaaaauuuaucauaagugugacaacgcuugcauagggagcauccgaaauggaaccuacgaucacgacguguaccgcgacgaggcccugaacaauagauuccagauuaaaggugucgagcucaagucuggcuauaaagauuggauccuguggauuucauuugcaaucaguugcuuccuucuguguguggccuugcucggguuuauaaugugggcuugccagaagggaaacaucagguguaauauuugcaucuga

SEQ ID NO: 128278 - RNA, 1701 nt, Artificial Sequence
  derived and/or modified CDS sequence (opt3) from hemagglutinin__InfluenzaA__AAZ32952
augaagaccaucauugcccugagcuacauacucugccuuguguucgcucagaaaauccccggcaacgacaauuccacagcaacucuguguuuggggcaccaugccgucccuaacggaacguuaguuaagaccauuacaaaugaucaaaucgaggugacuaacgcgaccgaacugguacagucuucaaguacagguggcauuugcgacagcccacaccagauccuagauggggagaauuguacccucauagacgcucugcuuggagauccgcauugcgacggcuuucagaacaaaaagugggaucuguucguggaaagauccaaagccuauucuaauuguuaccccuaugacgucccugauuacgcaucguugaggucacucguggccagcagugguacucuggaguuuaacaaugaauccuucaacuggacagggguuacccaaaauggaacgucuagcgcuugcaagcggcgcuccaacaagucauuuuucagucgacugaauuggcuccaccaguuaaaauauaaguacccagcacugaacguggccaugcccaauaacgagaaauuugacaagcuguauaucuggggcguccaucacccuggcacugauagcgaccagauuucuuuguacgcucaggccuccgggcguaucaccgugucaacaaaaagaagccaacagacuguaauuccaaacaucggaaguaggccccggguucgcgaugugucuuccagaauaagcauuuacuggaccaucgucaagccuggugacauucugcuaaucaauucgacaggcaaccucaucgcgccaaggggguauuucaagauucggucuggaaaauccucaauaaugcgcagugacgcaccgaucggcaaguguaauagcgagugcauuacccccaacgguuccaucccuaaugauaaaccauuucagaacgugaauaagauaacguacggggccuguccccgauaugugaaacagaacacucugaaacuugcuacaggaaugagaaaugucccugaaaagcaaaccaggggcauuuucggcgccaucgcaggguuuaucgagaacggaugggaagguaugguugacggcugguacggguuccggcaccaaaauucugagggaacuggccaggcugccgaucuuaagagcacacaggcggccauuaaccagaucaaugguaaguugaaccgucucauugggaaaaccaaugagaaguuucaucagauagaaaaagaguucucagaaguggagggccgcauccaggaccuggaaaaguauguagaggauacgaaaauugacuuauggaguuacaacgcagagcugcucguggcucuugaaaaccaacacaccaucgaucugacagacuccgagaugaauaaguuguucgaaagaacuaagaaacagcuaagggagaacgccgaagauaugggaaauggcugcuuuaagaucuaucauaaaugugacaacgcuugcauugggagcauacggaauggaaccuacgaucacgacgucuaccgagacgaggcccugaacaaucgcuuccagaucaaggguguggagcucaaaucuggcuauaaggauuggauucuguggaucucauuugcaauuaguugcuuccuucuguguguugccuugcucggguuuaucaugugggcuugccagaagggaaacauaagauguaauaucugcauuuga

SEQ ID NO: 128279 - RNA, 1701 nt, Artificial Sequence
  derived and/or modified CDS sequence (opt3) from hemagglutinin__InfluenzaA__AAZ32953
augaagaccaucauugcccugagcuacauacucugccuuguguucgcucagaaaauccccggcaacgacaauuccacagcaacucuguguuuggggcaccaugccgucccuaacggaacguuaguuaagaccauuacaaaugaucaaaucgaggugacuaacgcgaccgaacugguacagucuucaaguacagguggcauuugcgacagcccacaccagauccuagauggggagaauuguacccucauagacgcucugcuuggagauccgcauugcgacggcuuucagaacaaaaagugggaucuguucguggaaagauccaaagccuauucuaauuguuaccccuaugacgucccugauuacgcaucguugaggucacucguggccagcagugguacucuggaguuuaacaaugaauccuucaacuggacagggguuacccaaaauggaacgucuagcgcuugcaagcggcgcuccaacaagucauuuuucagucgacugaauuggcuccaccaguuaaaauauaaguacccagcacugaacguggccaugcccaauaacgagaaauuugacaaacuuuauaucuggggcguccaucacccuggcacugauagcgaccagauuucuuuguacgcucaggccuccgggcguaucaccgugucaacaaagagaagccaacagacuguaauuccaaacaucggaaguaggccccggguucgcgaugugucuuccagaauaagcauuuacuggaccaucgucaagccuggugacauucugcuaaucaauucgacaggcaaccucaucgcgccaaggggguauuucaagauucggucuggaaaauccucaauaaugcgcagugacgcaccgaucggcaaguguaauagcgagugcauuacccccaacgguuccaucccuaaugauaaaccauuucagaacgugaaucgaauaacguacggggccugucccagauaugugaagcagaacacucugaaacuugcuacaggaaugaggaaugucccugaaaagcaaacccggggcauuuucggcgccaucgcaggguuuaucgagaacggaugggaagguaugguugacggcugguacggguuccgucaccaaaauucugagggaacuggccaggcugccgaucugaaaagcacacaggcggccauuaaccagaucaaugguaaguugaaccgccucauugggaagaccaaugagaaauuucaucagauagaaaaggaguucucagaaguggagggcagaauccaggaccuggaaaaauauguagaggauacgaagauugacuuauggaguuacaacgcagagcugcucguggcucuugaaaaccaacacaccaucgaucugacagacuccgagaugaauaaauuguucgaaaggacuaagaagcagcuacgggagaacgccgaagauaugggaaauggcugcuuuaaaaucuaucauaagugugacaacgcuugcauugggagcauacgaaauggaaccuacgaucacgacgucuaccgcgacgaggcccugaacaauagauuccagaucaaagguguggagcucaagucuggcuauaaagauuggauucuguggaucucauuugcaauuaguugcuuccuucuguguguugccuugcucggguuuaucaugugggcuugccagaagggaaacauaagguguaauaucugcauuuga

SEQ ID NO: 128280 - RNA, 1701 nt, Artificial Sequence
  derived and/or modified CDS sequence (opt3) from hemagglutinin__InfluenzaA__AAZ38462
augaagaccaucauugcccugagcuacauacucugccuuguguucgcucagaaacugcccggcaacgacaauuccacagcaacuuuguguuuagggcaccaugccgucccuaacggaacgcugguuaagaccaucacaucugaucaaauugaggugacuaaugcgaccgaauugguacagucaaguagcacagguagaaucugcgacuccccacacaggauucucgauggcgagaacuguacccugaucgacgcccuucugggggauccgcauugcgacggauuucagaauaaagaaugggauuuguucguggagcggucuaaggcuuauucgaacuguuaccccuaugacgucccugauuacgcaucacuccgcagccugguggccaguuccggcacucuggaauuuaauaacgagucuuucaauuggacagguguugcucagaacgggaccagcuuugcaugcaaacgacguuccauaaagucauucuuuaguagacucaauugguuacaccaacugaaguauaaauacccagcccuuaacgugacgaugcccaauaacgacaaguucgauaaauuguauaucuggggaguccauuacccuggcacugacagcgaucagaccucucuguacgcucaggccuccggcagggugacaguaucaacuaagcggagccagcaaaccguuauuccaaauaucgggagucgccccugggugagaggagucucuuccaggauuagcaucuauuggacaauagugaaaccuggugacauucuacucaucaacucgaccggcaaccugauugcgccacggggguacuuuaagauccgcucuggaaaguccucaaucaugcgaagugacgcaccgauuggcaaauguaauagcgagugcauaacgcccaacgguuccaucccuaaugggaagccauuccagaacgugaauagaauuacuuauggagccugucccagguacgucaaacagaacacacuuaagcuggcuaccggcaugcggaauguuccugaaaaacagacucguggcaucuuuggggccauagcaggauucauugagaacgguugggaaggcaugguggaugggugguauggauuucgccaccaaaauucugagggcacaggucaggcugccgaccuaaagagcacccaggcggccaucaaccaaaucaaugggaaacucaacagacugauugagaagacgaaugaaaaguuccaccagaucgagaaagaguucaccgaaguagaaggcaggauucaggauuuagagaaguacguggaggacacaaaaauagaucuguggucauauaacgcagaacuccuugucgcucuggagaaucagcauacuaucgacuugaccgauagugaaaugaacaagcuauuugagcggacacgacgccaacugagagaaaacgccgaggacaugggaaauggcugcuucaaaauuuaccacaagugugauaacgcuugcaucggguccaucaggaauggaacuuacgaccaugauguguaucgggacgaggcccucaacaaucgcuuucagauuaaggguguugaacugaaaagcggcuacaaggacuggauacuuuggaucucuuucgcaaccucaugcuuucuguugugugugguccuccugggguucauuaugugggccugccagaaaggaaacaucagauguaauauuugcaucuga

SEQ ID NO: 128281 - RNA, 1701 nt, Artificial Sequence
  derived and/or modified CDS sequence (opt3) from hemagglutinin__InfluenzaA__AAZ38473
augaagaccaucauugcccugagcuacauacucugccuuguguucgcucagaaacugcccggcaacgacaauuccacagcaacuuuguguuuagggcaccaugccgucccuaacggaacgcugguuaagaccaucacaucugaucaaauugaggugacuaaugcgaccgaacuuguacagucaaguagcacagguagaaucugcgacuccccacacaggauucucgauggcgagaacuguacccugaucgacgcucuacugggggauccgcauugcgacggauuucagaauaaagaaugggauuuguucguggagcggucuaaggccuauucgaacuguuaccccuaugacgucccugauuacgcaucacuccgcagccugguggccaguuccggcacucuggaauuuaauaacgagucuuucaauuggacagguguugcucagaacgggaccagcuuuacgugcaaacgacguuccauaaagucauucuuuaguagacucaauugguuacaccaacugaaguauaaauacccagcacuuaacgugacuaugcccaauaacgacaaguucgauaaauuguauaucuggggaguccaucacccuagcaccgacucugaucagacaucccuguacgcccaggcuucaggcagggugacuguaagcaccaagcggagucagcaaacaguuauuccaaauaucggcucucgccccugggugagaggggucuccagcaggauuucgaucuacuggaccauagugaaaccuggagacauucuacucaucaacucuacggguaaccugauugccccacggggcuauuuuaagauccgcuccgggaagucaaguaucaugaaaagcgacgcgccgauuggaaaguguaauuccgagugcauaacucccaacggcucuaucccuaaugauaaaccauuccagaacgugaaucgaauuacauacggugcaugucccagauaugucaagcagaacacccuuaaacuggccacugggaugaggaauguuccugaaaagcagacacggggaaucuuuggcgcuauagccggcuucauugagaacgggugggaaggaaugguggacgguugguacggcuuucgucaccaaaauagcgaggggaccggacaggcagcugauuugaaaucaacgcaggccgcgaucaaccaaaucaauggcaagcucaaccgccugauugagaagaccaaugaaaaauuccaucagaucgagaaggaguucacagaaguagaagguaggauucaggacuuagagaaauauguggaggauacuaagauagaccuguggaguuacaacgccgaacuccuugucgcacuggagaaucagcacaccaucgauuugacagacuccgaaaugaacaaacuauuugagagaacucggaagcaacugcgagaaaacgcugaggauauggggaauggcugcuucaagauuuaucauaaaugugacaacgugugcaucggaagcauccgcaauggcaccuacgaucacgacguuuacagagacgaggcccucaacaauagguuucagauuaaggggguggaacugaaaucuggauauaaggauuggauacuuuggaucucauucgcuacaaguugcuuucuguugugugucgugcuccuggguuucauuaugugggccugccagaaaggcaacauccgguguaauauuugcaucuga

SEQ ID NO: 128282 - RNA, 1701 nt, Artificial Sequence; identical to SEQ ID NO: 128234
  derived and/or modified CDS sequence (opt3) from hemagglutinin__InfluenzaA__AAZ38484

SEQ ID NO: 128283 - RNA, 1701 nt, Artificial Sequence
  derived and/or modified CDS sequence (opt3) from hemagglutinin__InfluenzaA__AAZ38495
augaagaccaucauugcccugagcuacauacucugccuuguguucgcucagaaacugcccggcaacgacaauuccacagcaacuuuguguuuagggcaccaugccgucccuaacggaacgcugguuaagaccaucacaaaugaucaaauugaggugacuaacgcgaccgaacuuguacagucuucaaguacagguagaaucugcgacagcccacaccagauucucgauggcgagaauuguacccugaucgacgcucuacugggggauccgcauugcgacggauuucagaacaaagaaugggauuuguucguggagagguccaaggccuauucuaauuguuaccccuaugacgucccugauuacgcaucgcuccggucacugguggccagcaguggcacucuggaauuuaacaaugaguccuucaacuggacagguguugcucaaaaugggaccucuagcgcaugcaaacgccgauccaacaagucauuuuucagucgucucaauugguuacaccagcugaaguauaaauacccagcccuuaacgugacgaugcccaauaacgagaaguuugacaaauuguauauauggggaguccaucacccuagcacugauucugaccagaucucccuguacgcucaggccucaggcagagugaccguaagcacaaagaggagucaacagacuguuauuccaaacaucggcucucggcccugggugcgcggggucuccagcaaaauuucgaucuacuggaccauagugaagccuggagauauucuacucaucaauucuacagguaaccugauugcgccaagaggcuauuucaagaucagguccgggaaaucaaguaucaugcggagcgacgcaccgauuggaaaguguaauuccgaaugcauaacccccaacggcucuaucccuaaugacaaaccauuucagaacgugaaucgcauuacguacggugccuguccccgauaugucaagcagaacacucuuaaacuggcuacagggaugagaaauguuccugagaagcaaaccaggggaaucuucggcgccauagcaggcuuuauugaaaacgggugggagggaaugguggaugguugguacggcuuccggcaccagaauagcgaggggacuggacaggcugccgacuugaaaucaacacaagcggccaucaaccagaucaauggcaagcucaaccgucugauugaaaagaccaaugagaaauuucaucagaucgaaaaggaguucagugaaguagagggucgcauucaggauuuagagaaauauguggaagacacgaagauagaucugugguccuacaacgcagagcuccuugucgcucuggaaaaccaacacaccaucgacuugacagauagcgagaugaauaaacuauucgaaagaacuaagaagcagcugagggagaacgccgaggacauggggaauggcugcuuuaaaauuuaucauaagugugauaacgcuugcaucggaucuauccggaauggcaccuacgaccacgauguguaccgagacgaagcccucaacaaucgcuuccagauuaaagggguugagcugaagucaggauauaaagacuggauacuuuggaucaguuuugcaauuagcugcuuccuguugugugugguccuccuggguuuuaucaugugggccugccagaagggcaacauuagauguaauaucugcauauga

SEQ ID NO: 128284 - RNA, 1701 nt, Artificial Sequence
  derived and/or modified CDS sequence (opt3) from hemagglutinin__InfluenzaA__AAZ38517
augaagaccaucauugcccugagcuacauacucugccuuguguucgcucagaaacugcccggcaacgacaauuccacagcaacuuuguguuuagggcaccaugccgucccuaacggaacgaucguuaagaccauuacaaaugaucaaaucgaggugacuaacgcgaccgaacugguacagucuucaaguacagguggcauuugcgacagcccacaccagauccuagauggggagaauuguacccucauagacgcucugcuuggagauccgcagugcgacggcuuucaaaacaaaaagugggaucuguucguggaaagauccaaagccuauucuaauuguuaccccuaugacgucccugauuacgcaucguugaggucacucguggccagcagugguacucuggaguuuaacaaugaauccuucaacuggacagggguuacccagaauggaacgucuagcgcuugcaagcggcgcuccaacaauucauuuuucagucgacugaacuggcucacucauuuaaaguuuaaauauccagcacugaaugugaccaugcccaacaacgagaaguucgacaaacuuuacaucuggggcguccaccauccuggcacagauaaugaccagauuagcuuguaugcccaggcuucugggcguaucacuguguccaccaagagaucacaacagacaguaauuccaaacaucggaagcaggccccggguucgcgauauaccuaguagaauuucuaucuacuggaccauugugaaaccaggugacauccugcuaaucaauuccacgggcaaccucauugccccgaggggguacuuuaagauacggagcggaaagucgucuaucaugcgcuccgacgcgcccauuggcaaauguaauucagagugcaucacuccuaacgguaguauaccaaaugauaagcccuuccagaacgucaaucgaauuacauauggggcauguccuagauacgugaaacagaacacccugaaacuugccacuggaaugaggaaugugccagaaaagcaaacacggggcaucuuuggcgcuaucgccggguucauugagaacggaugggaagguauggucgacggcugguauggguuucgucaccagaauagcgagggaaucggccaggcagcugaucugaaguccacccaagccgcgauuaaccagauaaaugguaaauugaaccgccucaucgggaagacgaacgagaaguuccaccagauugaaaaagaguucucugaaguugagggcagaauccaggaccuggaaaaguacguggaggauaccaaaaucgacuuauggagcuauaaugccgagcugcucguagcacuugaaaaccaacauacaauugaucugacugacucagagaugaauaaguuguuugaaaggaccaaaaagcagcuacgggagaacgcugaagauaugggaaauggcugcuucaagauauaccacaaauguaacaaugccugcaucgggaguauucgaaacggaacauaugaccaugauguguaccgcgacgaggcucugaauaacagauuucagaucaagggugucgagcucaaauccggcuacaaggacuggauucuguggaucagcuucgccauaucuugcuuucuucugugugugguuuugcucggguucaucaugugggcaugccagaaaggaaauauuagguguaacaucugcauuuga

SEQ ID NO: 128285 - RNA, 1701 nt, Artificial Sequence
  derived and/or modified CDS sequence (opt3) from hemagglutinin__InfluenzaA__AAZ38539
augaagaccaucauugcccugagcuacauacucugccuuguguucgcucagaaacugcccggcaacgacaauuccacagcaacuuuguguuuagggcaccaugccgucccuaacggaacgcugguuaagaccaucacaaaugaucaaauugaggugacuaacgcgaccgaacuuguacagucuucaaguacagguagaaucugcgacagcccacaccagauucucgauggcgagaauuguacccugaucgacgcucuacugggggauccgcauugcgacggauuucagaacaaagaaugggauuuguucguggagagguccaaggccuauucuaauuguuaccccuaugacgucccugauuacgugucgcuccggucacugguugcaagcaguggcacucuggaauuuaacaaugaguccuucaacuggacagguguggcccaaaaugggaccucuagcgcuugcaaacgccgauccgacaagucauuuuucagucgucucaacugguuacaccagcugaaguauaaauacccagcacuuaaugucacgaugcccaacaaugagaaguuugauaaauuguauauauggggagugcaucacccuggcacugacagcgaucagaucucucuguacgcccaggcuuccggcagaguaaccguuucaacaaagaggagccaacagacugugauuccaaacaucgggagucggcccuggguccgcggagugucuuccaaaauuagcaucuacuggaccauagugaagccuggugacauuuuccuaaucaacucgacaggcaaucucauugccccaagaggguauuuuaagaucaggucuggaaaauccucaaucaugcggagugacgcgccgauuggcaaguguaacagcgaaugcauaacccccaaugguuccaucccuaacgauaaaccauuccagaaugucaaccgcauuacguacgggcccuguccucgauauguuaagcagaauacucugaaacuugcaacaggaaugagaaacgugccagagaagcaaaccaggggcaucuuuggcgccauagcuggguucauugaaaauggaugggaggguaugauggacggcugguacggguuucggcaccagaacucugagggaacuggccaggccgcagaucugaaaagcacacaagcugccaucaaucagaucaacgguaaguugaaucgucucauugaaaagaccaacgagaaauuccaucagaucgaaaaggaguucucagaaguagaggggcgcauucaggaccuggagaaauauguggaagauacgaagauagacuuauggaguuacaaugcggagcugcucgucgcccuugaaaaccaacacaccaucgaucugacagacuccgagaugaacaaauuguuugaaagaacuaagaagcagcuaagggagaaugcagaggauaugggcaacggaugcuucaaaauuuaucauaagugugacaaugcuugcaucggcagcauccggaacgggaccuacgaucacgacguguaccgagacgaagcccugaauaaccgcuuucagauuaaaggaguugagcucaagucugguuauaaagauuggauacuguggaucucauucgcuauuaguugcuuucuucuguguaucguguugcucggcuucauuaugugggccugccagaaggggaauaucagauguaacauaugcaucuga

SEQ ID NO: 128286 - RNA, 1701 nt, Artificial Sequence; identical to SEQ ID NO: 128234
  derived and/or modified CDS sequence (opt3) from hemagglutinin__InfluenzaA__AAZ38561

SEQ ID NO: 128287 - RNA, 1701 nt, Artificial Sequence
  derived and/or modified CDS sequence (opt3) from hemagglutinin__InfluenzaA__AAZ38583
augaagaccaucauugcccugagcuacauacucugccuuguguucgcucagaaaauccccggcaacgacaauuccacagcaacucuguguuuggggcaccaugccgucccuaacggaacgauuguuaagaccaucacaaaugaucaaauugaggugacuaacgcgaccgaauuaguacagucuucaaguacagguggcaucugcgacagcccacaccagauacuggauggggagaauuguacccuaaucgacgcucuccugggagauccgcagugcgacggcuuucaaaacaaaaagugggaucuuuucguggaaagauccaaagccuauucuaauuguuaccccuaugacgucccugauuacgcaucgcugaggucauugguggccagcagugguacucucgaguuuaacaaugaauccuucaacuggacagggguuacccagaauggaacgucuagcgcuugcaagcggcgcuccaacaauucauuuuucagucgacugaacuggcugacucaucucaaguuuaaauauccagcauuaaaugugaccaugcccaacaacgagaaguucgacaaacuguacauuuggggcguccaccauccuggcacaaauaacgaucagaucagccuuuaugcccaggcuucugggcguauuacuguguccaccaagagaucacaacagacaguaaucccaaauauaggaagcaggccccggguucgcgacauuccuaguagaaucucuauuuacuggaccaucgugaaaccaggugauaucuugcugauuaacuccacgggcaaucuaauagccccgaggggguacuuuaagauccggagcggaaagucgucuauuaugcgcuccgacgcgcccaucggcaaauguaacucagagugcauaacuccuaaugguaguauuccaaacgacaagcccuuccagaaugucaaccgaaucacauauggggcauguccuagauacgugaaacagaauacccucaagcuggccacuggaaugaggaacgugccagaaaaacaaacacggggcaucuuuggcgcuauugccggguucaucgagaauggaugggaagguauggucgauggcugguauggguuucgucaccagaacagcgagggaauuggccaggcagcugaccuuaaguccacccaagccgcgauaaaucagaucaacgguaaacugaaccgcuugauugggaagacgaaugagaaguuccaccagaucgaaaaagaguucucugaaguugagggcagaauccaggaucucgaaaaguacguggaggacaccaaaauugaucuguggagcuauaacgccgaguuacugguagcacucgaaaaucaacauacaauagaccuuacugauucagagaugaacaagcuguuugaaaggaccaaaaagcaguugcgggagaaugcugaagacaugggaaacggcugcuucaagaucuaccacaaaugugauaaugccugcauugggaguauccgaaacggaacauaugaccaugauguguaccgcgacgaggcucuaaauaacagauuucagauuaagggugucgagcugaaauccggcuacaaggacuggaucauauggaucagcuucgccauuucuugcuuucuccuguguguggcacuucugggguucaucaugugggccugccagaaaggaaauauuagguguaacaucugcauauga

SEQ ID NO: 128288 - RNA, 1701 nt, Artificial Sequence
  derived and/or modified CDS sequence (opt3) from hemagglutinin__InfluenzaA__AAZ38594
augaagaccaucauugcccugagcuacauacucugccuuguguucgcucagaaacugcccggcaacgacaauuccacagcaacuuuguguuuagggcaccaugccgucccuaacggaacgaucguuaagaccauuacaaaugaucaaaucgaggugacuaacgcgaccgaacugguacagucuucaaguacagguggcauuugcgacagcccacaccagauccuagauggggagaauuguacccucauagacgcucugcuuggagauccgcagugcgacggcuuucaaaacaaaaagugggaucuguucguggaaagauccaaagccuauucuaauuguuaccccuaugacgucccugauuacgcaucguugaggucacucguggccagcagugguacucuggaguuuaacaaugaauccuucaacuggacagggguuacccagaauggaacgucuagcgcuugcaagcggcgcuccaacucaaguuucuuuagccgacugaauuggcucacucauuuaaaguuuaaauauccagcacugaacgugaccaugcccaauaacgagaaguucgacaaacuuuacaucuggggcguccaccauccuggcacagauaacgaccagauuucuuuguaugcccaggcuuccgggcguaucacugugucaaccaagagaagccaacagacaguaauuccaaauaucggaaguaggccccggguucgcgauauaccuucuagaauuuccaucuacuggaccauugugaaaccaggugacauccugcuaaucaacagcacgggcaaucucauugccccgaggggguacuuuaagauacggucgggaaagucuuccaucaugcgcucagacgcgcccauuggcaaauguaacagugagugcaucacuccuaaugguagcauaccaaacgauaagcccuuccagaaugucaaccgaauuacauauggggcauguccuagauacgugaaacagaauacccugaaacuugccacuggaaugaggaacgugccagaaaagcaaacacggggcaucuuuggcgcuaucgccggguucauugagaauggaugggaagguauggucgacggcugguauggguuucgucaccagaacuccgagggaaucggccaggcagcugaucugaagucuacccaagccgcgauuaaucagauaaacgguaaauugaaucgccucaucgggaagacgaacgagaaguuccaccagauugaaaaagaguucagcgaaguugagggcagaauccaggaccuggaaaaguacguggaggauaccaaaaucgacuuauggucauauaacgccgagcugcucguagcacuugaaaaucaacauacaauugaucugacugacagugagaugaacaaguuguuugaaaggaccaaaaagcagcuacgggagaaugcugaagauaugggaaacggcugcuucaagauauaccacaaaugugacaaugccugcaucggguccauucgaaacggaacauaugaucaugacguguaccgcgacgaggcucugaauaacagauuucagaucaagggugucgagcucaaaagcggcuacaaggauuggauucuguggaucucuuucgccauaucaugcuuucuucuguguguggcauugcucggguucaucaugugggccugccagaaaggaaauauuagguguaacaucugcauuuga

SEQ ID NO: 128289 - RNA, 1701 nt, Artificial Sequence
  derived and/or modified CDS sequence (opt3) from hemagglutinin__InfluenzaA__AAZ38605
augaagaccaucauugcccugagcuacauacucugccuuguguucacacagaaacugcccggcaacgacaauuccacugcuacguuguguuuagggcaccaugcagucccuaacggaaccaucguuaagacaauuacuaaugaucaaaucgaggugaccaacgccacagaacugguacagucuucaaguaccgguggcauuugcgacagcccacaccagauccuagauggggagaauuguacucucauagacgcgcugcuuggagauccgcagugcgacggcuuucaaaacaaaaagugggaucuguucguggaaagauccaaggcuuauucuaauuguuaccccuaugacgucccugauuacgccucguugaggucacucguggcaagcagugguacacuggaguuuaacaaugaauccuucaacuggaccgggguuacgcagaauggaacuucuagcgccugcaagcggcgcuccaacaauucauuuuucagucgacugaacuggcucacccauuuaaaguuuaaauauccagcucugaaugugacaaugcccaacaacgagaaguucgacaaacuuuacaucuggggcguccaccauccuggcacugauaaugaccagauuagcuuguaugcacaggccucugggcguaucaccguguccacaaagagaucacaacagaccguaauuccaagcaucggaaguaggccccggauacgcgauguuccuucuagaauuuccaucuacuggacgauugugaaaccaggugacauccugcuaaucaacagcacuggcaaucucauugcuccgaggggguacuuuaagauacggucgggaaagucuuccaucaugcgcucagacgcccccauuggcaaauguaacagugagugcaucacaccuaaugguagcauaccaaacgauaagcccuuccagaaugucaaccgaauuaccuauggggcguguccuagauacgugaaacagaauacucugaaacuugcaacaggaaugaggaacgugccagaaaaacaaacccggggcaucuuuggcgccaucgcuggguucauugagaauggaugggaagguauggucgacggcugguauggguuucgucaccagaacuccgagggaacgggccaggccgcagaucugaagucuacccaagcugccaucaaucagauuaacgguaaauugaaucgccucauagggaagacaaacgagaaguuccaccagaucgaaaaagaguucagcgaaguugagggcaggauucaggaccuggaaaaguacguggaggauacuaaaaucgacuuauggucauauaacgcggagcugcucguagcccuugaaaaucaacauaccaucgaucugacagacagugagaugaacaaguuguuugaaagaacuaaaaagcagcuacgggagaaugcagaagauaugggaaacggcugcuucaagauuuaccacaaaugugacaaugcuugcauaggguccauccgaaacggaaccuaugaucaugacguguaccgcgacgaggcccugaauaacagauuucagauuaagggugucgagcucaaaagcggcuacaaggauuggauccuguggauuucuuucgcuaucucaugcuuucuucuguguguggccuugcucggguucauaaugugggcaugccagaaaggaaauaucagguguaacauuugcaucuga

SEQ ID NO: 128290 - RNA, 1698 nt, Artificial Sequence
  derived and/or modified CDS sequence (opt3) from hemagglutinin__InfluenzaA__AAZ38627
augaaggccaaacugcucgugcuucugugcaccuucacagcuacuuacgcagacacgaucuguauuggcuaucacgccaacaauagcaccgauacagucgacacuguuuuggagaagaacgugaccguaacacauuccgugaauuuacuggaagauucucacaacgggaaacuaugccuccugaagggaauagcgccccuucagcuggguaauuguucagucgcuggcuggaucuuggggaacccugagugcgaacuccugauuaguaaagagagcugguccuacaucguggaaaccccaaauccggagaacggaacuuguuaucccggcuacuuugccgacuaugaggaacugagagagcaacucucuucgguuagcucauucgaaagguuugagauuuucccuaaggguaguuccuggccaaaucauacagugaccggggucucugcaagcugcucccacaacggaaagucaaguuuuuaccggaauuuacuguggcuuacgggcaaaaacggcuuguaucccaaucugagcaugucuuacgugaacaauaaggagaaagaaguacuuguucucuggggagugcaucacccuccaaacaucggggaucagcgcgcccuguaccacacugagaacgcuuaugucuccguggugucaagccauuacagucgacguuucacccccgaaauagcaaagagaccuaaagucagggaccaggagggucggaucaauuauuacuggacacuucuggaaccaggcgauacuauuaucuuugaggccaacgggaauuugauugcuccgugguaugccuucgcgcucucucgcggauuuggcuccgguaucauaaccagcaacgcacccauggacgagugugaugccaagugccagacaccucaaggggcuauuaauucgucucugccauuccagaacguucaccccgugaccaucggagaauguccuaaguacguaagauccgccaaauuaaggauggcaacgggccugcggaauauuccaucaauccagagucgcggccucuuuggggcuaucgccggauucauugaggguggcuggacugggaugguggacggaugguauggcuaccaucaccagaacgaacaagguagcggguacgcggccgaucagaaguccacacagaaugcaauaaacggcaucaccaauaaagucaacucugugauugagaagaugaauacucaguuuacagcuguuggaaaagaguucaacaagcuagaacgaagaauggagaaucugaacaaaaagguggacgauggcuucuuggacaucuggaccuauaacgccgaacuacugguccuccuggagaaugaaaggacgcuugacuuucacgauagcaacgugaagaaucuguacgagaaaguaaagucacaauugaaaaacaaugcuaaggaaauagggaacggaugcuucgaguuuuaucauaaauguaauaacgagugcauggaaaguguuaagaaugguaccuacgacuaucccaaguacuccgaggaaagcaaacucaaccgggagaagauugauggcgugaaacuggagucuaugggggucuaucagaucuuagccaucuacucaacaguggcaaguagccugguccuacucgugucccugggagccauuucuuucuggaugugcucgaauggcagccuucagugucguaucugcauuuga

SEQ ID NO: 128291 - RNA, 1701 nt, Artificial Sequence
  derived and/or modified CDS sequence (opt3) from hemagglutinin__InfluenzaA__AAZ38638
augaagaccaucauugcccugagcuacauacucugccuuguguucgcucagaaacugcccggcaacgacaauuccacagcaacuuuguguuuagggcaccaugccgucccuaacggaacgaucguuaagaccauuacaaaugaucaaaucgaggugacuaacgcgaccgaacugguacagucuucaaguacagguggcauuugcgacagcccacaccagauccuagauggggagaauuguacccucauagacgcucugcuuggagauccgcagugcgacggcuuucaaaacaaaaagugggaucuguucguggaaagauccaaagccuauucuaauuguuaccccuaugacgucccugauuacgcaucguugaggucacucguggccagcagugguacucuggaguuuaacaaugaauccuucaacuggacagggguuacccagaauggaacgucuagcgcuugcaagcggcgcuccaacaauucauuuuucagucgacugaacuggcucacucauuuaaaguuuaaauauccagcacugaaugugaccaugcccaacaacgagaaguucgacaaacuuuacaucuggggcguccaccauccuggcacagauaaugaccagauuagcuuguaugcccaggcuucugggcguaucacuguguccaccaagagaucacaacagacaguaauuccaaacaucggaagcaggccccggguucgcgauauaccuaguagaauuucuaucuacuggaccauugugaaaccaggugacauccugcuaaucaauuccacgggcaaccucauugccccgaggggguacuuuaagauacggagcggaaagucgucuaucaugcgcuccgacgcgcccauuggcaaauguaauucagagugcaucacuccuaacgguaguauaccaaaugauaagcccuuccagaacgucaaucgaauuacauauggggcauguccuagauacgugaaacagaacacccugaaacuugccacuggaaugaggaaugugccagaaaagcaaacacggggcaucuuuggcgcuaucgccggguucauugagaacggaugggaagguauggucgacggcugguauggguuucgucaccagaauagcgagggaaucggccaggcagcugaucugaaguccacccaagccgcgauuaaccagauaaaugguaaauugaaccgccucaucgggaagacgaacgagaaguuccaccagauugaaaaagaguucucugaaguugagggcagaauccaggaccuggaaaaguacguggaggauaccaaaaucgacuuauggagcuauaaugccgagcugcucguagcacuugaaaaccaacauacaauugaucugacugacucagagaugaauaaguuguuugaaaggaccaaaaagcagcuacgggagaacgcugaagauaugggaaauggcugcuucaagauauaccacaaaugugacaacgccugcaucgggaguauucgaaauggaacauaugaucaugacguguaccgcgacgaggcucugaacaauagauuucagaucaagggugucgagcucaaauccggcuacaaggauuggauucuguggaucagcuucgccauaucuugcuuucuucuguguguggcauugcucggguucaucaugugggccugccagaaaggaaacauuagguguaauaucugcauuuga

SEQ ID NO: 128292 - RNA, 1701 nt, Artificial Sequence; identical to SEQ ID NO: 128291
  derived and/or modified CDS sequence (opt3) from hemagglutinin__InfluenzaA__AAZ38650

SEQ ID NO: 128293 - RNA, 1701 nt, Artificial Sequence
  derived and/or modified CDS sequence (opt3) from hemagglutinin__InfluenzaA__AAZ43370
augaagaccaucauugcccugagcuacauauucugccucguguuugcucagaaacuucccggcaacgacaauuccacagcaacucuguguuuggggcaccaugccgucccuaacggaacguuaguuaagaccaucacaaaugaucaaauugaggugacuaacgcgaccgaacugguacagucuucaaguacagguagaaucugcgacagcccacacaggauucuagauggcaaaaauuguacccucaucgacgcucugcuuggggauccgcauugcgacggauuccagaacgagaagugggaucuguuuauagaacgguccaaagccuucucuaauuguuaucccuacgacgugccugauuaugcaucguugcgcucacucgucgccagcaguggcacucuggaguuuaucaacgaagguuucaauuggacaggggugacccaguccggaggcucuuacgcuugcaagcgaggcagcguuaaguccuuuuucucacgucugaacuggcucuaugagagugaguacaaauauccagcauuaaaugugacgaugcccaacaaugggaaguuugacaaacuguacauuuggggaguccaccauccuagcacugaaaaggagcaaaccaaccuuuacgugagagccucugguaggguaacaguuuccacuaaacggucacagcagaccgugaucccaaauauuggcagccgccccugggucagaggguugaguucuaggaucuccauauauuggacaauugugaagccuggagauauccugcuaauuaacagcaccggcaaccucaucgcuccacgggguuacuucaagauccgcacggggaaaucgucuauuaugcgauccgacgccccgauaggaacuuguucaagugaaugcaucacacccaauggcagcauuccuaacgauaagccauuucagaaugugaacaaaaucaccuauggcgcgugucccagauacgucaagcaaaauacucugaaacuugcaacagggaugaggaacguuccugagaagcagacccggggaauauucggugccauugcuggcuuuaucgagaaugggugggaaggaaugguggacggcugguaugguuuccgucaccagaacuccgaggggacgggccaggccgcagaccugaaaucuacccaagcugccaucgaucagauuaauggaaaguugaaccgccucaucgaaaagacaaaugagaaauuccaccagauugaaaaggaguuuagcgagguagaaggcagaauacaagaccuggagaaauacguggaagauacuaagaucgacuuauggucauauaacgcggagcugcucgucgcccuugaaaaucagcauaccauugaucugacagacagugagaugaacaaauuguucgagaagacuaggaagcagcuacgggaaaaugcagaggauauggggaacggaugcuuuaaaaucuaccacaagugugacaacgcuugcaucgguuccauucgaaauggcaccuacgaucaugacguguaucgcgaugaagcccugaacaauagauuccagauaaaagggguugagcucaagagcggauacaaagacuggauccuguggauuucuuuugcuaucucaugcuuccuucuguguguggucuugcucggcuuuauuaugugggccugccaaaaggguaacaucagguguaauauaugcaucuga

SEQ ID NO: 128294 - RNA, 1701 nt, Artificial Sequence; identical to SEQ ID NO: 128166
  derived and/or modified CDS sequence (opt3) from hemagglutinin__InfluenzaA__AAZ43394

SEQ ID NO: 128295 - RNA, 1701 nt, Artificial Sequence
  derived and/or modified CDS sequence (opt3) from hemagglutinin__InfluenzaA__AAZ43405
augaagaccaucauugcccugagcuacauacucugccuuguguucgcucagaaacugcccggcaacgacaauuccacagcaacuuuguguuuagggcaccaugccgucccuaacggaacgcugguuaagaccaucacaaaugaucaaauugaggugacuaacgcgaccgaacuuguacagucuucaaguacagguagaaucugcgacagcccacaccagauucucgauggcgagaauuguacccugaucgacgcucuacugggggauccgcauugcgacggauuucagaacaaagaaugggauuuguucguggagagguccaaggccuauucuaauuguuaccccuaugacgucccugauuacgcaucgcuccggucacugguggccagcaguggcacucuggaauuuaacaaugaguccuucaacuggacagguguugcucaaaaugggaccucuagcgcaugcaaacgccgauccaacaagucauuuuucagucgucucaauugguuacaccagcugaaguauaaauacccagcccuuaacgugacgaugcccaauaacgagaaguuugacaaauuguauauauggggaguccaucacccuagcacugauucugaccagaucucccuguacgcucaggccucaggcagagugaccguaagcacaaagaggagucaacagacuguuauuccaaacaucggcucucggcccugggugcgcggggucuccagcagaauuucgaucuacuggaccauagugaaaccuggagauauucuacucaucaauuguacagguaaccugauugcgccaaggggcuauuucaagauccggucugggaaguccucaaucaugcgcagugacgcaagcauuggaaaaugcaauuccgaauguauaaccccgaacggcucuauccccaaugacaagccuuuucagaacgugaaucgaauuacguacggugccugcccaagauaugucaaacagaacacucuuaagcuggcuacagggaugaggaauguucccgagaaacaaacccggggaaucuucggcgccauagcaggcuuuauugaaaacgggugggagggaaugguggaugguugguacggcuuccgucaccagaauagcgaggggacuggacaggcugccgacuugaagucaacacaagcggccaucaaccagaucaauggcaaacucaaccgccugauugaaaagaccaaugagaaguuucaucagaucgaaaaagaguucagugaaguagaggguaggauucaggauuuagagaaguauguggaagacacgaaaauagaucugugguccuacaacgcagagcuccuugucgcucuggaaaaccaacacaccaucgacuugacagauagcgagaugaauaagcuauucgaaagaacuaaaaagcagcugcgggagaacgccgaggacauggggaauggcuguuuuaagauuuaucauaaaugcgauaacgcuugcaucggaucuauccgaaauggcaccuacgaccacgauguguaccgcgacgaagcccucaacaauagauuccagauuaaggggguugagcugaaaucaggauauaaggacuggauacuuuggaucaguuuugcaauuagcuguuuccuguugugcgugguccuccuggguuuuaucaugugggccugucagaaaggcaacauuaggugcaauaucuguauauga

SEQ ID NO: 128296 - RNA, 1701 nt, Artificial Sequence; identical to SEQ ID NO: 128095
  derived and/or modified CDS sequence (opt3) from hemagglutinin__InfluenzaA__AAZ74352

SEQ ID NO: 128297 - RNA, 1701 nt, Artificial Sequence; identical to SEQ ID NO: 128251
  derived and/or modified CDS sequence (opt3) from hemagglutinin__InfluenzaA__AAZ74363

SEQ ID NO: 128298 - RNA, 1698 nt, Artificial Sequence
  derived and/or modified CDS sequence (opt3) from hemagglutinin__InfluenzaA__AAZ74374
augaaggugaaacugcucauccuucugugcaccuucacagccacuuacgcugacacgauuuguauaggcuaucacgcaaacaauagcaccgauacagucgacacuguuuuggagaagaacgugaccguaacacauuccgugaauuuacuggaagauucucacaacgggaaacuaugccuccugaagggaaucgcgccccuucagcuggguaauuguucagucgccggcuggauuuuggggaacccugagugcgaacuccugaucaguaaagagagcugguccuacauuguggaaaccccaaauccggagaacggagcuuguuaucccggcuacuuugccgacuaugaggaacugagagagcaacucucuucgguuagcucauucgaaagguuugagaucuucccuaaggagaguuccuggccaaaucauacugugacaggugucucugcaagcugcucccacaacgggaagucaaguuuuuaccggaauuuacuguggcuuaccggcaaaaacggauuguaucccaaucugagcaagucuuacgccaacaauaaagaaaaggaggugcuaauacucuggggcguacaucacccuccaaacaucggggaucagcgcacgcuguaccacacugaaaacgcuuauguuuccguggucucaagccauuacggacgacguuucacccccgagauuacaaaaagaccuaaggugagggaccaggaaggucggaucaauuauuacuggacucuucuggagccaggcgauaccauuaucuuugaggcaaacgggaauuugauagccccgugguaugcuuucgcccucagucgcggauuuggcucugguauuaucacauccaacgcgcccauggacgaaugugaugcaaagugccagaccccucaaggggccauuaauagcucgcugccauuccagaacgugcaccccgucacgaucggagaguguccuaaauacguuagaucugcuaaguuaaggauggugacuggccugcggaauaucccauccauucagucacgcggccucuuuggggccauagcaggauucaucgaagguggcuggacagggaugguagacggaugguauggcuaccaucaccagaacgagcaagguaguggguacgcugccgaucagaaaagcacccagaaugcgauuaacggcaucacuaauaaggugaacuccgucauagaaaagaugaauacacaguuuaccgccgugggaaaagaguucaacaaacuugagcgaagaauggaaaaucugaacaagaagguugacgauggcuucuuggacguguggacguauaacgcagagcuacugguccuccuggaaaaugagaggacccuugacuuucacgauucuaacgugaaaaaucuguacgaaaagguaaaaagccaauugaagaacaaugcuaaagagauugggaacggaugcuucgaguuuuaucauaaguguaauaacgaaugcauggagucaguuaagaaugguacauacgacuaucccaaauacagugaagaguccaagcucaaccgggagaaaaucgauggcgugaagcuggacagcaugggggucuaucagaucuuagccauuuacucuacuguggcuucaagucugguccuacucgugagccugggagccaucuccuucuggaugugcucuaauggcucgcuucagugucguauuugcauauga

SEQ ID NO: 128299 - RNA, 1701 nt, Artificial Sequence
  derived and/or modified CDS sequence (opt3) from hemagglutinin__InfluenzaA__AAZ74397
augaacaccaucauugcccugagcuacauacucugccuuguguucgcucagaagcugcccggcaaugacaacuccacagcaacuuuguguuuagggcaccaugccgucccuaauggaacgcugguuaaaaccaucacaucugaucaaauugaggugacuaacgcgaccgaacuuguacagucaaguagcacagguagaaucugcgacuccccacacaggauucucgauggcgagaauuguacccugaucgacgcucuacugggggauccguugugcgacggauuucagaacaaggaaugggaucucuucguggagcggucuaaagccuauucgaauuguuaccccuaugacgucccugauuacgcaucacugcgcagccugguggccaguuccggcacucucgaauuuaacaaugagucuuucaacuggacagguguugcucagaaugggaccagcuuugcaugcaagcgacguuccauaaaaucauucuuuaguagauuaaacuggcugcaucaacuuaaguauaaguacccagccuugaaugugacgaugcccaacaaugacaaauucgauaagcuguauaucuggggaguccaccauccuggcacugacagcgaucagaccucucuauacgcucaggccuccggcagggugacaguaucaacuaaacggagccagcaaaccguuauuccaaacaucgggagucgccccugggugagaggagucucuuccaggauuagcaucuacuggacaauagugaagccuggugacauucuccugaucaacucgaccggcaaucuuauugcgccacggggguauuuuaaaauccgcucuggaaaguccucaaucaugcgaagugacgcaccgauuggcaaguguaacagcgagugcauaacgcccaaugguuccaucccuaacgggaaaccauuccagaaugugaacagaauuacuuacggagccugucccagguaugucaagcagaauacacugaaauuggcuaccggcaugcggaacguuccugaaaagcagacucguggcaucuuuggggccauagcaggauucauugagaaugguugggaaggcaugguggaugggugguacggauuucgccaccaaaacucugagggcacaggucaggcugccgaccucaaaagcacccaggcggccaucaaucaaaucaacgggaagcugaauagauuaauugagaaaacgaacgaaaaguuccaccagaucgagaaggaguucaccgaaguagaaggcaggauucaggaucuggagaaauauguggaggacacaaagauagaucucuggucauacaaugcagaacuucuggucgcuuuggagaaccagcauacuaucgaccuaaccgauagugaaaugaacaaacuguuugagcggacacgaaagcaacuccgcgaaaaugccgaggacaugggaaacggcugcuucaaaauuuaucacaagugugauaaugcuugcaucggguccaucagaaacggaacuuacgaccaugauguguacagggacgaggcccugaauaaccgguuucagauuaaggguguugaacuuaaaagcggcuauaaggacuggauacuguggaucucuuucgcaaccucaugcuuuuugcucugugugguccuguuaggguucauuaugugggccugccagaaaggaaauauccgcuguaacauuugcaucuga

SEQ ID NO: 128300 - RNA, 1701 nt, Artificial Sequence
  derived and/or modified CDS sequence (opt3) from hemagglutinin__InfluenzaA__AAZ74408
augaagaccaucauugcccugagcuacauacucugccuuguguucgcucagaaacugcccggcaacgacaauuccacagcaacuuuguguuuagggcaccaugccgucccuaacggaacgcugguuaagaccaucacaaaugaucaaauugaggugacuaacgcgaccgaacuuguacagucuucaaguacagguagaaucugcgacagcccacaccagauucucgauggcgagaauuguacccugaucgacgcucuacugggggauccgcauugcgacggauuucagaacaaagaaugggauuuguucguggagagguccaaggccuauucuaauuguuaccccuaugacgucccugauuacgcaucgcuccggucacugguggccagcaguggcacucuggaauuuaacaaugaguccuucaacuggacagguguugcucaaaaugggaccucuagcgcaugcaaacgccgauccaacaagucauuuuucagucgucucaauugguuacaccagcugaaguauaaauacccagcccuuaacgugacgaugcccaauaacgagaaguuugacaaauuguauauauggggaguccaucacccuagcacugauucugaccagaucucccuguacgcucaggccucaggcagagugaccguaagcacaaagaggagucaacagacuguuauuccaaacaucggcucucggcccugggugcgcggggucuccagcagaauuucgaucuacuggaccauagugaaaccuggagauauucuacucaucaauucuacagguaaccugauugcgccaaggggcuauuucaagauccgguccgggaagucaaguaucaugcgcagcgacgcaccgauuggaaaauguaauuccgaaugcauaacccccaacggcucuaucccuaaugacaagccauuucagaacgugaaucgaauuacguacggugccugucccagauaugucaaacagaacacucuuaagcuggcuacagggaugaggaauguuccugagaaacaaacccggggaaucuucggcgccauagcaggcuuuauugaaaacgggugggagggaaugguggaugguugguacggcuuccgucaccagaauagcgaggggacuggacaggcugccgacuugaagucaacacaagcggccaucaaccagaucaauggcaaacucaaccgccugauugaaaagaccaaugagaaguuucaucagaucgaaaaagaguucagugaaguagaggguaggauucaggauuuagagaaguauguggaagacacgaaaauagaucugugguccuacaacgcagagcuccuugucgcucuggaaaaccaacacaccaucgacuugacagauagcgagaugaauaagcuauucgaaagaacuaaaaagcagcugcgggagaacgccgaggacauggggaauggcugcuuuaagauuuaucauaaaugugauaacgcuugcaucggaucuauccgaaauggcaccuacaaccacgacguguaccgcgaugaagcccucaauaacagauuccagauuaaggggguugagcugaaaucaggauauaaggacuggauacuuuggaucaguuuugcaauuagcugcuuccuguugugugugguccuccuggguuuuaucaugugggccugccagaaaggcaauauuagguguaacaucugcauauga

SEQ ID NO: 128301 - RNA, 1701 nt, Artificial Sequence; identical to SEQ ID NO: 128234
  derived and/or modified CDS sequence (opt3) from hemagglutinin__InfluenzaA__AAZ74430

SEQ ID NO: 128302 - RNA, 1701 nt, Artificial Sequence; identical to SEQ ID NO: 128291
  derived and/or modified CDS sequence (opt3) from hemagglutinin__InfluenzaA__AAZ74441

SEQ ID NO: 128303 - RNA, 1701 nt, Artificial Sequence
  derived and/or modified CDS sequence (opt3) from hemagglutinin__InfluenzaA__AAZ74452
augaagaccaucauugcccugagcuacauacucugccuuguguucgcucagaaacugcccggcaacgacaauuccacagcaacuuuguguuuagggcaccaugccgucccuaacggaacgaucguuaagaccauuacaaaugaucaaaucgaggugacuaacgcgaccgaacugguacagucuucaaguacagguggcauuugcgacagcccacaccagauccuagauggggagaauuguacccucauagacgcucugcuuggagauccgcagugcgacggcuuucaaaacaaaaagugggaucuguucaucgaaagauccaaagccuauucuaauuguuaccccuaugacgugccugauuacgcaucguugaggucacucgucgccagcagugguacucuggaguuuaacaaugaauccuucaacuggacaggggugacccagaauggaacgucuagcgcuugcaagcggcgcuccaacaauucauuuuucagucgacugaacuggcucacucauuuaaaguuuaaauauccagcacugaauguuaccaugcccaacaacgagaaguucgacaaacuuuacauuuggggcgugcaccauccuggcacagauaaugaccagaucagcuuguaugcccaggcuucugggcguauuacugucuccaccaagagaucacaacagacagugaucccaaacauaggaagcaggccccggguacgcgauauuccuaguagaaucucuauuuacuggaccaucguuaaaccaggugacauccugcuaauuaauuccacgggcaaccucauagccccgaggggguacuuuaagauccggagcggaaagucgucuauuaugcgcuccgacgcgcccaucggcaaauguaauucagagugcauaacuccuaacgguaguauuccaaaugauaagcccuuccagaacgugaaucgaaucacauauggggcauguccuagauacgucaaacagaacacccugaaacuugccacuggaaugaggaaugugccagaaaagcaaacacggggcaucuuuggcgcuauugccggguucaucgagaacggaugggaagguaugguggacggcugguauggguuucgucaccagaauagcgagggaauuggccaggcagcugaucugaaguccacccaagccgcgauaaaccagaucaaugguaaauugaaccgccucauugggaagacgaacgagaaguuccaccagaucgaaaaagaguucucugaagucgagggcagaauccaggaccuggaaaaguacguugaggauaccaaaauugacuuauggagcuauaaugccgagcugcucguggcacuugaaaaccaacauacaauagaucugacugacucagagaugaauaaguuguuugaaaggaccaaaaagcagcuacgggagaacgcugaagauaugggaaauggcugcuucaagaucuaccacaaaugugacaacgccugcauugggaguauccgaaauggaacauaugaucaugacguauaccgcgacgaggcucugaacaauagauuucagauuaaggguguggagcucaaauccggcuacaaggauuggauccuguggaucagcuucgccauaucuugcuuucuucugugugucgcauugcucggguucauuaugugggccugccagaaaggaaacaucagguguaauauuugcaucuga

SEQ ID NO: 128304 - RNA, 1701 nt, Artificial Sequence
  derived and/or modified CDS sequence (opt3) from hemagglutinin__InfluenzaA__AAZ74463
augaagaccaucauugcccugagcuacauacucugccuuguguucgcucagaaacugcccggcaacgacaauuccacagcaacuuuguguuuagggcaccaugccgucccuaacggaacgaucguuaagaccauuacaaaugaucaaaucgaggugacuaacgcgaccgaacugguacagucuucaaguacagguggcauuugcgacagcccacaccagauccuagauggggagaauuguacccucauagacgcucugcuuggagauccgcagugcgacggcuuucaaaacaaaaagugggaucuguucguggaaagauccaaagccuauucuaauuguuaccccuaugacgucccugauuacgcaucguugaggucacucguggccagcagugguacucuggaguuuaacaaugaauccuucaacuggacagggguuacccagaauggaacgucuagcgcuugcaagcggcgcuccaacaauucauuuuucagucgacugaacuggcucacucauuuaaaguuuaaauauccagcacugaaugugaccaugcccaacaacgagaaguucgacaaacuuuacaucuggggcguccaccauccuggcacagauaaugaccagauuagcuuguaugcccaggcuucugggcguaucacuguguccaccaagagaucacaacagacaguaauuccaaacaucggaagcaggccccggguucgcgauauaccuaguagaauuucuaucuacuggaccauugugaaaccaggugacauccugcuaaucaauuccacgggcaaccucauugccccgaggggguacuuuaagauacggagcggaaagucgucuaucaugcgcuccgacgcgcccauuggcaaauguaauucagagugcaucacuccuaacgguaguauaccaaaugauaagcccuuccagaacgucaaucgaauuacauauggggcauguccuagauacgugaaacagaacacccugaaacuugccacuggaaugaggaaugugccagaaaagcaaacacggggcaucuuuggcgcuaucgccggguucauugagaacggaugggaagguauggucgacggcugguauggguuucgucaccagaauagcgagggaaucggccaggcagcugaucugaaguccacccaagccgcgauuaaccagauaaaugguaaauugaaccgccucaucgggaagacgaacgagaaguuccaccagauugaaaaagaguucucugaaguugagggcagaauccaggaccuggaaaaguacguggaggauaccaaaaucgacuuauggagcuauaaugccgagcugcucguagcacuugaaaaccaacauacaauugaucugacugacucagagaugaauaaguuguuugaaaggaccaaaaagcagcuacgggagaacgcugaagauaugggaaauggcugcuucaagauauaccacaaaugugacaacgccugcaucgggaguauucgaaauggaacauaugaucaugacguguaccgcgacgaggcucugaacaauagauuucagaucaagggugucgagcucaaauccggcuacaaggauuggauucuguggaucagcuucgccauaucuugcuuucuucugugugugguuuugcucggguucaucaugugggcaugccagaaaggaaacauuagguguaauaucugcauuuga

SEQ ID NO: 128305 - RNA, 1701 nt, Artificial Sequence
  derived and/or modified CDS sequence (opt3) from hemagglutinin__InfluenzaA__AAZ74474
augaagaccaucauugcccugagcuacauacucugccuuguguucgcucagaaacugcccggcaacgacaauuccacagcaacuuuguguuuagggcaccaugccgucccuaacggaacgaucguuaagaccauuacaaaugaucaaaucgaggugacuaacgcgaccgaacugguacagucuucaaguacagguggcauuugcgacagcccacaccagauccuagauggggagaauuguacccucauagacgcucugcuuggagauccgcagugcgacggcuuucaaaacaaaaagugggaucuguucguggaaagauccaaagccuauucuaauuguuaccccuaugacgucccugauuacgcaucguugaggucacucguggccagcagugguacucuggaguuuaacaaugaauccuucaacuggacagggguuacccagaauggaacgucuagcgcuugcaagaagcgguccaacaauucauuuuucagucgccugaacuggcucacucauuuaaaauuuaaguauccagcacugaaugugaccaugcccaacaacgagaaauucgacaaacuuuacaucuggggcguccaccauccuggcacagauaaugaccagauuagcuuguaugcccaggcuucugggcgaaucacuguguccaccaagcguucacaacagacaguaauuccaaacaucggaagcagacccaggguucgggauauaccuagucgcauuucuaucuacuggaccauugugaagccaggugacauccugcuaaucaauuccacgggcaaccucauugccccgagaggguacuuuaagauaaggagcggaaaaucgucuaucaugcgguccgacgcgcccauuggcaaguguaauucagagugcaucacuccuaacgguaguauaccaaaugauaaacccuuccagaacgucaaucgcauuacauauggggcauguccucgauacgugaagcagaacacccugaaacuugccacuggaaugagaaaugugccagaaaagcaaacaaggggcaucuuuggcgcuaucgccggguucauugagaacggaugggaagguauggucgacggcugguauggguuucggcaccagaauagcgagggaaucggccaggcagcugaucugaaauccacccaagccgcgauuaaccagauaaaugguaaguugaaccgucucaucgggaagacgaacgagaaauuccaccagauugaaaaggaguucucugaaguugagggccgcauccaggaccuggaaaaauacguggaggauaccaagaucgacuuauggagcuauaaugccgagcugcucguagcacuugaaaaccaacauacaauugaucugacugacucagagaugaauaaauuguuugaaagaaccaagaagcagcuaagggagaacgcugaagauaugggaaauggcugcuucaaaauauaccacaagugugacaacgccugcaucgggaguauucggaauggaacauaugaucaugacguguaccgagacgaggcucugaacaaucgcuuucagaucaaaggugucgagcucaaguccggcuacaaagauuggauucuguggaucagcuucgccauaucuugcuuucuucuguguguggcauugcucggguucaucaugugggccugccagaagggaaacauuagauguaauaucugcauuuga

SEQ ID NO: 128306 - RNA, 1701 nt, Artificial Sequence; identical to SEQ ID NO: 128303
  derived and/or modified CDS sequence (opt3) from hemagglutinin__InfluenzaA__AAZ74485

SEQ ID NO: 128307 - RNA, 1701 nt, Artificial Sequence; identical to SEQ ID NO: 128304
  derived and/or modified CDS sequence (opt3) from hemagglutinin__InfluenzaA__AAZ74496

SEQ ID NO: 128308 - RNA, 1701 nt, Artificial Sequence; identical to SEQ ID NO: 128303
  derived and/or modified CDS sequence (opt3) from hemagglutinin__InfluenzaA__AAZ74507

SEQ ID NO: 128309 - RNA, 1701 nt, Artificial Sequence; identical to SEQ ID NO: 128304
  derived and/or modified CDS sequence (opt3) from hemagglutinin__InfluenzaA__AAZ74518

SEQ ID NO: 128310 - RNA, 1701 nt, Artificial Sequence; identical to SEQ ID NO: 128303
  derived and/or modified CDS sequence (opt3) from hemagglutinin__InfluenzaA__AAZ74529

SEQ ID NO: 128311 - RNA, 1701 nt, Artificial Sequence
  derived and/or modified CDS sequence (opt3) from hemagglutinin__InfluenzaA__AAZ74551
augaagaccaucauugcccugagcuacauacucugccuuguguucgcucagaaacugcccggcaacgacaauuccacagcaacuuuguguuuagggcaccaugccgucccuaacggaacgaucguuaagaccauuacaaaugaucaaaucgaggugacuaacgcgaccgaacugguacagucuucaaguacagguggcauuugcgacagcccacaccagauccuagauggggagaauuguacccucauagacgcucugcuuggagauccgcagugcgacggcuuucaaaacaaaaagugggaucuguucguggaaagauccaaagccuauucuaauuguuaccccuaugacgucccugauuacgcaucguugaggucacucguggccagcagugguacucuggaguuuaacaaugaauccuucaacuggacagggguuacccagaauggaacgucuagcgcuugcaagcggcgcuccaacaauucauuuuucagucgacugaacuggcucacucauuuaaaguuuaaauauccagcacugaaugugaccaugcccaacaacgagaaguucgacaaacuuuacaucuggggcguccaccauccuggcacagauaaugaccagauuagcuuguaugcccaggcuucugggcguaucacuguguccaccaagagaucacaacagacaguaauuccaaacaucggaagcaggccccggguucgcgauauaccuaguagaauuucuaucuacuggaccauugugaaaccaggugacauccugcuaaucaauuccacgggcaaccucauugccccgaggggguacuuuaagauacggagcggaaagucgucuaucaugcgcuccgacgcgcccauuggcaaauguaauucagagugcaucacuccuaacgguaguauaccaaaugauaagcccuuccagaacgucaaucgaauuacauauggggcauguccuagauacgugaaacagaacacccugaaacuugccacuggaaugaggaaugugccagaaaagcaaacacggggcaucuuuggcgcuaucgccggguucauugagaacggaugggaagguauggucgacggcugguauggguuucgucaccagaauagcgagggaaucggccaggcagcugaucugaaguccacccaagccgcgauuaaccagauaaaugguaaauugaaccgccucaucgggaagacgaacgagaaguuccaccagauugaaaaagaguucucugaaguugagggcagaauccaggaccuggaaaaguacguggaggauaccaaaaucgacuuauggagcuauaaugccgagcugcucguagcacuugaaaaccaacauacacuggauuugacugacucagagaugaauaagcuauuugaaaggaccaaaaagcagcugcgggagaacgcugaagauaugggaaauggcugcuucaagauuuaccacaaaugugacaacgccugcauagggaguauccgaaauggaacauaugaucaugacguguaccgcgacgaggcucucaacaauagauuucagauuaagggugucgagcugaaauccggcuacaaggauuggauccuuuggauuagcuucgccaucucuugcuuucuguuguguguggcacuccugggguucauaaugugggccugccagaaaggaaacaucagguguaauauuugcaucuga

SEQ ID NO: 128312 - RNA, 1701 nt, Artificial Sequence; identical to SEQ ID NO: 128234
  derived and/or modified CDS sequence (opt3) from hemagglutinin__InfluenzaA__AAZ74562

SEQ ID NO: 128313 - RNA, 1701 nt, Artificial Sequence
  derived and/or modified CDS sequence (opt3) from hemagglutinin__InfluenzaA__AAZ74573
augaagaccaucauugcccugagcuacauacucugccuuguguucgcucagaaacugcccggcaacgacaauuccacagcaacuuuguguuuagggcaccaugccgucccuaacggaacgaucguuaagaccauuacaaaugaucaaaucgaggugacuaacgcgaccgaacugguacagucuucaaguacagguggcauuugcgacagcccacaccagauccuagauggggagaauuguacccucauagacgcucugcuuggagauccgcagugcgacggcuuucaaaacaaaaagugggaucuguucaucgaaagauccaaagccuauucuaauuguuaccccuaugacgugccugauuacgcaucguugaggucacucgucgccagcagugguacucuggaguuuaacaaugaauccuucaacuggacaggggugacccagaauggaacgucuagcgcuugcaagcggcgcuccaacaauucauuuuucagucgacugaacuggcucacucauuuaaaguuuaaauauccagcacugaauguuaccaugcccaacaacgagaaguucgacaaacuuuacauuuggggcgugcaccauccuggcacagggaaugaucagaucagcuuguaugcccaggcuucuggacguauuacugucuccaccaagagaucacaacagacagugaucccaaacauagguagcaggccccggguacgcgacauuccuaguagaaucucuauuuacuggaccaucguuaaaccaggcgauauccugcuaauuaauuccacggggaaccucauagccccgaggggauacuuuaagauccggagcggcaagucgucuauuaugcgcuccgacgcgcccaucgguaaauguaauucagagugcauaacuccuaacgggaguauuccaaaugacaagcccuuccagaacgugaaucgaaucacauauggagcauguccuagauacgucaaacagaacacccugaaacuugccacuggcaugaggaaugugccagaaaagcaaacacggggcaucuuuggggcuauugccggauucaucgagaacgguugggaaggcaugguggaugggugguauggauuucgucaccagaauagcgagggcauuggucaggcagcugaccugaaguccacccaagccgcgauaaaccagaucaaugggaaauugaaccgccucauuggcaagacgaacgagaaguuccaccagaucgaaaaagaguucucugaagucgagggaagaauccaggaucuggaaaaguacguugaggacaccaaaauugauuuauggagcuauaaugccgagcugcucguggcacuugaaaaccaacauacaauagaccugacugauucagagaugaauaaguuguuugaaaggaccaaaaagcagcuacgggagaacgcugaagacaugggcaaugggugcuucaagaucuaccacaaaugugauaacgccugcauuggaaguauccgaaaugguacauaugaccaugauguauaccgcgacgaggcucugaacaauagauuucagauuaagggcguggagcucaaauccggguacaaggacuggauccuguggaucagcuucgccauaucuugcuuucuucugugugucgcauugcucggauucauuaugugggccugccagaaaggcaacaucagguguaauauuugcaucuga

SEQ ID NO: 128314 - RNA, 1701 nt, Artificial Sequence
  derived and/or modified CDS sequence (opt3) from hemagglutinin__InfluenzaA__AAZ74584
augaagaccaucauugcccugagcuacauacucugccuuguguucgcucagaaacugcccggcaacgacaauuccacagcaacuuuguguuuagggcaccaugccgucccuaacggaacgcugguuaagaccaucgcgaaugaucaaauugaggugacaaacgcuacugagcuaguacagucuucaaguaccgguagaaucugcgacagcccacaccagauucucgauggcgaaaauuguacacugaucgacgcccuucugggggauccgcauugcgacggauuucagaacaaagaaugggauuuguucguggagagguccaaggcauauucuaauuguuaccccuaugacgucccugauuacgccucgcuccggucacugguggcuagcaguggcacccuggaauuuaacaaugaguccuucaacuggacugguguugcacaaaaugggacaucuagcgccugcaaacgccgauccaacaagucauuuuucagucgucucaauugguuacaccagcugaaguauaaauacccagcucagaacgugaccaugcccaauaacgagaaguuugacaaacuuuauauauggggaguccaucacccuagcacggauucugaccagaucuccuuguacgcccaagcgucaggcagagugacuguaagcaccaagaggagucagcagacaguuauuccaaacaucggcucucggcccugggugcgcggggucuccagcagaauuucgaucuacuggacuauagugaaaccuggagauauucugcuaaucaauucuaccgguaaccucauugcaccaaggggcuauuucaagauccgguccgggaagucaaguaucaugcgcagcgacgccccgauuggaaaauguaauuccgaaugcauaacacccaacggcucuaucccuaaugacaagccauuucagaacgugaaucgaauuaccuacggugcuugucccagauaugucaaacaaaacacgcugaaacuugccacugggaugaggaauguuccugagaaacagacacggggaaucuucggcgcaauagcuggcuuuauugaaaacgggugggagggaaugguggaugguugguacggcuuccgucaccagaauagcgaggggaccggacaagccgcggaccugaagucaacucaggccgcaaucaaccagaucaauggcaaauugaaccgccucauugaaaagacaaaugagaaguuucaucagaucgaaaaagaguucagugaaguagaggguaggauucaagaucuggagaaguauguggaagacaccaaaauagauuuaugguccuacaacgcugagcugcucgucgcccuugaaaaccagcacacgaucgaccugaccgauagcgagaugaauaaguuguucgaaagaacaaagaagcagcuacgggagaacgcugaggacauggggaauggcugcuuuaagauuuaucauaaaugugauaacgccugcaucggaucuauccgaaauggcacuuacgaccacgauguguaccgcgacgaagcacugaacaauagauuccagauuaaggggguugagcucaaaucaggauauaaggacuggauacuguggaucaguuuugccauuagcugcuuccuucuguguguggcuuugcucgguuuuaucaugugggcgugccaaaaaggcaacauuagguguaauaucugcauauga

SEQ ID NO: 128315 - RNA, 1701 nt, Artificial Sequence; identical to SEQ ID NO: 128291
  derived and/or modified CDS sequence (opt3) from hemagglutinin__InfluenzaA__AAZ74595

SEQ ID NO: 128316 - RNA, 1701 nt, Artificial Sequence
  derived and/or modified CDS sequence (opt3) from hemagglutinin__InfluenzaA__AAZ74617
augaagaccaucauugcccugagcuacauacucugccuuguguucgcucagaaacugcccgucaacgacaauuccacagcaacuuuguguuuaggccaccaugccguuccuaacgggacgcuggugaagaccaucacaaaugaucacauugagguaacuaacgcgaccgaacuugugcaaucuucaaguacaggaagaaucugcgacagcccacaucagauucucgauggugagaauuguacccugaucgacgcucuacugggcgauccgcacugcgacggguuucagaacaaagaaugggauuuguucgucgagagguccacugccuauucuaauuguuaccccuaugacgugccugauuacgcaucgcuccggucacugguugccagcaguggaacacuggaauuuaacaaugaguccuucaacuggaccggcguggcucagaaugguacgucuagcgcaugcaagcgccgauccauaaaaucauuuuucagucgucucaacugguuacaucaacugaaguauaaguacccagcccuuaaugucacuaugcccaacaaugagaaauuugacaaguuguauaucuggggagugcaccacccuagcaccgauucugaccagauuucccuguacgcucaggccucagggagaguaacaguuagcacuaaaaggagucagcaaaccgugaucccaaacauuggcucucggcccuggguccgcggcguguccagcaagaucucgauauacuggacaauugugaaaccuggggauauccuacucauuaacucuaccggaaaucugaucgcgccaagagguuauuucaagaucagguccggcaagucaaguauuaugcggagcaacgcaccgauagggaaauguaauuccgaaugcaucacgcccaacggaucuauuccuaaugacaagccauuucagaacgucaaucgcaucacuuacggcgccuguccccgauauguuaaacagaacacacuuaagcuggcuaccgguaugagaaaugugccugagaaacagacuagggggauauucggagccauugcaggcuuuaucgaaaacggcugggaggggaugguagacggaugguacgguuuccggcaucaaaauagcgagggcacagggcaggcugccgauuugaagucaacccaggcggccaucaaccaaauuaauggaaaacucaaccgucugaucgaaaagacgaaugagaaguuucaccagauugaaaaagaguucagugaaguggagggccgcauacaggacuuagagaaguaugucgaagauaccaaaaucgaccugugguccuacaacgcagagcuccuuguggcucuggaaaaccagcauacaauugauuugacugacagcgagaugaauaagcuauucgaaagaaccaggaaacaacugcgggagaacgccgaggauauggguaaugggugcuuuaagaucuaucacaagugugacaacgcuugcaucggcucuauucgaaauggaacauacgaucacgacguuuaccgcgaugaagcccucaacaauagauuccagauaaaaggcguggagcugaagucaggguauaaagacuggauccuuuggauuaguuuugcaaucagcugcuuccuguugugugucgugcuccugggauuuauuaugugggccugccagaaggguaacaucagguguaauauaugcaucuga

SEQ ID NO: 128317 - RNA, 1701 nt, Artificial Sequence; identical to SEQ ID NO: 128095
  derived and/or modified CDS sequence (opt3) from hemagglutinin__InfluenzaA__AAZ79505

SEQ ID NO: 128318 - RNA, 1701 nt, Artificial Sequence
  derived and/or modified CDS sequence (opt3) from hemagglutinin__InfluenzaA__AAZ79516
augaagaccaucauugcccugagcuacauacucugccuuguguucgcucagaaacugcccggcaacgacaauuccacagcaacuuuguguuuagggcaccaugccgucccuaacggaacgcugguuaagaccaucacaaaugaucaaauugaggugacuaacgcgaccgaacuuguacagucuucaaguacagguagaaucugcgacagcccacaccagauucucgauggcgagaauuguacccugaucgacgcucuacugggggauccgcauugcgacggauuucagaacaaagaaugggauuuguucguggagagguccaaggccuauucuaauuguuaccccuaugacgucccugauuacgcaucgcuccggucacugguggccagcaguggcacucuggaauuuaacaaugaguccuucaacuggacagguguugcucaaaaugggaccucuagcgcaugcaaacgccgauccaacaagucauuuuucagucgucucaauugguuacaccagcugaaguauaaauacccagcccuuaacgugacgaugcccaauaacgagaaguuugacaaauuguauauauggggaguccaucacccuagcacugauucugaccagaucucccuguacgcucaggccucaggcagagugaccguaagcacaaagaggagucaacagacuguuauuccaaacaucggcucucggcccugggugcgcggggucuccagcagaauuucgaucuacuggaccauagugaaaccuggagauauucuacucaucaauucuacagguaaccugauugcgccaaggggcuauuucaagauccgguccgggaagucaaguaucaugcgcagcgacgcaccgauuggaaaauguaauuccgaaugcauaacccccaacggcucuaucccuaaugacaagccauuucagaacgugaaucgaauuacguacggugccugucccagauaugucaaacagaacacucuuaagcuggcuacagggaugaggaauguuccugagaaacaaacccggggaaucuucggcgccauagcaggcuuuauugaaaacgggugggagggaaugguggaugguugguacggcuuccgucaccagaauagcgaggggacuggacaggcugccgacuugaagucaacacaagcggccaucaaccagaucaauggcaaacucaaccgccugauugaaaagaccaaugagaaguuucaucagaucgaaaaagaguucagugaaguagaggguaggauucaggauuuagagaaguauguggaagacacgaaaauagaucugugguccuacaacgcagagcuccuugucgcucuggaaaaccaacacaccaucgacuugacagauagcgagaugaauaagcuauucgaaagaacuaaaaagcagcugcgggagaacgccgaggacauggggaauggcugccucaagauuuaucauaaaugugauaacgcuugcaucggaucuauccgaaauggcaccuacgaccacgauguguaccgcgacgaagcccugaacaauagauuucagauuaaggggguugagcuuaaaucaggauauaaggacuggauacuguggaucaguuucgcaauuagcugcuuuuugcucugugugguccuguuagguuucaucaugugggccugccagaaaggcaacauuagguguaauaucugcauauga

SEQ ID NO: 128319 - RNA, 1701 nt, Artificial Sequence
  derived and/or modified CDS sequence (opt3) from hemagglutinin__InfluenzaA__AAZ79527
augaagaccaucauugcccugagcuacauacucugccuuguguucgcucagaaacugcccggcaacgacaauuccacagcaacuuuguguuuagggcaccaugccgucccuaacggaacgaucguuaagaccauuacaaaugaucaaaucgaggugacuaacgcgaccgaacugguacagucuucaaguacagguggcauuugcgacagcccacaccagauccuagauggggagaauuguacccucauagacgcucugcuuggagauccgcagugcgacggcuuucaaaacaaaaagugggaucuguucguggaaagauccaaagccuauucuaauuguuaccccuaugacgucccugauuacgcaucguugaggucacucguggccagcagugguacucuggaguuuaacaaugaauccuucgacuggacagggguuacccagaacggaacgucuagcgcuugcaagcggcgcuccaauaagucauuuuucagucgacugaacuggcucacucauuuaaaauauaaguacccagcacugaaugugaccaugcccaacaaugagaaauuugauaagcuguauaucuggggcguccaccauccuggcacagacagcgaucagauuucuuuguacgcccaggcuuccgggcguaucacugugucaaccaaaagaagccaacagacaguaauuccaaacaucggaaguaggccccggguucgcgacgugucuuccagaauaagcauuuacuggaccaucgucaagccuggugacauucugcuaaucaacucgacgggcaaucucaucgccccaaggggguauuucaagauucggucuggaaaauccucaauaaugcgcagugaugcgccgaucggcaaguguaacagcgagugcauuacucccaaugguuccaucccuaacgacaaaccauuucagaaugugaaccgaauaacauacggggcaugucccagauaugugaagcagaauacccugaaacuugccacuggaaugaggaacgucccugaacggcaaacacguggcauuuucggcgcuaucgccggguuuaucgagaauggaugggaagguaugguugauggcugguacggguuccgccaccagaacucugagggaaccggccaggcagcugaccuuaagagcacgcaagccgcgauuaaucagaucaacgguaaauugaauagacucauugggaagaccaacgagaaguuucaccagauagaaaaagaguucucagaaguggagggcaggauccaggaucuggaacgguauguagaggacacaaagauugauuuauggaguuacaaugccgagcugcucguggcacuugaaaaccaacauacuaucgaccugaccgauuccgagaugaacaaauuguucgaacgaacaaagaaacagcuacgcgagaaugcugaagacaugggaaacggcugcuuuaagaucuaucacaagugugauaaugccugcauugggagcauaagaaacggaacuuacgaccaugacgucuacagggaugaggcucugaauaaccgguuccagaucaaagguguggagcucaagucuggcuauaaagacuggauucuguggaucucauuugccauuaguugcuuccuucuguguguugcauugcucggguuuaucaugugggccugccagaagggaaauauacgcuguaacaucugcauuuga

SEQ ID NO: 128320 - RNA, 1698 nt, Artificial Sequence
  derived and/or modified CDS sequence (opt3) from hemagglutinin__InfluenzaA__AAZ79549
augaaggugaaacugcucauccuucugugcaccuucacagccacuuacgcugacacgauuuguauaggcuaucacgcaaacaauagcaccgauacagucgacacuguuuuggagaagaacgugaccguaacacauuccgugaauuuacuggaagauucucacaacgggaaacuaugccuccugaagggaaucgcgccccuucagcuggguaauuguucagucgccggcuggauuuuggggaacccugagugcgaacuccugaucaguaaagagagcugguccuacauuguggaaaccccaaauccggagaacggagcuuguuaucccggcuacuuugccgacuaugaggaacugagagagcaacucucuucgguuucaucuuucgaaagguuugagaucuucccuaaggagaguuccuggccaaaucauacugugacaggugucucugcaagcugcucccacaacgggaagucaaguuuuuaccggaauuuacuguggcuuaccggcaaaaacggauuguaucccaaucugagcaagucuuacgccaacaauaaagaaaaggaggugcuaauacucuggggcguacaucacccuccaaacaucgggaaccagcgcacgcuguaccacacugaaaaugcuuauguuuccguggucucaagccauuacagucgacguuucacccccgagauuacaaaaagaccuaaggugagggaucaggaaggacggaucaacuauuacuggacucuucuggagccaggugacaccauuaucuuugaggcaaauggcaacuugauagccccgugguaugcuuucgcccucucucgcggguuuggauccggcauuaucacaagcaaugcgcccauggaugaaugugacgcaaagugccagaccccucaaggugccauuaacucgucucugccauuccagaaugugcaccccgucacgaucggggaguguccuaaauacguuagauccgcuaaguuaaggauggugacuggacugcggaacaucccaucaauucagagucgcggccucuuuggcgccauagcaggguucaucgaaggagguuggacaggcaugguagaugggugguauggauaccaucaccagaaugagcaaggcagcgguuacgcugccgaccagaaauccacccagaacgcgauuaaugggaucacuaacaaggugaauagcgucauagaaaagaugaacacacaguuuaccgccgugggcaaagaguucaauaaacuugagcgaagaauggaaaaccugaacaagaagguugaugacggauucuuggauauuuggacguauaaugcagagcuacuggugcuccuggaaaacgagaggacccuugacuuucacgacagcaaugucaaaaaccuguacgaaaaggugaaaucacaauugaagaauaacgcuaaagagaucggcaaugggugcuucgaguuuuaucauaaguguaacaaugaaugcauggagaguguaaagaacggaacauacgauuaucccaaauacuccgaagagagcaagcucaaucgggagaaaaucgacgguguuaagcuggauucuaugggcguguaucagauuuuagccaucuacucaacugucgcuaguagccuggugcuacucgucucccugggggccauuucuuucuggaugugcucgaacggaagccuucagugucguauaugcaucuga

SEQ ID NO: 128321 - RNA, 1701 nt, Artificial Sequence
  derived and/or modified CDS sequence (opt3) from hemagglutinin__InfluenzaA__AAZ79560
augaagaccaucauugcccugagcuacauacucugccuuguguucgcucagaaacugcccggcaacgacaauuccacagcaacuuuguguuuagggcaccaugccgucccuaacggaacgcugguuaagaccaucacaaaugaucaaauugaggugacuaacgcgaccgaacuuguacagucuucaaguacagguagaaucugcgacagcccacaccagauucucgauggcgagaauuguacccugaucgacgcucuacugggggauccgcauugcgacggauuucagaacaaagaaugggauuuguucguggagagguccaaggccuauucuaauuguuaccccuaugacgucccugauuacgcaucgcucaaaucacugguggccagcaguggcacucuggaauuuaacaaugaguccuucaacuggacagguguugcucaaaaugggaccucuagcgcaugcaagcggcgcuccaacaagucauuuuucagucgacucaauugguuacaccagcugaaauauaaguacccagcccuuaacgugacgaugcccaauaacgagaaauuugacaaguuguauauauggggaguccaucacccuagcacugauucugaccagaucucccuguacgcucaggccucaggccgugugaccguaagcacaaaaagaagucaacagacuguuauuccaaacaucggcucuaggcccugggugcgcggggucuccagccggauuucgaucuacuggaccauagugaagccuggagauauucuacucaucaauucuacagguaaccugauugcgccaagaggcuauuucaagaucagguccgggaaaucaaguaucaugcggagcaaugcaccgauuggaaaguguaacuccgaaugcauaacccccaauggcucuaucccuaacgacaaaccauuucagaaugugaaccgcauuacguacggugccuguccccgauaugucaagcagaauacucuuaaacuggcuacagggaugagaaacguuccugagaagcaaaccaggggaaucuucggcgccauagcaggcuuuauugaaaaugggugggagggaaugguggacgguugguacggcuuccggcaccagaacagcgaggggacuggacaggcugccgauuugaaaucaacacaagcggccaucaaucagaucaacggcaagcucaaucgucugauugaaaagaccaacgagaaauuucaucagaucgaaaaggaguucagugaaguagagggucgcauucaggacuuagagaaauauguggaagauacgaagauagaccugugguccuacaacgcagagcuccuugucgcucuggaaaaucaacacaccaucgauuugacagacagcgagaugaacaaacuauucgaaagaacuaagaagcagcugagggagaaugccgaggauauggggaacggcugcuuuaaaauuuaucauaagugugacaaugcuugcaucggaucuauccggaacggcaccuacgaucacgacguguaccgagaugaagcccucaauaaccgcuuccagauuaaagggguugagcugaagucaggauauaaagacuggauacuuuggaucaguuuugcaauuagcugcuuccuguugugugugguccuccuggguuuuaucaugugggccugccagaagggcaauauuagauguaacaucugcauauga

SEQ ID NO: 128322 - RNA, 1701 nt, Artificial Sequence
  derived and/or modified CDS sequence (opt3) from hemagglutinin__InfluenzaA__AAZ79571
augaagaccaucauugcccugagcuacauacucugccuuguguucgcucagaaacugcccggcaacgacaauuccacagcaacuuuguguuuagggcaccaugccgucccuaacggaacgcugguuaagaccaucacaaaugaucaaauugaggugacuaacgcgaccgaacuuguacagucuucaaguacagguagaaucugcgacagcccacaccagauucucgauggcgagaauuguacccugaucgacgcucuacugggggauccgaggugcgacggauuucagaacaaagaaugggauuuguucguggagcgguccaaggccuauucuaauuguuaccccuaugacgucccugauuacgcaucgcuccgcucacugguggccagcaguggcacucuggaauuuaacaaugaguccuucaacuggacagguguugcucaaaaugggaccucuagcgcaugcaaacgacguuccaacaagucauuuuucaguagacucaauugguuacaucagcugaaguauaaauacccagcccuuaacgugacgaugcccaauaacgagaaguuugacaaauuguauauauggggaguccaccauccuagcacugauucugaccagaucucccuguacgcucaggccucaggcagggugaccguaagcacaaagcggagucaacagacuguuauuccaaacaucggcucucgccccugggugagaggggucuccagcaggauuucgaucuacuggaccauagugaaaccuggagauauucuacucaucaauucuacagguaaccugauugcgccacggggcuauuucaagauccgcuccgggaagucaaguaucaugcgaagcgacgcaccgauuggaaaauguaauuccgaaugcauaacccccaacggcucuaucccuaaugacaagccauuucagaacgugaauagaauuacguacggugccugucccagguaugucaaacagaacacucuuaagcuggcuacagggaugcggaauguuccugagaaacaaacccguggaaucuucggcgccauagcaggcuuuauugaaaacgggugggagggaaugguggaugguugguacggcuuccgccaccagaauagcgaggggacuggacaggcugccgacuugaagucaacacaagcggccaucaaccagaucaauggcaaacucaacagacugauugaaaagaccaaugagaaguuucaccagaucgaaaaagaguucagugaaguagaggguaggauucaggauuuagagaaguauguggaagacacgaaaauagaucugugguccuacaacgcagagcuccuugucgcucuggaaaaccaacauaccaucgacuugacagauagcgagaugaauaagcuauucgaacggacuaaaaagcagcugcgagagaacgccgaggacauggggaauggcugcuuuaagauuuaucacaaaugugauaacgcuugcaucggaucuauccgcaauggcaccuacgaccaugauguguacagagacgaagcccucaacaauagguuccagauuaaggggguugagcugaaaucaggauauaaggacuggauacuuuggaucaguuuugcaauuagcugcuuccuguugugugugguccuccuggguuuuaucaugugggccugccagaaaggcaacauucgguguaauaucugcauauga

SEQ ID NO: 128323 - RNA, 1701 nt, Artificial Sequence
  derived and/or modified CDS sequence (opt3) from hemagglutinin__InfluenzaA__AAZ79582
augaagaccaucauugcccugagcuacauacucugccuuguguucgcucagaaacugcccggcaacgacaauuccacagcaacuuuguguuuagggcaccaugccgucccuaacggaacgcugguuaagaccaucacaaaugaucaaauugaggugacuaacgcgaccgaacuuguacagucuucaaguacagguagaaucugcgacagcccacaccagauucucgauggcgagaauuguacccugaucgacgcucuacugggggauccgcauugcgacggauuucagaacaaagaaugggauuuguucguggagagguccaaggccuauucuaauuguuaccccuaugacgucccugauuacgcaucgcuccggucacugguggccagcaguggcacucuggaauuuaacaaugaguccuucaacuggacagguguugcucaaaaugggaccucuagcgcaugcaaacgccgauccaacaagucauuuuucagucgucucaauugguuacaccagcugaaguauaaauacccagcccuuaacgugacgaugcccaauaacgagaaguuugacaaauuguauauauggggaguccaucacccuagcacugauucugaccagaucucccuguacgcucaggccucaggcagagugaccguaagcacaaagaggagucaacagacuguuauuccaaacaucggcucugggcccugggugcggggagucuccagccgcauuucgaucuacuggaccauagugaaaccuggugauauucuacucaucaauucuacaggcaaccugauugcgccaagaggguauuucaagaucagguccggaaagucaaguaucaugcggagcgacgcaccgauuggcaaauguaauuccgaaugcauaacccccaacgguucuaucccuaaugacaagccauuucagaacgugaaucgcauuacguacggggccuguccccgauaugucaaacagaacacucuuaagcuggcuacaggaaugagaaauguuccugagaaacaaaccaggggcaucuucggcgccauagcaggguuuauugaaaacggaugggaggguaugguggauggcugguacggguuccggcaccagaauagcgagggaacuggccaggcugccgacuugaagucaacacaagcggccaucaaccagaucaaugguaaacucaaccgucugauugaaaagaccaaugagaaguuucaucagaucgaaaaagaguucagugaaguagaggggcgcauucaggauuuagagaaguauguggaagacacgaaaauagaucugugguccuacaacgcagagcuccuugucgcucuggaaaaccaacacaccaucgacuugacagauagcgagaugaauaagcuauucgaaagaacuaaaaagcagcugagggagaacgccgaggacaugggcaauggaugcuuuaagauuuaucauaaaugugauaacgcuugcaucggcucuauccggaaugggaccuacgaccacgauguguaccgagacgaagcccucaacaaucgcuuccagauuaagggaguugagcugaaaucagguuauaaggacuggauacuuuggaucaguuuugcaauuagcugcuuccuguugugugugguccuccugggcuuuaucaugugggccugccagaaagggaacauuagauguaauaucugcauauga

SEQ ID NO: 128324 - RNA, 1698 nt, Artificial Sequence
  derived and/or modified CDS sequence (opt3) from hemagglutinin__InfluenzaA__AAZ79604
augaaggccaaacugcucgugcuucugugcaccuucacagcuacuuacgcagacacgaucuguauuggcuaucacgccaacaauagcaccgauacagucgacacuguuuuggagaagaacgugaccguaacacauuccgugaauuuacuggaagauucucacaacgggaaacuaugccuccugaagggaauagcgccccuucagcuggguaauuguucagucgcuggcuggaucuuggggaacccugagugcgaacuccugauuaguaaagagagcugguccuacaucguggaaaccccaaauccggagaacggaacuuguuaucccggcuacuuugccgacuaugaggaacugagagagcaacucucuucgguuagcucauucgaaagguuugagauuuucccuaaggguaguuccuggccaaaucauacagugaccggggucucugcaagcugcucccacaacggaaagucaaguuuuuaccggaauuuacuguggcuuacgggcaaaaacggcuuguaucccaaucugagcaugucuuacgugaacaauaaggagaaagaaguacuuguucucuggggagugcaucacccuccaaacaucggggaucagcgcgcccuguaccacacugagaacgcuuaugucuccguggugucaagccauuacagucgacguuucacccccgaaauagcaaagagaccuaaagucagggaccaggagggucggaucaauuauuacuggacacuucuggaaccaggcgauacuauuaucuuugaggccaacgggaauuugauugcuccgugguaugccuucgcgcucucucgcggauuuggcuccgguaucauaaccagcaacgcacccauggacgagugugaugccaagugccagacaccucaaggggcuauuaauucgucucugccauuccagaacguucaccccgugaccaucggagaauguccuaaguacguaagauccgccaaauuaaggauggugacgggccugcggaauauuccaucaauccagagucgcggccucuuuggggcaaucgcuggauucauugaggguggcuggacugggauggucgacggaugguauggcuaccaucaccagaacgaacaagguagcggguacgccgcggaucagaaguccacacagaaugccauaaaccgaaucaccaauaaagugaacucuguuauugagaagaugaauacucaguuuacagcagugggcaaagaguucaacaagcuagaaagaaggauggagaaucugaacaaaaaggucgacgauggauucuuggacaucuggaccuauaacgcugaacuacuggugcuccuggagaaugaacggacgcuugacuuucacgauagcaacguaaagaaucuguacgagaaaguuaagucacaauugaaaaacaaugccaaggaaauaggcaacgggugcuucgaguuuuaucauaaauguaauaacgagugcauggaaagugugaagaauggaaccuacgacuaucccaaguacuccgaggaaagcaaacucaaccgugagaagauugauggugucaaacuggagucuaugggcguguaucagaucuuagcuaucuacucaacagucgccaguagccuggugcuacucguuucccugggggcaauuucuuucuggaugugcucgaauggaagccuucagugucgcaucugcauuuga

SEQ ID NO: 128325 - RNA, 1701 nt, Artificial Sequence
  derived and/or modified CDS sequence (opt3) from hemagglutinin__InfluenzaA__AAZ79615
augaagaccaucauugcccugagcuacauacucugccuuguguucgcucagaaaauccccggcaacgacaauuccacagcaacucugugugucgggcaccaugccguuccuaacggaacgauugugaagaccaucacaaaugaucaaauugagguaacuaacgcgaccgaauuggugcagucuucaaguacagguggcaucugcgacagcccacaccagauauuagauggggagaauuguacccugaucgacgcucuacucggagauccgcagugcgacggcuuucaaaacaaaaagugggaucuguucgucgaaagauccaaagccuauucuaauuguuaccccuaugacgugccugauuacgcaucgcuuaggucacugguugccagcagugguacuuuggaguuuaacaaugaauccuucaacuggacaggggugacccagaauggaacgucuagcgcuugcaagcggcgcuccaacaauucauuuuucagucgacucaacuggcugacucaucugaaguuuaaauauccagcacucaaugucaccaugcccaacaacgagaaguucgacaaauuauacauuuggggcgugcaccauccuggcacagauaaugaccagaucagccuguaugcccaggcuucugggcguauuacuguauccaccaagagaucacaacagacaguuaucccaaacauaggaagcaggccccgggugcgcgauauuccuaguagaaucucuauuuacuggaccaucgucaaaccaggugacauccuuuugauuaauuccacgggcaaccugauagccccgaggggguacuuuaagauccggagcggaaagucgucuauuaugcgcuccgacgcgcccaucggcaaauguaauucagagugcauaacuccuaacgguaguauuccaaaugauaagcccuuccagaacgugaaucgaaucacauauggggcauguccuagauacgugaaacagaacacccuaaagcucgccacuggaaugaggaaugucccagaaaaacaaacacggggcaucuuuggcgcuauugccggguucaucgagaacggaugggaagguaugguugacggcugguauggguuucgucaccagaauagcgagggaauuggccaggcagcugaucugaaguccacccaagccgcgauaaaccagaucaaugguaaacuuaaccgccugauugggaagacgaacgagaaguuccaccagaucgaaaaagaguucucugaaguggagggcagaauccaggacuuggaaaaguacguagaggauaccaaaauugaccucuggagcuauaaugccgagcuguuaguggcacuggaaaaccaacauacaauagaucucacugacucagagaugaauaaacuuuuugaaaggaccaagaagcagcugcgggagaacgcugaagauaugggaaauggcugcuucaagaucuaccacaaaugugacaacgccugcauugggaguauccgaaauggaacauaugaucaugacgucuaccgcgacgaggcuuugaacaauagauuucagauuaaggguguggagcuaaaauccggcuacaaggauuggauccuguggaucagcuucgccauaucuugcuuucuccuguguguugugcuucugggguucauuaugugggcaugccagaaaggaaacaucagguguaauauuugcaucuga

SEQ ID NO: 128326 - RNA, 1701 nt, Artificial Sequence
  derived and/or modified CDS sequence (opt3) from hemagglutinin__InfluenzaA__AAZ79627
augaagaccaucauugcccugagcuacauacucugccuuguguucgcucagaaacugcccggcaacgacaauuccacagcaacuuuguguuuagggcaccaugccgucccuaacggaacgaucguuaagaccauuacaaaugaucaaaucgaggugacuaacgcgaccgaacugguacagucuucaaguacagguggcauuugcgacagcccacaccagauccuagauggggagaauuguacccucauagacgcucugcuuggagauccgcagugcgacggcuuucaaaacaaaaagugggaucuguucguggaaagauccaaagccuauucuaauuguuaccccuaugacgucccugauuacgcaucguugaggucacucguggccagcagugguacucuggaguuuaacaaugaauccuucaacuggacagggguuacccagaauggaacgucuagcgcuugcaagcggcgcuccaacucauccuuuuucagccgacugaauuggcucacucauuuaaaguuuaaauauccagcacugaaggugaccaugcccaacaaugagaaauucgacaaacuuuacaucuggggcguccaccauccuggcacagauaacgaccagauuucuuuguaugcccaggcuuccgggcguaucacugugucaaccaagagaagccaacagacaguaauuccaaacaucggaaguaggccccggguucgcgauauaccuucuagaauuuccaucuacuggaccauugugaagccaggugacauccugcuaaucaauagcacgggcaaccucauugccccgaggggguacuuuaagauacggucgggaaaaucuuccaucaugcgcucagacgcgcccauuggcaaguguaauagugagugcaucacuccuaacgguagcauaccaaaugauaaacccuuccagaacgucaaucgaauuacauauggggcauguccuagauacgugaagcagaacacccugaaacuugccacuggaaugaggaaugugccagaaaagcaaacacggggcaucuuuggcgcuaucgccggguucauugagaacggaugggaagguauggucgacggcugguauggguuucgucaccagaauagugagggaaucggccaggcagcugaucugaaaucuacccaagccgcgauuaaccagauaaaugguaaguugaaccgccucaucgggaagacgaaugagaaauuccaccagauugaaaaggaguucagcgaaguugagggcagaauccaggaccuggaaaaauacguggaggauaccaagaucgacuuauggucauauaacgccgagcugcucguagcacuugaaaaccaacauacaauugaucugacugacagugagaugaauaaauuguuugaaaggaccaagaagcagcuacgggagaacgcugaagauaugggaaauggcugcuucaaaauauaccacaagugugacaacgccugcaucggguccauucgaaauggaacauaugaucaugacguguaccgcgacgaggcucugaacaauagauuucagaucaaaggugucgagcucaagagcggcuacaaagauuggauucuguggaucucuuucgccauaucaugcuuucuucuguguguggcauugcucggguucaucaugugggccugccagaagggaaacauuagguguaauaucugcauuuga

SEQ ID NO: 128327 - RNA, 1701 nt, Artificial Sequence; identical to SEQ ID NO: 128304
  derived and/or modified CDS sequence (opt3) from hemagglutinin__InfluenzaA__AAZ79941

SEQ ID NO: 128328 - RNA, 1701 nt, Artificial Sequence; identical to SEQ ID NO: 128303
  derived and/or modified CDS sequence (opt3) from hemagglutinin__InfluenzaA__AAZ79944

SEQ ID NO: 128329 - RNA, 1701 nt, Artificial Sequence
  derived and/or modified CDS sequence (opt3) from hemagglutinin__InfluenzaA__AAZ79963
augaagaccaucauugcccugagcuacauacucugccuuguguucgcucagaaacugcccggcaacgacaauuccacagcaacuuuguguuuagggcaccaugccgucccuaacggaacgaucguuaagaccauuacaaaugaucaaaucgaggugacuaacgcgaccgaacugguacagucuucaaguacagguggcauuugcgacagcccacaccagauccuagauggggagaauuguacccucauagacgcucugcuuggagauccgcagugcgacggcuuucaaaacaaaaagugggaucuguucguggaaagauccaaagccuauucuaauuguuaccccuaugacgucccugauuacgcaucguugaggucacucguggccagcagugguacucuggaguuuaacaaugaauccuucaacuggacagggguuacccagaauggaacgucuagcgcuugcaagcggcgcuccaacaauucauuuuucagucgacugaacuggcucacucauuuaaaguuuaaauauccagcacugaaugugaccaugcccaacaacgagaaguucgacaaacuuuacaucuggggcguccaccauccuggcacagauaaugaccagauuagcuuguaugcccaggcuucugggcguaucacuguguccaccaagagaucacaacagacaguaauuccaagcaucggaaguaggccccggauacgcgauguuccuucuagaauuuccaucuacuggaccauugugaaaccaggugacauccugcuaaucaacagcacgggcaaucucauugccccgaggggguacuuuaagauacggucgggaaagucuuccaucaugcgcucagacgcgcccauuggcaaauguaacagugagugcaucacuccuaaugguagcauaccaaacgauaagcccuuccagaaugucaaccgaauuacauauggggcauguccuagauacgugaaacagaauacccugaaacuugccacuggaaugaggaacgugccagaaaaacaaacacggggcaucuuuggcgcuaucgccggguucauugagaauggaugggaagguauggucgacggcugguauggguuucgucaccagaacuccgagggaaccggccaggcagcugaucugaagucuacgcaagccgcgaucaaucagauuaacgguaaauugaaucgccucauagggaagaccaacgagaaguuccaccagaucgaaaaagaguucagcgaaguugagggcaggauucaggaccuggaaaaguacguggaggauacaaaaaucgacuuauggucauauaacgccgagcugcucguagcacuugaaaaucaacauacuaucgaucugaccgacagugagaugaacaaguuguuugaaagaacaaagaagcagcuacgggagaaugcugaagauaugggaaacggcugcuucaagauuuaccacaaaugugacaaugccugcauaggguccauccgaaacggaacuuaugaucaugacguguaccgcgacgaggcucugaauaacagauuucagauuaagggugucgagcucaaaagcggcuacaaggauuggauccuguggauuucuuucgccaucucaugcuuucuucuguguguggcauugcucggguucauaaugugggccugccagaaaggaaauaucagguguaacauuugcaucuga

SEQ ID NO: 128330 - RNA, 1701 nt, Artificial Sequence
  derived and/or modified CDS sequence (opt3) from hemagglutinin__InfluenzaA__AAZ79974
augaagaccaucauugcccugagcuacauacucugccuuguguucgcucagaaacugcccggcaacgacaauuccacagcaacuuuguguuuagggcaccaugccgucccuaacggaacgaucguuaagaccauuacaaaugaucaaaucgaggugacuaacgcgaccgaacugguacagucuucaaguacagguggcauuugcgacagcccacaccagauccuagauggggagaauuguacccucauagacgcucugcuuggagauccgcagugcgacggcuuucaaaacaaaaagugggaucuguucguggaaagauccaaagccuauucuaauuguuaccccuaugacgucccugauuacgcaucguugaggucacucguggccagcagugguacucuggaguuuaacaaugaauccuucaacuggacagggguuacccagaauggaacgucuagcgcuugcaagcggcgcuccaacaauucauuuuucagucgacugaacuggcucacucauuuaaaguuuaaauauccagcacugaaugugaccaugcccaacaacgagaaguucgacaaacuuuacaucuggggcguccaccauccuggcacaaauaacgaucagauuagcuuguaugcccaggcuucugggcguaucacuguguccaccaagagaucacaacagacaguaauuccaaauaucggaagcaggccccggguucgcgacauaccuaguagaauuucuaucuacuggaccauugugaaaccaggugauauccugcuaaucaacuccacgggcaaucucauugccccgaggggguacuuuaagauacggagcggaaagucgucuaucaugcgcuccgacgcgcccauuggcaaauguaacucagagugcaucacuccuaaugguaguauaccaaacgacaagcccuuccagaaugucaaccgaauuacauauggggcauguccuagauacgugaaacagaauacccugaaacuugccacuggaaugaggaacgugccagaaaagcaaacacggggcaucuuuggcgcuaucgccggguucauugagaauggaugggaagguauggucgauggcugguauggguuucgucaccagaacagcgagggaaucggccaggcagcugaccugaaguccacccaagccgcgauuaaucagauaaacgguaaauugaaccgccucaucgggaagacgaaugagaaguuccaccagauugaaaaagaguucucugaaguugagggcagaauccaggaucuggaaaaguacguggaggacaccaaaaucgauuuauggagcuauaacgccgagcugcucguagcacuugaaaaucaacauacaauugaccugacugauucagagaugaacaaguuguuugaaaggaccaaaaagcagcuacgggagaaugcugaagacaugggaaacggcugcuucaagauauaccacaaaugugauaaugccugcaucgggaguauucgaaacggaacauaugaccaugauguguaccgcgacgaggcucugaauaacagauuucagaucaagggugucgagcucaaauccggcuacaaggacuggauucuguggaucagcuucgccauaucuugcuuucuucuguguguggcauugcucggguucaucaugugggccugccagaaaggaaauauuagguguaacaucugcauuuga

SEQ ID NO: 128331 - RNA, 1701 nt, Artificial Sequence; identical to SEQ ID NO: 128303
  derived and/or modified CDS sequence (opt3) from hemagglutinin__InfluenzaA__AAZ79996

SEQ ID NO: 128332 - RNA, 1701 nt, Artificial Sequence
  derived and/or modified CDS sequence (opt3) from hemagglutinin__InfluenzaA__AAZ80007
augaagaccaucauugcccugagccacauauucugccucgugcuuggccaguaccugcccgggaacgacaauuccacagcuacuuuguguuuaggacaucacgcagucccuaacgguacgcugguuaaaaccaucacaaaugaucaaauugaggugacuaacgccaccgaauugguacagucuucaaguacaggcaagaucugcaauaacccacauaggauucucgacgggaucgauuguacccugauagacgcgcuucugggagauccgcacugcgacggcuuucagaaugagacuugggauuuguucguggaaagaagcaaggcuuuuuccaacuguuaucccuacgacgucccugauuaugccucucuccggucgcugguggcaucaagcgguacacuggaguucaucaccgaaggguuuacguggacuggaguuacccagaauggcggcaguaacgccugcaagcgcgggccaggauccgguuucuuuucucgacucaauugguuaacaaaaagcgaguccacuuaccccgugcugaacgucaccaugccuaauaacgacaauuucgauaaacuuuauauuuggggcgugcaucacccaucaacaaaccaagagcagaccaguuuguacguacaggcuagcgggcguguuacggugucuacuagaaggucccagcaaacaaucauucccaacaucggaucacggccuuggguccgcggccugagcaguagaauaucuauuuauuggaccaucgugaagccaggugacgugcuagucauuaauuccaacgggaaucucaucgcaccgaggggauacuuuaaaaugcggacuggcaagagcucgaucaugcgcucugaugcccccauugacacauguauauccgaaugcaucaccccuaacggcucaauuccaaaugacaaacccuuccagaacguuaauaagaucacguacggggcuuguccuaaauaugugaagcagaacacccugaaacuugccacaggaaugcgaaauguaccagagaaacagacuagaggucuguuuggcgcgauagcaggguucauugaaaacggaugggagggcaugaucgaugguugguacggguuuaggcaccaaaauagugagggcaccggacaggccgcugaccuaaagagcacacaggccgcaaucgaucaaauuaacggcaaacucaaucgggugaucgaaaagacuaacgagaaauuccaucagauugaaaaggaguucuccgaagucgaggggcguauacaggaccuggagaaauauguggaagauaccaagaucgacuuauggucuuacaaugcugagcugcucguugcccuugaaaaccagcacacaauugaucugaccgacagcgagaugaacaaguuguuugaaaagacucgcagacaacuaagggagaaugcggaggauaugggaaacgguugcuucaagaucuaucauaaaugugacaaugccugcaucgaaucaauucggaacggcacguacgaucacgacguguaucgagacgaggcacugaauaaccgcuuucagauaaagggggucgaacucaaaaguggauacaaggauuggauccuguggauuuccuucgcuaucagcugcuuucuucugugugugguauugcucggcuucauuaugugggccugccagagagguaauaucagguguaacauaugcaucuga

SEQ ID NO: 128333 - RNA, 1701 nt, Artificial Sequence; identical to SEQ ID NO: 128304
  derived and/or modified CDS sequence (opt3) from hemagglutinin__InfluenzaA__AAZ80017

SEQ ID NO: 128334 - RNA, 1701 nt, Artificial Sequence
  derived and/or modified CDS sequence (opt3) from hemagglutinin__InfluenzaA__AAZ80030
augaagaccaucauugcccugagcuacauacucugccuuguguucgcucaggagcugcccggcaacgacaauuccacagcaacuuuguguuuagggcaccaugccgucccuaacggaacgaucguuaaaaccauuacaaaugaucaaaucgaagugacuaacgcgaccgagcugguacagucuucaaguacagguggcauuugcgacagcccacaccagauccuagauggggaaaauuguacccucauagacgcucugcuuggagauccgcagugcgacggcuuucaaaacaagaaaugggaucuguucguggagagauccaaggccuauucuaauuguuaccccuaugacgucccugauuacgcaucguugaggucacucguggccagcagugguacucuggaauuuaacaaugaguccuucaacuggacagggguuacccagaauggaacgucuagcgcuugcaaacggcgcuccaacaauucauuuuucagucgacugaacuggcucacucauuuaaaguuuaaguauccagcacugaaugugaccaugcccaacaacgagaaauucgacaaacuuuacaucuggggcguccaccauccuggcacagauaaugaccagacuagcuuguaugcccaggcuucugggcguauuaccguguccacaaagagaucacaacagaccguaaucccaaacauuggaagcaggccccggguucgcgauaucccuaguagaauaucuauuuacuggacgaucgugaagccaggugacauucugcuaaucaauuccacuggcaaccucaucgccccgaggggguacuuuaaaauucggagcggaaagucgucuauaaugcgcuccgacgcgcccaucggcaaguguaauucagaaugcauuacaccuaacgguaguaucccaaaugauaaacccuuccagaacgucaaucgaauaaccuauggggcauguccuagauacgugaagcagaacacucugaaacuugccacaggaaugaggaaugugccagagaagcaaacccggggcauuuuuggcgcuaucgccggguucaucgaaaacggaugggaggguauggucgacggcugguauggguuucgucaccagaauagcgagggaauuggccaggcagcugaucugaaauccacgcaagccgcgaucaaccagauuaaugguaaguugaaccgccucauagggaaaaccaacgaaaaguuccaccagaucgagaaggaguucucugaaguugaaggcaggauucaggaccuggagaaauacguggaggauacaaagaucgacuuauggagcuauaaugccgaacugcucguagcacuugagaaccaacauacuaucgaucugaccgacucagaaaugaauaaauuguuugagagaacaaagaaacagcuacgggaaaacgcugaggauaugggaaauggcugcuucaagauuuaccacaagugugacaacgccugcauagggaguauccgaaauggaacuuaugaucaugacguguaccgcgacgaggcucugaacaauagauuucagauuaaaggugucgaacucaaguccggcuacaaagauuggauccuguggauuagcuucgccaucucuugcuuucuucuguguguggcauugcucggguucauaaugugggccugccagaagggaaacaucagguguaauauuugcaucuga

SEQ ID NO: 128335 - RNA, 1701 nt, Artificial Sequence
  derived and/or modified CDS sequence (opt3) from hemagglutinin__InfluenzaA__AAZ83242
augaagaccaucauugcccugagcuacauacucugccuuguguucgcucagaaacugcccggcaacgacaauuccacagcaacuuuguguuuagggcaccaugccgucccuaacggaacgaucguuaagaccauuacaaaugaucaaaucgaggugacuaacgcgaccgaacugguacagucuucaaguacaggugagauuugcgacagcccacaccagauccuagauggcgaaaauuguacccucauagacgcucugcuuggggauccgcagugcgacggauuucaaaacaaaaagugggaucuguucguggagagaaauaaagccuauuccaacuguuaccccuaugacgucccugauuacgcaucuuugaggucgcucguggccucaagcggcacucuggaauuuaauaacgagaguuucaauuggacagguguuacccagaacgggacguccucugcuugcaagcggcgcagcaauaaguccuuuuucucacgacugaacuggcucacucauuuaaaauauaaguacccagcacugaaugugaccaugcccaacaacgagaaauuugacaaacuuuauaucuggggaguccaccauccuggcacagauagugaccagauuaauuuguacgcccaggcuagcggccguaucacugugucuaccaagagaucccaacagacaguaauuccaaacaucggguacaggccccggguucgcgaugugccuucaagaauaagcauuuauuggaccaucgucaagccaggagacauucugcuaaucaauaguacggguaaccucaucgccccgaggggcuacuucaagauucggucugggaaauccagcauaaugcgcucggacgcgcccaucggaaaguguaauucugaaugcauuacuccuaacggcuccaucccaaaugauaaacccuuucagaacgugaaucgaauaacauauggugcauguccuagauacgugaagcagaacacccugaaacuugccacugggaugaggaaugucccagagaagcaaacacggggaauuuucggcgcuaucgccggcuuuaucgaaaacgggugggagggaaugguugacgguugguauggcuuccgucaccaaaauucagaggggaccggacaggcagcugaucugaaaaguacgcaggccgcgauuaaccagaucaauggcaaguugaaccgccucauugguaagaccaacgaaaaauuucaccagauagagaaggaguucagcgaaguggaagggagaauccaggaccuggagaaauacguagaggauacaaagauugacuuaugguccuauaaugccgaacugcucguggcacuugagaaccaacauacuaucgaucugaccgacucugaaaugaauaaauuguucgagaggacaaagaagcagcuacgggaaaacgcugaggauaugggcaauggaugcuuuaaaaucuaccacaagugugacaacgccugcauuggcagcauacgaaaugggacuuacgaucaugacgucuaucgcgacgaggcucugaacaauagauuccagaucaaaggaguggaacucaagucagguuacaaagauuggauucuguggaucaguuuugccauuuccugcuuccuucuguguguugcauugcucggcuuuaucaugugggccugccagaaggggaacauaagguguaauaucugcauuuga

SEQ ID NO: 128336 - RNA, 1701 nt, Artificial Sequence
  derived and/or modified CDS sequence (opt3) from hemagglutinin__InfluenzaA__AAZ83266
augaagaccaucauugcccugagcuacauacucugccuuguguucgcucagaaacugcccggcaacgacaauuccacagcaacuuuguguuuagggcaccaugccgucccuaacggaacgcugguuaagaccaucacaaaugaucaaauugaggugacuaacgcgaaugaacuuguacagucuucaaguaccgguagaaucugcgacagcccacaccagauucucgauggcgagaacuguacacugaucgacgcucuacugggggauccgaggugcgacggauuucagaauaaagaaugggauuuguucguggagcgguccaaggccuauucuaacuguuaccccuaugacgucccugauuacgcaucgcuccgcucacugguggccagcaguggcacccuggaauuuaauaacgaguccuucaauuggacugguguugcucaaaacgggacaucuagcgcaugcaaacgacguuccaauaagucauuuuucaguagacucaacugguuacaucagcugaaguauaaauacccagcccuuaaugugaccaugcccaacaacgagaaguuugacaaauuguauauauggggaguccaccauccuagcacggauucugaccagaucucccuguacgcucaggccucaggcagggugacuguaagcaccaagcggagucaacagacaguuauuccaaauaucggcucucgccccugggugagaggggucuccagcaggauuucgaucuacuggacuauagugaaaccuggagauauucuacucaucaacucuaccgguaaucugauugcgccacggggcuauuucaagauccgcuccgggaagucaaguaucaugcgaagcgacgcaccgauuggaaaauguaacuccgaaugcauaacacccaauggcucuaucccuaacgacaagccauuucagaaugugaacagaauuaccuacggugccugucccagguaugucaaacagaauacgcuuaagcuggcuacugggaugcggaacguuccugagaaacaaacacguggaaucuucggcgccauagcaggcuuuauugaaaaugggugggagggaaugguggaugguugguacggcuuccgccaccagaacagcgaggggaccggacaggcugccgacuugaagucaacucaagcggccaucaaucagaucaacggcaaacucaauagacugauugaaaagacaaacgagaaguuucaccagaucgaaaaagaguucagugaaguagaggguaggauucaggauuuagagaaguauguggaagacaccaaaauagaucugugguccuacaacgcagagcuccuugucgcucuggaaaaucaacauacgaucgacuugaccgauagcgagaugaacaagcuauucgaacggacuaaaaagcagcugcgagagaaugccgaggacauggggaacggcugcuuuaagauuuaucacaaaugugauaaugcuugcaucggaucuauccgcaacggcacauacgaccaugauguguacagagacgaagcccucaauaacagguuccagauuaaggggguugagcugaaaucaggauauaaggacuggauacuuuggaucaguuuugcaauuagcugcuuccuguugugugugguccuccuggguuuuaucaugugggccugccagaaaggcaauauucgguguaacaucugcauauga

SEQ ID NO: 128337 - RNA, 1701 nt, Artificial Sequence; identical to SEQ ID NO: 128234
  derived and/or modified CDS sequence (opt3) from hemagglutinin__InfluenzaA__AAZ83277

SEQ ID NO: 128338 - RNA, 1701 nt, Artificial Sequence; identical to SEQ ID NO: 128120
  derived and/or modified CDS sequence (opt3) from hemagglutinin__InfluenzaA__AAZ83288

SEQ ID NO: 128339 - RNA, 1701 nt, Artificial Sequence
  derived and/or modified CDS sequence (opt3) from hemagglutinin__InfluenzaA__AAZ83312
augaagaccaucauugcccugagcuacauacucugccuuguguucgcucagaaacugcccggcaacgacaauuccacagcaacuuuguguuuagggcaccaugccgucccuaacggaacgcugguuaagaccaucacaaaugaucaaauugaggugacuaacgcgaccgaacuuguacagucuucaaguacagguagaaucugcgacagcccacaccagauucucgauggcgagaauuguacccugaucgacgcucuacugggggauccgcauugcgacggauuucagaacaaagaaugggauuuguucguggagagguccaaggccuauucuaauuguuaccccuaugacgucccugauuacgcaucgcuccggucacugguggccagcaguggcacucuggaauuuaacaaugaguccuucaacuggacagguguugcucaaaaugggaccucuagcgcaugcaaacgccgauccauaaagucauuuuucagucgucucaacugguuacaccagcugaaguauaaauacccagcccuuaaugugacgaugcccaacaaugacaaguuugauaaauuguauaucuggggaguccaucacccuagcacugacucugaucagaccucccuguacgcucaggccucaggcagagugacaguaagcacuaagaggagucaacagaccguuauuccaaacaucggcucucggcccugggugcgcggggucuccagcagaauuucgaucuacuggacaauagugaaaccuggagacauucuacucaucaacucuaccgguaaucugauugcgccaaggggcuauuucaagauccgguccgggaagucaaguaucauucgcagcgacgcaccgauaggaaaauguaacuccgagugcaucacgcccaauggcucuauuccuaacgauaagccauuucagaaugugaaccgaaucacuuacggugccugucccagauaugucaaacagaauacacuuaagcuggcuaccgggaugaggaacguuccugaaaaacaaacucggggaauauucggcgccauugcaggcuuuaucgagaaugggugggaaggaaugguggacgguugguacggcuuccgucaccagaacagcgaggggacaggacaggcugccgauuugaagucaacccaagcggccaucaaucagauuaacggcaaacucaaucgccugaucgagaagacgaacgaaaaguuucaucagauugagaaagaguucagugaaguagaagguagaauacaggacuuagagaaguauguggaggauaccaaaaucgaccugugguccuacaaugcagaacuccuugucgcucuggagaaccaacacacaauugauuugacugacagcgaaaugaacaagcuauucgagaggacccggaaacagcugcgagaaaaugccgaggauauggggaacggcugcuuuaagaucuaucauaagugugacaaugcuugcaucggaucuauucgcaacggcacauacgaucacgacguguacagagacgaggcccucaauaacagguuccagauaaaagggguugaacugaagucaggauauaaagauuggauccuuuggauuaguuuugcaaucagcugcuuccuguugugugugguccuccuggguuuuauuaugugggccugccagaagggcaauauccgguguaacauaugcaucuga

SEQ ID NO: 128340 - RNA, 1701 nt, Artificial Sequence
  derived and/or modified CDS sequence (opt3) from hemagglutinin__InfluenzaA__AAZ83323
augaagaccaucauugcccugagcuacauacucugccuuguguucgcucagaaacugcccggcaacgacaauuccacagcaacuuuguguuuagggcaccaugccgucccuaacggaacgcugguuaagaccaucacaaaugaucaaauugaggugacuaacgcgaccgaacuuguacagucuucaaguacagguagaaucugcgacagcccacacaggauucucgauggcgagaauuguacccugaucgacgcucuacugggggauccgcauugcgacggauuucagaacaaagaaugggauuuguucguggagcgguccaaggccuauucuaauuguuaccccuaugacguccaggauuacgcaucgcuccgcucacugguggccagcaguggcacucuggaauuuaacaaugaguccuucaacuggacagguguugcucaaaaugggaccucuuaugcaugcaaacgacguagcauaaaguccuuuuucucaagacucaacugguuacaccagcugaaguacaaauauccugcccuuaaugugacgaugccaaacaaugacaaguuugauaaauuguacaucuggggaguccaucaccccaguacugacagcgaucagaccucucuguacgcucaggccuccggcagggugacaguaucaacuaagcggagccaacagaccguuauuaguaacaucggcucucgcccuugggugagaggggucuccagcaggauuucgaucuauuggacaauagugaaaccaggagacauucuacucaucaccucuacggguaaccugauugcgccccggggcuacuucaagauccgcuccgggaagucaaguaucaugcgaagcgacgcaccuauuggaaaauguaauuccgagugcauaacuccaaacggcucuaucccgaaugauaagcccuuucagaacgugaauagaauuacauauggugccuguccuagguacgucaaacagaacacccuuaagcuggcuacugggaugcggaauguuccagaaaaacaaacacguggaaucuucggcgccauagcaggcuuuauugagaacgggugggaaggaaugguggacgguugguauggcuuccgccaccagaauagcgaggggaccggacaggcugccgauuugaagucaacgcaagcggccaucaaccagaucaauggcaaacucaacagacugauugagaagaccaaugaaaaguuucaucagaucgagaaagaguucagugaaguagaagguaggauucaggacuuagagaaguacguggaggauacaaaaauagaccugugguccuauaacgcagaacuccuugucgcucuggagaaucaacacacuaucgauuugaccgacagcgaaaugaacaagcuauucgagcggacacgaaaacagcugcgcgaaaacgccgaggauauggggaauggcugcuuuaagauuuaccauaagugugacaacgcuugcaucggaucuaucagaaauggcacuuacgaucacgacguguauagggacgaggcccucaacaaucgguuccagauuaaagggguugaacugaagucaggauacaaagauuggauacuuuggaucaguuuugcaauuagcugcuuccuguugugugugguccuccuggguuuuaucaugugggccugccagaagggcaacauucgcuguaauaucugcauauga

SEQ ID NO: 128341 - RNA, 1701 nt, Artificial Sequence; identical to SEQ ID NO: 128330
  derived and/or modified CDS sequence (opt3) from hemagglutinin__InfluenzaA__AAZ83371

SEQ ID NO: 128342 - RNA, 1701 nt, Artificial Sequence; identical to SEQ ID NO: 128303
  derived and/or modified CDS sequence (opt3) from hemagglutinin__InfluenzaA__AAZ83688

SEQ ID NO: 128343 - RNA, 1698 nt, Artificial Sequence
  derived and/or modified CDS sequence (opt3) from hemagglutinin__InfluenzaA__ABA06510
augaaggugaaacugcucauccuucugugcaccuucacagccacuuacgcugacacgauuuguauaggcuaucacgcaaacaauagcaccgauacagucgacacuguuuuggagaagaacgugaccguaacacauuccgugaauuuacuggaagauucucacaacgggaaacuaugccuccugaagggaaucgcgccccuucagcuggguaauuguucagucgccggcuggauuuuggggaacccugagugcgaacuccugaucgcuaaagagaguuggagcuacauuguggaaaccccaaauccggagaacggagccuguuaucccggcuacuuugcagacuaugaggaacugagagagcaacucuccucuguuucgucauucgaaagguuugagaucuucccuaaggagagcaguuggccaaaucauacugugacaggugucuccgccucuugcagccacaacgggaaguccucauuuuaccggaauuuacuguggcuuaccggcaaaaacggauuguaucccaaucugaguaagagcuacgcuaacaauaaagaaaaggaggugcuaauacucuggggcguacaucacccuccaaacaucggggaucagcgcacgcuguaccacacugaaaacgcauauguuucuguggucuccucacauuacagccgacguuucacccccgagauuacaaaaagaccuaaggugagggaccaggaaggacggaucaauuauuacuggacucuucuggagccaggugauaccauuaucuuugaggccaacggcaauuugauagcuccgugguaugccuucgcgcucagucgcggguuuggaucuggcauuaucacauccaacgcacccauggacgaaugugaugccaagugccagaccccucaaggugcuauuaauagcucgcugccauuccagaacgugcaccccgucacgaucggggaguguccuaaauacguuagaucugccaaguuaaggauggugacuggacugcggaauaucccauccauucagucacgcggccucuuuggcgcaauagcuggguucaucgaaggagguuggacaggcaugguagacgggugguauggauaccaucaccagaacgagcaaggcagugguuacgccgcggaucagaaaagcacccagaaugccauuaacgggaucacuaauaaggugaacuccgucauagaaaagaugaauacacaguuuaccgcagugggcaaagaguucaacaaacuugagcgaagaauggaaaaucugaacaagaagguugacgauggauucuuggacauuuggacguauaacgcugagcuacuggugcuccuggaaaaugagaggacccuugacuuucacgauucuaacgucaaaaaucuguacgaaaaggugaaaagccaauugaagaacaaugccaaagagaucggcaacgggugcuucgaguuuuaucauaaguguaauaacgaaugcauggagucaguaaagaauggaacauacgacuaucccaaauacagugaagaguccaagcucaaccgggagaaaaucgaugguguuaagcuggacagcaugggcguguaucagauuuuagcuaucuacucuacugucgccucaagucuggugcuacucgucagccugggggcaauuuccuucuggaugugcucuaauggaucgcuucagugucguauaugcaucuga

SEQ ID NO: 128344 - RNA, 1698 nt, Artificial Sequence
  derived and/or modified CDS sequence (opt3) from hemagglutinin__InfluenzaA__ABA08464
augaaggccaaacugcucgugcuucugugcaccuucacagcuacuuacgcagacacgaucuguauuggcuaucacgccaacaauagcaccgauacagucgacacuguuuuggagaagaacgugaccguaacacauuccgugaauuuacuggaagauucucacaacgggaaacuaugccuccugaagggaauagcgccccuucagcuggguaauuguucagucgcuggcuggaucuuggggaacccugagugcgaacuccugauuaguaaagagagcugguccuacaucguggaaaccccaaauccggagaacggaacuuguuaucccggcuacuuugccgacuaugaggaacugagagagcaacucucuucgguuagcucauucgaaagguuugagauuuucccuaaggguaguuccuggccaaaucauacagugaccggggucucugcaagcugcucccacaacggaaagucaaguuuuuaccggaauuuacuguggcuuacgggcaaaaacggcuuguaucccaaucugagcaugucuuacgugaacaauaaggagaaagaaguacuuguucucuggggagugcaucacccuccaaacaucggggaucagcgcgcccuguaccacacugagaacgcuuaugucuccguggugucaagccauuacagucgacguuucacccccgaaauagcaaagagaccuaaagucagggaccaggagggucggaucaauuauuacuggacacuucuggaaccaggcgauacuauuaucuuugaggccaacgggaauuugauugcuccgugguaugccuucgcgcucucucgcggauuuggcuccgguaucauaaccagcaacgcacccauggacgagugugaugccaagugccagacaccucaaggggcuauuaauucgucucugccauuccagaacguucaccccgugaccaucggagaauguccuaaguacguaagauccgccaaauuaaggauggugacgggccugcggaauauuccaucaauccagagucgcggccucuuuggggcaaucgcuggauucauugaggguggcuggacugggauggucgacggaugguauggcuaccaucaccagaacgaacaagguagcggguacgccgcggaucagaaguccacacagaaugccauaaacggcaucaccaauaaagugaacucuguuauugagaagaugaauacucaguuuacagcagugggaaaagaguucaacaagcuagaacgaagaauggagaaucugaacaaaaaggucgacgauggcuucuuggacaucuggaccuauaacgcugaacuacuggugcuccuggagaaugaaaggacgcuugacuuucacgauagcaacguaaagaaucuguacgagaaaguuaagucacaauugaaaaacaaugccaaggaaauagggaacggaugcuucgaguuuuaucauaaauguaauaacgagugcauggaaagugugaagaaugguaccuacgacuaucccaaguacuccgaggaaagcaaacucaaccgggagaagauugauggcgucaaacuggagucuauggggguguaucagaucuuagcuaucuacucaacagucgccaguagccuggugcuacucguuucccugggagcaauuucuuucuggaugugcucgaauggcagccuucagugucguaucugcauuuga

SEQ ID NO: 128345 - RNA, 1698 nt, Artificial Sequence; identical to SEQ ID NO: 128344
  derived and/or modified CDS sequence (opt3) from hemagglutinin__InfluenzaA__ABA08486

SEQ ID NO: 128346 - RNA, 1698 nt, Artificial Sequence
  derived and/or modified CDS sequence (opt3) from hemagglutinin__InfluenzaA__ABA08508
augaaggugaaacugcucauccuucugugcaccuucacagccacuuacgcugacacgauuuguauaggcuaucacgcaaacaauagcaccgauacagucgacacuguuuuggagaagaacgugaccguaacacauuccgugaauuuacuggaagauucucacaacgggaaacuaugccuccugaagggaaucgcgccccuucagcuggguaauuguucagucgccggcuggauuuuggggaacccugagugcgaacuccugaucaguaaagagagcugguccuacauuguggaaaccccaaauccggagaacggagcuuguuaucccggcuacuuugccgacuaugaggaacugagagagcaacucucuucgguuagcucauucgaaagguuugagaucuucccuaaggagaguuccuggccaaaucauacugugacaggugucucugcaagcugcucccacaacgggaagucaaguuuuuaccggaauuuacuguggcuuaccggaaagaacggcuuguaucccaaucugagcaagucuuacgccaacaauaaaaagaaagaagugcuaauacucuggggcguacaucacccuccaaacaucgggguucagcgcacgcuguacuauacugagaacgcuuacguguccgucgugucaagccacuauagucgacguuucacccccgaaauuacaaagagaccuaaggugagggaucaggagggacggaucaauuacuauuggacucuucuggaaccaggugacaccauuaucuuugaggcaaacggcaauuugauagccccgugguacgcuuucgcccucucucgcggguuuggauccggcauuaucacaagcaacgcgcccauggaugagugugacgcaaaaugccagaccccucaaggugccauuaauucgucucugccauuccagaacguccaucccguuacgaucggggaauguccuaaguaugugagauccgcuaaauuaaggaugguaacuggacugcggaauaucccaucaauucagagucgcggccucuuuggcgccauagcaggguucaucgagggagguuggacaggcaugguggaugggugguacggauaccaccaucagaacgaacaaggcagcgguuaugcugccgaccagaaguccacccagaaugcgauuaacgggaucacuaauaaagucaacucugugauagagaagaugaauacacaguuuaccgccguuggcaaagaguucaacaaacuugaacgaagaauggagaaucugaacaagaaaguggaugacggauucuuggauauuuggacguacaacgcagaacuacugguccuccuggagaaugaaaggacccuugacuuucacgacagcaacgugaagaaucuguaugagaaaguaaagucacaauugaaaaacaaugcuaaggaaaucggcaacgggugcuucgaguuuuaccacaaguguaauaacgagugcauggaaaguguuaaaaauggaacauaugauuaccccaaguauuccgaggaaagcaaacucaaccgggagaagaucgacggugugaaacuggauucuaugggcgucuaccagauuuuagccaucuacucaacuguggcuaguagccugguccuacucgugucccugggggccauuucuuucuggaugugcucgaauggaagccuucagugucguauaugcaucuga

SEQ ID NO: 128347 - RNA, 1698 nt, Artificial Sequence
  derived and/or modified CDS sequence (opt3) from hemagglutinin__InfluenzaA__ABA12707
augaaggugaaacugcucguccuucugugcaccuucacagccacuuacgcugacacgaucuguauuggcuaucacgcaaacaauagcaccgauacaguugacacuguguuggagaagaacguaaccgugacacauuccgucaauuuacuggaagauucucacaacgggaaacuaugccuccugaagggaauagcgccccuucagcuggguaauuguucaguggccggcuggaucuuggggaacccugagugcgaacuccugauuaguaaagagagcugguccuacaucguugaaaccccaaauccggagaacggaacuuguuaucccggcuacuuugcugacuaugaggaacugagagagcaacucucuucggugagcucauucgaaagguuugagauuuucccuaaggagaguuccuggccaaaucauacagucaccggugugucugccagcugcucccacaacgggaagucaaguuuuuaccggaauuuacuguggcuuacgggcaaaaacggauuguaucccaaucugagcaagucuuacgcaaacaauaaagaaaaggagguucuaguacucuggggcgugcaucacccuccaaacaucggggaucagcgcgcccuguaccacacugaaaacgcuuaugucuccguggugucaagccauuacagucgacguuucacccccgagauagcaaaaagaccuaaggucagggaccaggaaggacggaucaauuauuacuggacacuucuggagccaggugauacuauuaucuuugaggccaacggcaauuugauugcuccgcgcuaugccuucgcgcucucuagaggguuuggauccggcaucauaaccagcaacgcacccauggacgaaugugaugccaagugccagacaccucaaggugcuauuaauucgucucugccauuccagaacguucaccccgugaccaucggggaguguccuaaauacguaagguccgccaaguuacggauggugacgggacugcgcaauauuccaucaauccagagucgaggccucuuuggcgcaaucgcuggguucauugaaggagguuggacuggcauggucgacgggugguauggauaccaucaccagaacgagcaaggcagcgguuacgccgcggaucagaaauccacacagaaugccauaaacgggaucaccaauaaggugaacucuguuauugaaaagaugaauacucaguuuacagcagugggcaaagaguucaacaaacuugagagaaggauggaaaaucugaacaagaaggucgacgauggauucuuggacaucuggaccuauaacgcugagcuacuggugcuccuggaaaaugagcggacgcuugacuuucacgauagcaacguuaaaaaucuguacgaaaagguaaaaucacaauugaagaacaaugccaaagagauaggcaacgggugcuucgaguuuuaucauaaguguaaugacgaaugcauggagagugugaagaacggaaccuacgauuaucccaaauacuccgaagagagcaagcucaaucgugagaaaauugacggugucaagcuggaaucuaugggcguguaucagaucuuagcuaucuacucaacagucgccaguagccuggugcuacucguuucccugggggcaauuucuuucuggaugugcucgaacggaagccuucagugucgcaucugcauuuga

SEQ ID NO: 128348 - RNA, 1698 nt, Artificial Sequence
  derived and/or modified CDS sequence (opt3) from hemagglutinin__InfluenzaA__ABA12715
augaaggccaaacugcucgugcuucugugcaccuucacagcuacuuacgcagacacgaucuguauuggcuaucacgccaacaauagcaccgauacagucgacacuguuuuggagaagaacgugaccguaacacauuccgugaauuuacuggaagauucucacaacgggaaacuaugccuccugaagggaauagcgccccuucagcuggguaauuguucagucgcuggcuggaucuuggggaacccugagugcgaacuccugauuaguaaagagagcugguccuacaucguggaaaccccaaauccggagaacggaacuuguuaucccggcuacuuugccgacuaugaggaacugagagagcaacucucuucgguuagcucauucgaaagguuugagauuuucccuaaggguaguuccuggccaaaucauacagugaccggggucucugcaagcugcucccacaacggaaagucaaguuuuuaccggaauuuacuguggcuuacgggcaaaaacggcuuguaucccaaucugagcaugucuuacgugaacaauaaggagaaagaaguacuuguucucuggggagugcaucacccuccaaacaucggggaucagcgcgcccuguaccacacugagaacgcuuaugucuccguggugucaagccauuacagucgacguuucacccccgaaauagcaaagagaccuaaagucagggaccaggagggucggaucaauuauuacuggacacuucuggaaccaggcgauacuauuaucuuugaggccaacgggaauuugauugcuccgugguaugccuucgcgcucucucgcggauuuggcuccgguaucauaaccagcaacgcacccauggacgagugugaugccaagugccagacaccucaaggggcuauuaauucgucucugccauuccagaacguucaccccgugaccaucggagaauguccuaaguacguaagauccacgaaauuaaggauggugacuggccugcggaauauuccaucaauccagagucgcggccucuuuggggccaucgcaggauucauugaggguggcuggacagggauggucgacggaugguauggcuaccaucaccagaacgaacaagguagcggguacgcugccgaucagaaguccacccagaaugcgauaaacggcaucacuaauaaagugaacucuguuauugagaagaugaauacacaguuuaccgccgugggaaaagaguucaacaagcuagaacgaagaauggagaaucugaacaaaaaggucgacgauggcuucuuggacaucuggacguauaacgcagaacuacuggugcuccuggagaaugaaaggacccuugacuuucacgauagcaacguaaagaaucuguacgagaaaguuaagucacaauugaaaaacaaugcuaaggaaauagggaacggaugcuucgaguuuuaucauaaaugugacaaugagugcauggaaagugugaagaacgguacauacgauuaucccaaguacuccgaggaaagcaaacucaaucgggagaagauugacggcgucaaacuggagucuauggggguguaucagaucuuagccaucuacucaacugucgcuaguagccugguguuccuaguuucccucggagccauuucuuuuuggaugugcucgaacggcagccugcagugucguaucugcauuuga

SEQ ID NO: 128349 - RNA, 1698 nt, Artificial Sequence
  derived and/or modified CDS sequence (opt3) from hemagglutinin__InfluenzaA__ABA12729
augaaggugaaacugcucguccuucugugcaccuucacagccacuuacgcugacacgaucuguauuggcuaucacgcaaacaauagcaccgauacaguugacacuguguuggagaagaacguaaccgugacacauuccgucaauuuacuggaagauucucacaacgggaaacuaugccuccugaagggaauagcgccccuucagcuggguaauuguucaguggccggcuggaucuuggggaacccugagugcgaacuccugauuaguaaagagagcugguccuacaucguugaaaccccaaauccggagaacggaacuuguuaucccggcuacuuugcugacuaugaggaacugagagagcaacucucuucggugagcucauucgaaagguuugagauuuucccuaaggagaguuccuggccaaaucauacagucaccggugugucugccagcugcucccacaacgggaagucaaguuuuuaccggaauuuacuguggcuuacgggcaaaaacggauuguaucccaaucugagcaagucuuacgcaaacaauaaagaaaaggagguucuaguacucuggggcgugcaucacccuccaaacaucggggaucagcgcgcccuguaccacacugaaaacgcuuauauauccgucgugucaagccauuacagucgacguuucacccccgagaucgcaaaaagaccuaaggugagggaccaggaaggacggauuaauuauuacuggacacuucuggagccaggugauacuaucauuuuugaggccaacggcaauuugaucgcuccgcgcuaugccuucgcgcucucuagaggguuuggauccggcauaauuaccagcaacgcacccauggacgaaugugaugccaagugccagacaccucaaggugcuaucaauucgucucugccauuccagaacguccaccccguuaccauuggggaguguccuaaauacgugagguccgccaaguuacggaugguaacgggacugcgcaauaucccaucaauccagagucgaggccucuuuggcgcaauugcuggguucauagaaggagguuggacuggcaugguggacgggugguauggauaccaucaccagaacgagcaaggcagcgguuacgccgcggaucagaaauccacacagaaugccaucaacgggauuaccaauaaggucaacucugugaucgaaaagaugaauacucaguuuacagcaguuggcaaagaguucaacaaacuugagagaaggauggaaaaucugaacaagaagguggacgauggauucuuggacauauggaccuauaacgcugagcuacugguccuccuggaaaaugagcggacgcuugacuuucacgauagcaacgugaaaaaucuguacgaaaagguaaaaucacaauugaagaacaaugccaaagagauuggcaacgggugcuucgaguuuuaucauaaguguaaugacgaaugcauggagaguguuaagaacggaaccuacgauuauccccguuacuccgaagagagcaaacucaaucgcgagaagaucgacggugugaaacuggaaucuaugggcgucuaucagaucuuagcuauuuacucaacaguggccaguagccugguccuacucgugucccugggggcaaucucuuucuggaugugcucgaacggaagccuucaguguagaauuugcauauga

SEQ ID NO: 128350 - RNA, 1701 nt, Artificial Sequence; identical to SEQ ID NO: 128334
  derived and/or modified CDS sequence (opt3) from hemagglutinin__InfluenzaA__ABA12740

SEQ ID NO: 128351 - RNA, 1701 nt, Artificial Sequence; identical to SEQ ID NO: 128303
  derived and/or modified CDS sequence (opt3) from hemagglutinin__InfluenzaA__ABA12751

SEQ ID NO: 128352 - RNA, 1701 nt, Artificial Sequence
  derived and/or modified CDS sequence (opt3) from hemagglutinin__InfluenzaA__ABA12762
augaagaccaucauugcccugagcuacauacucugccuuguguucgcucagaaauuucccggcaacgacaauuccacagcaacucuguguuuggggcaccaugccgucccuaacggaacgaucguuaagaccauuacaaaugaucaaaucgaggugacuaacgcgaccgaauuaguacagucuucaaguacagguggcauuugcgacagcccacaccagauccuggauggggagaauuguacccuaauagacgcucuccugggagauccgcagugcgacggcuuccaaaacaaaaagugggaucuuuuuguggaaagauccaaagccuauucuaauuguuaccccuaugacgucccugauuacgcaucgcugaggucauugguggccagcagugguacucucgaguucaacaaugaauccuuuaacuggacagggguuacccagaauggaacgucuagcgcuugcaagcggcgcuccaacaauucauucuuuagucgacugaacuggcugacucaucucaaguucaaauauccagcauuaaaugugaccaugcccaacaacgagaaguuugacaaacuguacaucuggggcguccaccauccuggcacagauaaugaccagauuagccuuuaugcccaggcuucugggcguaucacuguguccaccaagagaucacaacagacaguaauuccaaacaucggaagcaggccccggguucgcgauauaccuaguagaauuucuaucuacuggaccauugugaaaccaggugacaucuugcugaucaauuccacgggcaaccuaauugccccgaggggguacuucaagauacggagcggaaagucgucuaucaugcgcuccgacgcgcccauuggcaaauguaauucagagugcaucacuccuaacgguaguauaccaaaugauaagcccuuucagaacgucaaucgaauuacauauggggcauguccuagauacgugaaacagaacacccucaagcuggccacuggaaugaggaaugugccagaaaaacaaacacggggcaucuucggcgcuaucgccggguuuauugagaacggaugggaagguauggucgacggcugguauggguuccgucaccagaauagcgagggaaucggccaggcagcugaucuuaaguccacccaagccgcgauuaaccagauaaaugguaaacugaaccgcuugaucgggaagacgaacgagaaguuccaccagauugaaaaagaguuuucugaaguugagggcagaauccaggaccucgaaaaguacguggaggauaccaaaaucgaccuguggagcuauaaugccgaguuacugguagcacucgaaaaccaacauacaauugaucuuacugacucagagaugaauaagcuguucgaaaggaccaaaaagcaguugcgggagaacgcugaagauaugggaaauggcugcuuuaagauauaccacaaaugugacaacgccugcaucgggaguauucgaaauggaacauaugaucaugacguguaccgcgacgaggcucuaaacaauagauuccagaucaagggugucgagcugaaauccggcuacaaggauuggauucucuggaucagcuuugccauaucuugcuuccugcuuugugugguucuguugggguuuaucaugugggcaugccagaaaggaaacauuagguguaauaucugcauuuga

SEQ ID NO: 128353 - RNA, 1701 nt, Artificial Sequence
  derived and/or modified CDS sequence (opt3) from hemagglutinin__InfluenzaA__ABA12773
augaagaccaucauugcccugagcuacauauucugccucgugcuuggccaggacuuucccgggaacgauaauuccacagcuacucuguguuugggacaccaugcagucccuaacgguacguuaguuaaaaccaucacaaaugaccaaauugaggugacuaacgccaccgaacugguacagucuucaaguacaggcaagaucugcaauaacccacacaggauucuagaugggaucgacuguacccucauagaugcgcugcuuggagacccgcauugcgauggcuuccagaaugagacuugggaccuguuuguggaaagaagcaaggcuuucuccaacuguuaucccuacgaugucccugacuaugccucuuugcggucgcucguggcaucaagcgguacacuggaguuuaucaaugaaggguucaccuggacgggaguuacucagaacggcggcaguaaugccugcaaacgcgggccagauuccggauuuuucucucgacugaacuggcucuacaaaagcgguuccaccuaucccguguuaaaugucacaaugccuaacaaugacaacuuugauaagcuguacauuuggggcgugcaccauccaucaacugaccaagagcagaccagucuuuauguacaggcuagcgggcguguuacagugucuaccaagagaucccagcaaacgaucauucccaacaucggaucaaggccuuggguccggggcuugagcagucgcauaucuauuuacuggacuaucgugaaaccaggugacauucuggugaucaauuccaacgggaaucuaaucgcaccgagaggauacuucaagaugaggacaggcaaaagcucgauuaugcggucugaugcccccauaggcaccuguaucuccgagugcauuacuccuaacgggucaaucccaaaugacaagcccuuucagaacgucaauaaaauaacauauggagcuuguccuaaguacguuaagcagaacacccucaaacuggccacggguaugcgcaaugugccagaaaagcagacccgaggccuuuucggggcgauugcaggauuuaucgagaacggcugggaagguaugaucgaugggugguauggcuucagacaccaaaauagugagggaacaggccaggccgcugaccugaaaagcacucaggccgcaauugaucaaaucaacgggaaguugaauaggguaauugagaaaaccaacgaaaaguuccaccagauagagaaagaauuuuccgagguggaaggacggauccaggaccucgagaaguacgucgaggauacaaagauugaccuguggucuuauaaugcugaauuacugguggcccucgagaaccagcauacuaucgaucuuaccgacagcgaaaugaacaaacuguucgagaagacacgucgccaauugagagaaaaugcggaggauauggguaacggcugcuuuaaaaucuaccacaagugugacaaugccugcauugggucaauaaggaacggaaccuaugaccaugauguuuaccgggacgaggcacuaaauaaccgauuccagaucaaaggcguggaacugaagagugguuacaaggauuggauucucuggaucuccuuugcuauuagcugcuuccugcuuugugucgugcuguugggguuuaucaugugggccugccagaaaggcaauauacgcuguaacaucugcauuuga

SEQ ID NO: 128354 - RNA, 1701 nt, Artificial Sequence
  derived and/or modified CDS sequence (opt3) from hemagglutinin__InfluenzaA__ABA12780
augaagaccaucauugcccugagcuacauacucugccuuguguucgcucagaaacugcccggcaacgacaauuccacagcaacuuuguguuuagggcaccaugccgucccuaacggaacgaucguuaagaccauuacaaaugaucaaaucgaggugacuaacgcgaccgaacugguacagucuucaaguacagguggcauuugcgacagcccacaccagauccuagauggggagaauuguacccucauagacgcucugcuuggagauccgcagugcgacggcuuucaaaacaaaaagugggaucuguucguggaaagauccaaagccuauucuaauuguuaccccuaugacgucccugauuacgcaucguugaggucacucguggccagcagugguacucuggaguuuaacaaugaauccuucaacuggacagggguuacccagaauggaacgucuagcgcuugcaagcggcgcuccaacaauucauuuuucagucgacugaacuggcucacucauuuaaaguuuaaauauccagcacugaaugugaccaugcccaacaacgagaaguucgacaaacuuuacaucuggggcguccaccauccuggcacaaauaacgaucagauuagcuuguaugcccaggcuucugggcguaucacuguguccaccaagagaucacaacagacaguaauuccaaauaucgagagcaggccccggguucgcgacauaccuaguagaauuucuaucuacuggaccauugugaaaccaggagauauccugcuaaucaacuccacggguaaucucauugccccgaggggcuacuuuaagauacggagcgggaagucgucuaucaugcgcuccgacgcgcccauuggaaaauguaacucagaaugcaucacuccuaauggcaguauaccaaacgacaagcccuuccagaaugucaaccgaauuacauauggugcauguccuagauacgugaaacagaauacccugaaacuugccacugggaugaggaacgugccagagaagcaaacacggggaaucuuuggcgcuaucgccggcuucauugaaaaugggugggagggaauggucgaugguugguauggcuuucgucaccagaacagcgaggggaucggacaggcagcugaccugaaguccacccaagccgcgauuaaucagauaaacggcaaauugaaccgccucaucgguaagacgaaugaaaaguuccaccagauugagaaagaguucucugaaguugaagggagaauccaggaucuggagaaguacguggaggacaccaaaaucgauuuauggagcuauaacgccgaacugcucguagcacuugagaaucaacauacaauugaccugacugauucagaaaugaacaaguuguuugagaggaccaaaaagcagcuacgggaaaaugcugaggacaugggcaacggaugcuucaagauauaccacaaaugugauaaugccugcaucggcaguauucgaaacgggacauaugaccaugauguguaccgcgacgaggcucugaauaacagauuucagaucaagggagucgaacucaaauccgguuacaaggacuggauucuguggaucagcuucgccauaucuugcuuucuucuguguguggcauugcucggcuucaucaugugggccugccagaaagggaauauuagguguaacaucugcauuuga

SEQ ID NO: 128355 - RNA, 1701 nt, Artificial Sequence
  derived and/or modified CDS sequence (opt3) from hemagglutinin__InfluenzaA__ABA16214
augaagaccaucauugcccugagcuacauauccugccucguguucgcucagaaacuucccggcaacgacaauucuacagcaacucuguguuuggggcaccaugccgucccuaacggaacguuaguuaagaccaucacaaaugaucaaauugaggugacuaacgcgaccgaacugguacagucaaguagcacagguagaaucugcgacuccccacacaggauucuagauggcaaaaauuguacccucaucgacgcucugcuuggggauccgcauugcgacggauuucagaacgagaagugggaucuguucguggaacggucuaaagccuuuucgaauuguuaucccuacgacgucccugauuaugcaucauugcgcagccucguggccaguuccggcacucuggaguucauaaacgaagguuuuaauuggacagggguuacccagucuggaggcagcuacgcuugcaagcgaggcuccgugaagucauucuuuagucgucugaacuggcucuaugagagcgagucuaaauacccagcauuaaaugucacgaugcccaacaaugggaaguucgacaaacuguauaucuggggagugcaccauccuuccacugauaaggaacaaaccaaccuuuacguaagagccucagguaggguuacagugagcacuaaacggagucagcagaccgucauuccaaauaucggcccccgcccuugggugagaggguugucuuccaggauuagcaucuacuggacaauagugaagccaggagacauucugcuaaucaacucgaccggcaaccucauugcuccgcgggguuauuuuaagauccgcacggggaaaucuuccaucaugcgaucagaugcccccauuggaacuuguaguagcggcugcauaacaccuaauggcuccaucccaaacgacaagcccuuccagaaugucaacaaaauuaccuacggggcguguccuagauauguuaagcaaaauacucugaaacuugcaacaggaaugaggaacgugccagagaagcagacccgggguaucuuuggcgccauagcuggguucauugaaaauggaugggagggcaugguagacgguugguacggguuucgucaccagaacucugagggcacgggacaggccgcagaucugaaaagcacccaagcugccaucgaccagaucaauggcaaguugaaccgccucauugaaaagacaaaugagaaauuccaccagaucgaaaaggaguucucagaaguggaggggaggauucaagaucuggagaaauaugucgaagacacuaagauagauuuauggaguuacaacgcggagcugcucguggcccuugaaaaucagcauaccaucgacaugacagauuccgagaugaacaaacuguuugaaaagacuagaaagcaguugcgggagaaugcagaggacaugggaaacgguugcuucaaaauuuaucacaagugugauaacgcuugcaucggcagcauccgaaaugggaccuacgaccaugauguuuaccgcgacgaagcccuaaacaauagauuucagauuaaaggaguggagcugaagucuggcuauaaagacuggauacucuggaucucauucgcuauuaguugcuuucugcuuugugucgugcuguuggguuucaucaugugggccugccaaaaggggaacauuagguguaauaucugcauauga

SEQ ID NO: 128356 - RNA, 1701 nt, Artificial Sequence; identical to SEQ ID NO: 128304
  derived and/or modified CDS sequence (opt3) from hemagglutinin__InfluenzaA__ABA18026

SEQ ID NO: 128357 - RNA, 1698 nt, Artificial Sequence
  derived and/or modified CDS sequence (opt3) from hemagglutinin__InfluenzaA__ABA18037
augaaggccaaacugcucgugcuucugugcaccuucacagcuacuuacgcagacacgaucuguauuggcuaucacgccaacaauagcaccgauacagucgacacuguuuuggagaagaacgugaccguaacacauuccgugaauuuacuggaagauucucacaacgggaaacuaugccuccugaagggaauagcgccccuucagcuggguaauuguucagucgcuggcuggaucuuggggaacccugagugcgaacuccugauuaguaaagagagcugguccuacaucguggaaaccccaaauccggagaacggaacuuguuaucccggcuacuuugccgacuaugaggaacugaaggagcaacucucuucgguuagcucauucgaaagauuugagauuuucccuaaggguaguuccuggccaaaucauacagugaccggggucucugcaagcugcucccacaacggaaaaucaaguuuuuacaggaauuuacuguggcuuacgggcaagaacggcuuguaucccaaucugagcaugucuuacgugaacaauaaagagaaggaaguucuaguacucuggggagugcaucacccuccaaacaucggggaucagcgggcccuguaccacacugagaacgcuuaugucuccguggugucaagccauuacagucgccgauucacccccgaaauagcaaaacguccuaaggucagagaccaggaggguaggaucaauuauuacuggacacuucuggaaccaggcgauacuauuaucuuugaggccaacgggaauuugauugcuccgugguaugccuucgcgcucucucggggauuuggcuccgguaucauaaccagcaacgcacccauggacgagugugaugccaagugccagacaccucaaggggcuauuaauucgucucugccauuccagaacguucaccccgugaccaucggagaauguccuaaauacguacgcuccgccaaguuaagaauggugacgggccugaggaauauuccaucaauccagagucggggccucuuuggggcaaucgcuggauucauugaggguggcuggacugggauggucgacggaugguauggcuaccaucaccagaacgaacaagguagcggguacgccgcggaucagaaauccacacagaaugccauaaacggcaucaccaauaaggugaacucuguuauugagaaaaugaauacucaguuuacagcagugggaaaggaguucaacaaacuugaacgccgaauggagaaucugaacaagaaggucgacgauggcuucuuggacaucuggaccuauaacgcugaacuacuggugcuccuggagaaugaaagaacgcuugacuuucacgauagcaacguuaaaaaucuguacgagaagguaaaaucacaauugaagaacaaugccaaagaaauagggaacggaugcuucgaguuuuaucauaaguguaauaacgagugcauggaaagugugaagaaugguaccuacgacuaucccaaauacuccgaggaaagcaagcucaacagggagaaaauugauggcgucaagcuggagucuauggggguguaucagaucuuagcuaucuacucaacagucgccaguagccuggugcuacucguuucccugggagcaauuucuuucuggaugugcucgaauggcagccuucagugucggaucugcauuuga

SEQ ID NO: 128358 - RNA, 1701 nt, Artificial Sequence; identical to SEQ ID NO: 128303
  derived and/or modified CDS sequence (opt3) from hemagglutinin__InfluenzaA__ABA18048

SEQ ID NO: 128359 - RNA, 1701 nt, Artificial Sequence
  derived and/or modified CDS sequence (opt3) from hemagglutinin__InfluenzaA__ABA18123
augaagaccaucauugcccugagcuacauacucugccuuguguucgcucagaaacugcccggcaacgacaauuccacagcaacuuuguguuuagggcaccaugccgucccuaacggaacgcugguuaagaccaucacaaaugaucaaauugaggugacuaacgcgaccgaacuuguacagucuucaaguacagguagaaucugcgacagcccacaccagauucucgauggcgagaauuguacccugaucgacgcucuacugggggauccgcauugcgacggauuucagaacaaagaaugggauuuguucguggagagguccaaggccuauucuaauuguuaccccuaugacgucccugauuacgugucgcuccggucacugguugcaagcaguggcacucuggaauuuaacaaugaguccuucaacuggacagguguggcccaaaaugggaccucuagcgcuugcaaacgccgauccaacaagucauuuuucagucgucucaauugguuacaccagcugaaguauaaauacccagcacuuaacgucacgaugcccaauaacgagaaguuugacaaauuguauauauggggagugcaucacccuggcacugauagcgaccagaucucucuguacgcccaggcuuccggcagaguaaccguuucaacaaagaggagccaacagacugugauuccaaacaucgggaguggacccuggguccggggugugucuucccgcauuagcaucuacuggaccauagugaaaccuggcgauauucuacucaucaauucgacagggaaccugauugccccaagaggauauuucaagaucaggucuggcaaguccucaaucaugcggagugacgcgccgauugguaaauguaauagcgaaugcauaacccccaacggguccaucccuaaugacaagccauuucagaacgucaaucgcauuacguacggagcauguccccgauauguuaaacagaacacucuuaagcuggccacaggcaugagaaaugugccugagaaacaaaccaggggcaucuucggggcuauagccggauuuauugaaaacgguugggagggcaugauggaugggugguacggauuccggcaccagaauagcgagggcacuggucaggcagcugacuugaagucuacacaagccgcgaucaaccagaucaaugggaaacucaaccgucugauugaaaagaccaaugagaaguuucaucagaucgaaaaagaguucucagaaguagagggccgcauucaggauuuagagaaguauguggaagacacgaaaauagaucuguggaguuacaacgccgagcuccuugucgcacuggaaaaccaacacaccaucgacuugacagauuccgagaugaauaagcuauucgaaagaacuaaaaagcagcugagggagaacgcugaggacaugggaaauggcugcuuuaagauuuaucauaaaugugauaacgccugcaucgggagcauccggaauggaaccuacgaccacgauguguaccgagacgaagcucucaacaaucgcuuccagauuaaggguguugagcugaaaucuggcuauaaggacuggauacuuuggaucucauuugccauuaguugcuuccuguuguguaucgugcuccugggguuuauuaugugggcaugccagaaaggaaacaucagauguaauauaugcaucuga

SEQ ID NO: 128360 - RNA, 1701 nt, Artificial Sequence; identical to SEQ ID NO: 128303
  derived and/or modified CDS sequence (opt3) from hemagglutinin__InfluenzaA__ABA18134

SEQ ID NO: 128361 - RNA, 1698 nt, Artificial Sequence; identical to SEQ ID NO: 128347
  derived and/or modified CDS sequence (opt3) from hemagglutinin__InfluenzaA__ABA18145

SEQ ID NO: 128362 - RNA, 1701 nt, Artificial Sequence; identical to SEQ ID NO: 128304
  derived and/or modified CDS sequence (opt3) from hemagglutinin__InfluenzaA__ABA18156

SEQ ID NO: 128363 - RNA, 1701 nt, Artificial Sequence
  derived and/or modified CDS sequence (opt3) from hemagglutinin__InfluenzaA__ABA26700
augaagaccaucauugcccugagcuacauacucugccuuguguucgcucagaaacugcccggcaacgacaauuccacagcaacuuuguguuuagggcaccaugccgucccuaacggaacgaucguuaagaccauuacaaaugaucaaaucgaggugacuaacgcgaccgaacugguacagucuucaaguacagguggcauuugcaauagcccacaccagauccuagacggggagaacuguacccucauagaugcucugcuuggagacccgcagugcgauggcuuucaaaauaaaaagugggaccuguucguggaaagauccaaagccuauucuaacuguuaccccuaugaugucccugacuacgcaucguugaggucacucguggccagcagugguacucuggaguuuaauaacgaauccuucaauuggacagggguuacccagaacggaacgucuagcgcuugcaagcggcgcuccaauaacucauuuuucagucgacugaauuggcucacucauuuaaaguuuaaauauccagcacugaacgugaccaugcccaacaaugagaaguucgauaaacuuuacaucuggggcguccaccauccuggcacagacaacgaucagauuagcuuguaugcccaggcuccagggcguaucacugugucuaccaagagaucccaacagacaguaauucccaauaucggaucaaggccucggguucgcgacauaccaagcagaauuaguaucuacuggaccauugugaaaccgggugauauccugcuaaucaacucuacgggcaaucucauugcccccaggggguacuuuaagauacgguccggaaagagcucgaucaugcgcucugacgcgccuauuggcaaauguaacuccgagugcaucacuccaaaugguucaauacccaacgacaagccuuuccagaaugucaaccgaauuacauauggggcauguccaagauacgugaaacagaauacccugaagcuggccacuggaaugaggaacgugcccgaaaaacaaacacggggcaucuuuggcgcuaucgccggguucauugagaauggaugggaagguauggucgauggcugguauggguuucgucaccagaacagugagggaaucggccaggcagcugaccuuaagagcacccaagccgcgauuaaucagauaaacgguaaauugaaccgccucaucgggaagacgaaugagaaguuccaccagauugaaaaagaguucuccgaaguugagggcagaauccaggaucuggaaaaguacguggaggacaccaaaaucgauuuauggucuuauaacgccgagcugcucguagcacuugaaaaucaacauacaauugaccugacugauagcgagaugaacaaguuguuugaaaggaccaaaaagcagcuacgggagaaugcugaagacaugggaaacggcugcuucaagauauaccacaaaugugauaaugccugcaucgggucaauucgaaacggaacauaugaccaugauguguaccgcgacgaggcucugaauaacagauuucagaucaagggugucgagcucaaaaguggcuacaaggacuggauucuguggaucuccuucgccauaagcugcuuucuucuguguguggcauugcucggguucaucaugugggccugccagaaaggaaauauuagguguaacaucugcauuuga

SEQ ID NO: 128364 - RNA, 1701 nt, Artificial Sequence
  derived and/or modified CDS sequence (opt3) from hemagglutinin__InfluenzaA__ABA26711
augaagaccaucauugcccugagcuacauacucugccuuguguucgcucagaaacugcccggcaacgacaauuccacagcaacuuuguguuuagggcaccaugccgucccuaacggaacgaucguuaagaccauuacaaaugaucaaaucgaggugacuaacgcgaccgaacugguacagucuucaaguacagguggcauuugcgacagcccacaccagauccuagauggggagaauuguacccucauagacgcucugcuuggagauccgcagugcgacggcuuucaaaacaaaaagugggaucuguucguggaaagauccaaagccuauucuaauuguuaccccuaugacgucccugauuacgcaucguugaggucacucguggccagcagugguacucuggaguuuaacaaugaauccuucaacuggacagggguuacccagaauggaacgucuagcgcuugcaagcggcgcuccaacaauucauuuuucagucgacugaacuggcucacucauuuaaaguuuaaauauccagcacugaaugugaccaugcccaacaacgagaaguucgacaaacuuuacaucuggggcguccaccauccuggcacagauaaugaccagauuagcuuguaugcccaggcuucugggcguaucacuguguccaccaagagaucacaacagacaguaauuccaaacaucggaagcaggccccggguucgcgauauaccuaguagaauuucuaucuacuggaccauugugaaaccaggugacauccugcuaaucaauuccacgggcaaccucauugccccgaggggguacuuuaagauacggagcggaaagucgucuaucaugcgcuccgacgcgcccauuggcaaauguaagucagagugcaucacuccuaaugguaguauaccaaacgauaaacccuuccagaaugucaaccgaauuacauauggggcauguccuagauacgugaagcagaauacccugaaacuugccacuggaaugaggaacgugccagaaaagcaaacacggggcaucuuuggcgcuaucgccggguucauugagaauggaugggaagguauggucgacggcugguauggguuucgucaccagaacagcgagggaaucggccaggcagcugaucugaaauccacccaagccgcgauuaaucagauaaacgguaaguugaaucgccucaucgggaagacgaacgagaaauuccaccagauugaaaaggaguucucugaaguugagggcagaauccaggaccuggaaaaauacguggaggauaccaagaucgacuuauggagcuauaacgccgagcugcucguagcacuugaaaaucaacauacaauugaucugacugacucagagaugaacaaauuguuugaaaggaccaagaagcagcuacgggagaaugcugaagauaugggaaacggcugcuucaaaauauaccacaagugugacaaugccugcaucgggaguauucgaaacggaacauaugaucaugacguguaccgcgacgaggcucugaauaacagauuucagaucaaaggugucgagcucaaguccggcuacaaagauuggauucuguggaucagcuucgccauaucuugcuuucuucuguguguggcauugcucggguucaucaugugggccugccagaagggaaauauuagguguaacaucugcauuuga

SEQ ID NO: 128365 - RNA, 1701 nt, Artificial Sequence
  derived and/or modified CDS sequence (opt3) from hemagglutinin__InfluenzaA__ABA26722
augaagaccaucauugcccugagcuacauacucugccuuguguucgcucagaaacugcccggcaacgacaauuccacagcaacuuuguguuuagggcaccaugccgucccuaacggaacgaucguuaagaccauuacaaaugaucaaaucgaggugacuaacgcgaccgaacugguacagucuucaccaacagguggcauuugcgacaguccgcaccagauccuagauggggagaauuguacccucauagacgcucugcuuggagauccccagugcgacggcuuucaaaacaaaaagugggaucuguucguggaaagaagcaaagcccauuccaauuguuauccuuacgacgucccagauuaugcaucuuugaggucgcucguggccucaagcgguacucuggaguuuaacaaugaaaguuucaacuggacagggguuacccagaauggaacguccucugcuugcaagcggcgcagcaacaaguccuuuuucucacgacugaauuggcucacucacuuaaaauuuaaguaccccgcacugaacgugaccaugccuaauaacgagaaauucgacaaacuuuauaucuggggcguccaucacccaggcacagauaacgaccagauuaguuuguacgcccaggcuagcgggcguaucacugugucuaccaagagaucccaacagacaguaauucccaauaucggaucaaggccucggguucgcgaugugccaagcagaauaaguauuuauuggaccaucgucaagccgggugacauucugcuaaucaacucuacgggcaaucucaucgcccccaggggguacuuuaagauucgguccggaaaaagcucgauaaugcgcucugacgcgccuaucggcaaguguaacuccgguugcauuacuccaaaugggucaauccccaacgauaaaccuuuccagaaugugaaccgaauaacauacggagcauguccaagauaugugaagcagaauacccugaaacuugccacuggcaugaggaacguccccgagaagcaaacacggggcauuuuuggggcuaucgccggauucaucgaaaaugguugggagggcaugguugacgggugguacggauuucgucaccagaacagugaaggcaccggucaggcagcugaucugaaaagcacgcaagccgcgauuaaucagaucaacgggaaguugaaucgccucauuggcaagaccaacgagaaauuccaucagauagagaaggaguucuccgaaguggaaggaagaauccaggaccuggagaaauauguagaagauacaaagauugacuuauggucuuacaacgccgagcugcucguggcacuugagaaucaacacacuaucgaucugaccgacagcgaaaugaacaaauuguuugagaggacaaagaagcagcuacgggaaaaugcugaggauaugggcaacgggugcuucaaaaucuaucauaagugugacaaugccugcauuggaucaauacgaaacgguacuuacgaucacgacgucuaucgcgacgaagcucugaauaacagauuucagaucaaaggcguggagcucaagaguggguacaaagauuggauucuguggaucuccuucgccauuagcugcuuucuucuguguguugcauugcucggauucaucaugugggccugccagaagggcaauauaagguguaacaucugcauuuga

SEQ ID NO: 128366 - RNA, 1701 nt, Artificial Sequence; identical to SEQ ID NO: 128291
  derived and/or modified CDS sequence (opt3) from hemagglutinin__InfluenzaA__ABA26733

SEQ ID NO: 128367 - RNA, 1701 nt, Artificial Sequence; identical to SEQ ID NO: 128291
  derived and/or modified CDS sequence (opt3) from hemagglutinin__InfluenzaA__ABA26755

SEQ ID NO: 128368 - RNA, 1701 nt, Artificial Sequence; identical to SEQ ID NO: 128330
  derived and/or modified CDS sequence (opt3) from hemagglutinin__InfluenzaA__ABA26766

SEQ ID NO: 128369 - RNA, 1701 nt, Artificial Sequence; identical to SEQ ID NO: 128330
  derived and/or modified CDS sequence (opt3) from hemagglutinin__InfluenzaA__ABA26788

SEQ ID NO: 128370 - RNA, 1701 nt, Artificial Sequence; identical to SEQ ID NO: 128330
  derived and/or modified CDS sequence (opt3) from hemagglutinin__InfluenzaA__ABA26799

SEQ ID NO: 128371 - RNA, 1698 nt, Artificial Sequence
  derived and/or modified CDS sequence (opt3) from hemagglutinin__InfluenzaA__ABA42247
augaaggugaaacugcucguccuucugugcaccuucacagccacuuacgcugacacgaucuguauuggcuaucacgcaaacaauagcaccgauacaguugacacuguguuggagaagaacguaaccgugacacauuccgucaauuuacuggaagauucucacaacgggaaacuaugccuccugaagggaauagcgccccuucagcuggguaauuguucaguggccggcuggaucuuggggaacccugagugcgaacuccugauuaguaaagagagcugguccuacaucguugaaaccccaaauccggagaacggaacuuguuaucccggcuacuuugcugacuaugaggaacugagagagcaacucucuucggugagcucauucgaaagguuugagauuuucccuaaggagaguuccuggccaaaucauacagucaccggugugucugccagcugcucccacaacgggaagucaaguuuuuacaaaaauuuacuguggcuuacgggaaagaacggcuuguaucccaaucugagcaaaucuuacgcaaacaauaaggaaaaagagguacuuguucucuggggcgugcaucacccuccaaacaucggggaucagcgggcccuguaccacacugaaaacgcuuaugucuccguggugucaagccauuacagucgccgauucacccccgagauagcaaagcguccuaaggucagagaccaggaaggaaggaucaauuauuacuggacacuucuggagccaggugauacuauuaucuuugaggccaacggcaauuugauugcuccgcgguaugccuucgcgcucucucgcggguuuggauccggcaucauaaccagcaacgcacccauggacgaaugugaugccaaaugccagacaccucaaggugcuauuaauucgucucugccauuccagaacguucaccccgugaccaucggggaguguccuaaguacguaagauccgccaaauuaaggauggugacgggacugcggaauauuccaucaauccagagucgcggccucuuuggcgcaaucgcuggguucauugaaggagguuggacuggcauggucgacgggugguauggauaccaucaccagaacgagcaaggcagcgguuacgccgcggaucagaaguccacacagaaugccauaaacgggaucaccaauaaagugaacucuguuauugaaaagaugaauacucaguuuacagcagugggcaaagaguucaacaagcuagagcgaagaauggaaaaucugaacaagaaagucgacgauggauucuuggacaucuggaccuauaacgcugagcuacuggugcuccuggaaaaugagaggacgcuugacuuucacgauagcaacguaaagaaucuguacgaaaaaguuaagucacaauugaaaaacaaugccaaggagauaggcaacgggugcuucgaguuuuaucauaaguguaaugacgaaugcauggagagugugaaaaacggaaccuacgauuaucccaaguacuccgaagagagcaaacucaaucgggagaagauugacggugucaaacuggaaucuaugggcguguaucagaucuuagcuaucuacucaacagucgccaguagccuggugcuacucguuucccugggggcaauuucuuucuggaugugcucgaacggaagccuucagugucguaucugcauuuga

SEQ ID NO: 128372 - RNA, 1698 nt, Artificial Sequence; identical to SEQ ID NO: 128344
  derived and/or modified CDS sequence (opt3) from hemagglutinin__InfluenzaA__ABA42258

SEQ ID NO: 128373 - RNA, 1701 nt, Artificial Sequence; identical to SEQ ID NO: 128303
  derived and/or modified CDS sequence (opt3) from hemagglutinin__InfluenzaA__ABA42269

SEQ ID NO: 128374 - RNA, 1698 nt, Artificial Sequence
  derived and/or modified CDS sequence (opt3) from hemagglutinin__InfluenzaA__ABA42280
augaaggugaaacugcucauccuucugugcaccuucacagccacuuacgcugacacgauuuguauaggcuaucacgcaaacaauagcaccgauacagucgacacuguuuuggagaagaacgugaccguaacacauuccgugaauuuacuggaagauucucacaacgggaaacuaugccuccugaagggaaucgcgccccuucagcuggguaauuguucagucgccggcuggauuuuggggaacccugagugcgaacuccugaucaguaaagagagcugguccuacauuguggaaaccccaaauccggagaacggagcuuguuaucccggcuacuuugccgacuaugaggaacugagagagcaacucucuucgguuagcucauucgaaagguuugagaucuucccuaaggagaguuccuggccaaaucauacugugacaggugucucugcaagcugcucccacaacgggaagucaaguuuuuaccggaauuuacuguggcuuaccggcaaaaacggauuguaucccaaucugagcaagucuuacgccaacaauaaagaaaaggaggugcuaauacucuggggcguacaucacccuccaaacaucggggaucagcgcacgcuguaccacacugaaaacgcuuauguuuccguggucucaagccauuacagucgacguuucacccccgagauuacaaaaagaccuaaggugagggaccaggaaggacggaucaauuauuacuggacucuucuggagccaggugauaccauuaucuuugaggcaaacggcaauuugauagccccgugguaugcuuucgcccucucucgcggguuuggauccggcauuaucacaagcaacgcgcccauggacgaaugugaugcaaagugccagaccccucaaggugccauuaauucgucucugccauuccagaacgugcaccccgucacgaucggggaguguccuaaauacguuagauccgcuaaguuaaggauggugacuggacugcggaauaucccaucaauucagagucgcggccucuuuggcgccauagcaggguucaucgaaggagguuggacaggcaugguagacgggugguauggauaccaucaccagaacgagcaaggcagcgguuacgcugccgaucagaaauccacccagaaugcgauuaacgggaucacuaauaaggugaacucugucauagaaaagaugaauacacaguuuaccgccgugggcaaagaguucaacaaacuugagcgaagaauggaaaaucugaacaagaagguugacgauggauucuuggacauuuggacguauaacgcagagcuacuggugcuccuggaaaaugagaggacccuugacuuucacgauagcaacgucaaaaaucuguacgaaaaggugaaaucacaauugaagaacaaugcuaaagagaucggcaacgggugcuucgaguuuuaucauaaguguaauaacgaaugcauggagaguguaaagaauggaacauacgacuaucccaaauacuccgaagagagcaagcucaaccgggagaaaaucgaugguguuaagcuggacucuaugggcguguaucagauuuuagccaucuacucaacugucgcuaguagccuggugcuacucgucucccugggggccauuucuuucuggaugugcucgaauggaagccuucagugucguauaugcaucuga

SEQ ID NO: 128375 - RNA, 1701 nt, Artificial Sequence
  derived and/or modified CDS sequence (opt3) from hemagglutinin__InfluenzaA__ABA42291
augaagaccaucauugcccugagcuacauacucugccuuguguucgcucagaaacugcccggcaacgacaauuccacagcaacuuuguguuuagggcaccaugccgucccuaacggaacgaucguuaagaccauuacaaaugaucaaaucgaggugacuaacgcgaccgaacugguacagucuucaaguacagguggcauuugcgacagcccacaccagauccuagauggggagaauuguacccucauagacgcucugcuuggagauccgcagugcgacggcuuucaaaacaaaaagugggaucuguucguggaaagauccaaagccuauucuaauuguuaccccuaugacgucccugauuacgcaucguugaggucacucguggccagcagugguacucuggaguuuaacaaugaauccuucaacuggacagggguuacccagaauggaacgucuagcgcuugcaagcggcgcuccaacaauucauuuuucagucgacugaacuggcucacucauuuaaaguuuaaauauccagcacugaaugugaccaugcccaacaacgagaaguucgacaaacuuuacaucuggggcguccaccauccuggcacagauaaugaccagauuagcuuguaugcccaggcuucugggcguaucacuguguccaccaagagaucacaacagacaguaauuccaaacaucggaagcaggccccggguucgcgauauaccuaguagaauuucuaucuacuggaccauugugaaaccaggugacauccugcuaaucaauuccacgggcaaccucauugccccgaggggguacuuuaagauacggagcggaaagucgucuaucaugcgcuccgacgcgcccauuggcaaauguaagucagagugcaucacuccuaaugguaguauaccaaacgauaaacccuuccagaaugucaaccgaauuacauauggggcauguccuagauacgugaagcagaauacccugaaacuugccacuggaaugaggaacgugccagaaaagcaaacacggggcaucuuuggcgcuaucgccggguucauugagaauggaugggaagguauggucgacggcugguauggguuucgucaccagaacagcgagggaaucggccaggcagcugaucugaaauccacccaagccgcgauuaaucagauaaacgguaaguugaaucgccucaucgggaagacgaacgagaaauuccaccagauugaaaaggaguucucugaaguugagggcagaauccaggaccuggaaaaauacguggaggauaccaagacagacuuauggagcuauaacgccgagcugcucguagcacuugaaaaucaacauacuaucgaucugaccgacucagagaugaacaaauuguuugaaaggacaaagaagcagcuacgggagaaugcugaagauaugggaaacggcugcuucaaaauuuaccacaagugugacaaugccugcauagggaguauccgaaacggaacuuaugaucaugacguguaccgcgacgaggcucugaauaacagauuucagauuaaaggugucgagcucaaguccggcuacaaagauuggauccuguggauuagcuucgccaucucuugcuuucuucuguguguggcauugcucggguucauaaugugggccugccagaagggaaauaucagguguaacauuugcaucuga

SEQ ID NO: 128376 - RNA, 1701 nt, Artificial Sequence; identical to SEQ ID NO: 128099
  derived and/or modified CDS sequence (opt3) from hemagglutinin__InfluenzaA__ABA42302

SEQ ID NO: 128377 - RNA, 1701 nt, Artificial Sequence; identical to SEQ ID NO: 128153
  derived and/or modified CDS sequence (opt3) from hemagglutinin__InfluenzaA__ABA42313

SEQ ID NO: 128378 - RNA, 1701 nt, Artificial Sequence; identical to SEQ ID NO: 128099
  derived and/or modified CDS sequence (opt3) from hemagglutinin__InfluenzaA__ABA42346

SEQ ID NO: 128379 - RNA, 1701 nt, Artificial Sequence; identical to SEQ ID NO: 128153
  derived and/or modified CDS sequence (opt3) from hemagglutinin__InfluenzaA__ABA42357

SEQ ID NO: 128380 - RNA, 1701 nt, Artificial Sequence
  derived and/or modified CDS sequence (opt3) from hemagglutinin__InfluenzaA__ABA42379
augaagaccaucauugcccugagcuacauacucugccuuguguucgcucagaaacugcccggcaacgacaauuccacagcaacuuuguguuuagggcaccaugccgucccuaacggaacgcugguuaagaccaucacaaaugaucaaauugaggugacuaacgcgaccgaacuuguacagucuucaaguacagguagaaucugcgacagcccacaccagauucucgauggcgagaauuguacccugaucgacgcucuacugggggauccgcauugcgacggauuucagaacaaagaaugggauuuguucguggagagguccaaggccuauucuaauuguuaccccuaugacgucccugauuacgugucgcuccggucacugguugcaagcaguggcacucuggaauuuaacaaugaguccuucaacuggacagguguggcccaaaaugggaccucuagcgcuugcaaacgccgauccgacaagucauuuuucagucgucucaacugguuacaccagcugaaguauaaauacccagcacuuaaugucacgaugcccaacaaugagaaguuugauaaauuguauauauggggagugcaucacccuggcacugacagcgaucagaucucucuguacgcccaggcuuccggcagaguaaccguuucaacaaagaggagccaacagacugugauuccaaacaucgggagucggcccuggguccgcggagugucuuccaaaauuagcaucuacuggaccauagugaagccuggugacauucuacucaucaacucgacaggcaaucugauugccccaagaggguauuucaagaucaggucuggaaaauccucaaucaugcggagugacgcgccgauuggcaaguguaacagcgaaugcauaacccccaaugguuccaucccuaacgauaaaccauuucagaaugucaaccgcauuacguacgggcccuguccucgauauguuaagcagaauacucuuaaacuggcaacaggaaugagaaacgugccagagaagcaaaccaggggcaucuucggcgccauagcuggguuuauugaaaauggaugggaggguaugauggacggcugguacggguuccggcaccagaacucugagggaacuggccaggccgcagauuugaaaagcacacaagcugccaucaaucagaucaacgguaagcucaaucgucugauugaaaagaccaacgagaaauuucaucagaucgaaaaggaguucucagaaguagaggggcgcauucaggacuuagagaaauauguggaagauacgaagauagaccuguggaguuacaaugcggagcuccuugucgcccuggaaaaccaacacaccaucgauuugacagacuccgagaugaacaaacuauucgaaagaacuaagaagcagcugagggagaaugcagaggauaugggcaacggaugcuuuaaaauuuaucauaagugugacaaugcuugcaucggcagcauccggaacgggaccuacgaucacgacguguaccgagacgaagcccucaauaaccgcuuccagauuaaaggaguugagcugaagucugguuauaaagauuggauacuuuggaucucauuugcuauuaguugcuucgugcuguguaucgucuugcucggcuuuauuaugugggccugccagaaggggaauaucagauguaacauaugcaucuga

SEQ ID NO: 128381 - RNA, 1701 nt, Artificial Sequence; identical to SEQ ID NO: 128128
  derived and/or modified CDS sequence (opt3) from hemagglutinin__InfluenzaA__ABA42390

SEQ ID NO: 128382 - RNA, 1701 nt, Artificial Sequence
  derived and/or modified CDS sequence (opt3) from hemagglutinin__InfluenzaA__ABA42401
augaagaccaucauugcccugagcuacauacucugccuuguguucgcucagaaacugcccggcaacgacaauuccacagcaacuuuguguuuagggcaccaugccgucccuaacggaacgcugguuaagaccaucacaaaugaucaaauugaggugacuaacgcgaccgaacuuguacagucuucaaguacaagcagaaucugcgacuccccacaccagauucucgauggugagaauuguacccugaucgacgcucuacugggcgauccgcauugcgacggguuucagaacaaagaaugggauuuguucguggagaggucuaaggccuauucgaauuguuaccccuaugacgucccugauuacgugucacuccggagccugguugcaaguuccggaacucuggaauuuaacaaugagucuuucaacuggacaggcguggcccaaaaugguaccagcuccgcuugcaaacgccgaucagacaagaguuucuucagccgucucaacugguuacaccagcugaaguauaaauacccagcacuuaaugucacgaugcccaacaaugagaaguuugauaaauuguauauauggggagugcaucacccugggacugacucugaucagaucucccuguacgcccagucaagcggcagaguaaccguuaguacaaagaggucucaacagacugugauuccaaacaucggcuccgggcccuggguccggggagugagcucgcgcauuucuaucuacuggaccauagugaaaccuggugacauucuacucaucaacuccacaggcaaucugauugcuccaagaggguauuucaagaucaggucaggaaagaguagcaucaugcgguccgacgccccgauuggcaaauguaacucuaagugcauaacccccaaugguagcaucccuaacgauaaaccauuucagaaugucaaccgcauuacguacggggcguguccccgauauguuaagcagaauacucuuaaacuggcaacaggaaugagaaacgugccugaaaagcaaaccaggggcaucuucggcgccauagcuggguuuauugagaauggaugggaagguaugauggacggcugguacggguuccggcaccagaacucagagggaacuggccaggccgcagauuugaaaaguacacaagcugccaucaaucagaucaacgguaagcucaaucgucugauugagaagaccaacgaaaaauuucaucagaucgagaaggaauuuuccgagguagaagggcgcauucaggacuuagagaaauauguggaggauacgaagauagaccuguggagcuacaaugcggaacuccuugucgcccuggagaaccaacacaccaucgauuugacagacucugaaaugaacaaacuauucgagagaacuaagaagcagcugagggaaaaugcagaggauaugggcaacggaugcuuuaaaauuuaucauaagugugacaaugcuugcaucggcucaauccggaacgggaccuacgaucacgacguguaccgagacgaggcccucaauaaccgcuuccagauuaaaggaguugaacugaagagugguuauaaagauuggauacuuuggaucagcuuugcuauuuccugcuuccuguuguguaucgugcuccugggcuuuauuaugugggccugccagaaggggaauaucagauguaacauaugcaucuga

SEQ ID NO: 128383 - RNA, 1701 nt, Artificial Sequence
  derived and/or modified CDS sequence (opt3) from hemagglutinin__InfluenzaA__ABA42412
augaagaccaucauugcccugagcuacauacucugccuuguguucgcucagaaacugcccggcaacgacaauuccacagcaacuuuguguuuagggcaccaugccgucccuaacggaacgcugguuaagaccaucacaaaugaucaaauugaggugacuaacgcgaccgaacuuguacagucuucaaguacagguagaaucugcgacagcccacaccagauucucgauggcgagaauuguacccugaucgacgcucuacugggggauccgcauugcgacggauuucagaacaaagaaugggauuuguucguggagagguccaaggccuauucuaauuguuaccccuaugacgucccugauuacgugucgcuccggucacugguugcaagcaguggcacucuggaauuuaacaaugaguccuucaacuggacagguguggcccaaaaugggaccucuagcgcuugcaaacgccgauccgacaagucauuuuucagucgucucaacugguuacaccagcugaaguauaaauacccagcacuuaaugucacgaugcccaacaaugagaaguuugauaaauuguauauauggggagugcaucacccuggcacugacagcgaucagaucucucuguacgcccaggcuuccggcagaguaaccguuucaacaaagaggagccaacagacugugauuccaaacaucgggagucggcccuggguccgcggagugucuuccaaaauuagcaucuacuggaccauagugaagccuggugacauucuacucaucaacucgacaggcaaucugauugccccaagaggguauuucaagaucaggucuggaaaauccucaaucaugcggagugacgcgccgauuggcaaguguaacagcgaaugcauaacccccuccgguucuaucccuaaugauaaaccauuucagaacgucaaucgcauuacguacgggcccuguccucgauauguuaagcagaacacucuuaaacuggcaacaggaaugagaaaugugccagagaagcaaaccaggggcaucuucggcgccauagcuggguuuauugaaaacggaugggaggguaugauggacggcugguacggguuccggcaccagaauagcgagggaacuggccaggccgcagauuugaaaucaacacaagcugccaucaaccagaucaaugguaagcucaaccgucugauugaaaagaccaaugagaaauuucaucagaucgaaaaggaguucagugaaguagaggggcgcauucaggacuuagagaaauauguggaagauacgaagauagaccugugguccuacaacgcggagcuccuugucgcccuggaaaaucaacacaccaucgauuugacagacagcgagaugaacaaacuauucgaaagaacuaagaagcagcugagggagaacgcagaggauaugggcaauggaugcuuuaaaauuuaucauaagugugacaacgcuugcaucggcucuauccggaaugggaccuacgaucacgacguguaccgagacgaagcccucaacaaucgcuuccagauuaaaggaguugagcugaagucagguuauaaagauuggauacuuuggaucaguuuugcuauuagcugcuuccuguuguguaucgugcuccugggcuuuauuaugugggccugccagaaggggaacaucagauguaauauaugcaucuga

SEQ ID NO: 128384 - RNA, 1701 nt, Artificial Sequence; identical to SEQ ID NO: 128095
  derived and/or modified CDS sequence (opt3) from hemagglutinin__InfluenzaA__ABA42443

SEQ ID NO: 128385 - RNA, 1701 nt, Artificial Sequence; identical to SEQ ID NO: 128099
  derived and/or modified CDS sequence (opt3) from hemagglutinin__InfluenzaA__ABA42454

SEQ ID NO: 128386 - RNA, 1701 nt, Artificial Sequence
  derived and/or modified CDS sequence (opt3) from hemagglutinin__InfluenzaA__ABA42465
augaagaccaucauugcccugagcuacauacucugccuuguguucgcucagaaacugcccggcaacgacaauuccacagcaacuuuguguuuagggcaccaugccgucccuaacggaacgcugguuaagaccaucacaaaugaucaaauugaggugacuaacgcgaccgaacuuguacagucuucaaguacaagcagaaucugcgacuccccacaccagauucucgauggugagaauuguacccugaucgacgcucuacugggcgauccgcauugcgacggguuucagaacaaagaaugggauuuguucguggagaggucuaaggccuauucgaauuguuaccccuaugacgucccugauuacgugucacuccggagccugguugcaaguuccggaacucuggaauuuaacaaugagucuuucaacuggacaggcguggcccaaaaugguaccagcuccgcuugcaaacgccgaucagacaagagcuuuuucagucgucucaacugguuacaccagcugaaguauaaauacccagcacuuaaugucacgaugcccaacaaugagaaguuugauaaauuguauauauggggagugcaucacccugggacugacucugaucagaucucccuguacgcccaggcuucaggcagaguaaccguuagcacaaagaggagucaacagacugugauuccaaacaucggcucucggcccugggggcgcggagucuccagcagaauuucgaucuacuggaccauagugaaaccuggugacauucuacucaucaacucuacaggcaaucugauugccccaaggggguauuucaagauccgguccggaaagucaaguaucaugcgcagcgacgcgccgauuggcaaauguaacuccgaaugcauaacccccaaugguucuaucccuaacgauaagccauuucagaaugugaaccgaauuacguacggggcaugucccagauaugucaaacagaauacucuuaagcuggccacaggaaugaggaacguuccugagaaacaaacccggggcaucuucggcgcuauagccggguuuauugaaaauggaugggaggguaugauggacggcugguacggguuccgucaccagaacagcgagggaacuggccaggcagcugauuugaagucaacacaagccgcgaucaaucagaucaacgguaaacucaaucgccugauugaaaagaccaacgagaaguuucaucagaucgaaaaagaguucagugaaguggaggggaggauucaggacuuagagaaguauguagaagauacgaaaauagaccugugguccuacaaugccgagcuccuuguggcacuggaaaaccaacacaccaucgauuugacagacagcgagaugaacaagcuauucgaaagaacuaaaaagcagcugcgggagaaugcugaggauaugggcaacggaugcuuuaagauuuaucauaaaugugacaaugccugcaucggcucuauccgaaacgggaccuacgaucacgacgucuaccgcgacgaagcucucaauaacagauuccagauuaagggaguggagcugaaaucagguuauaaggauuggauacuuuggaucaguuuugccauuagcugcuuccuguuguguaucguucuccugggcuuuauuaugugggcaugccagaaagggaauaucagguguaacauaugcaucuga

SEQ ID NO: 128387 - RNA, 1701 nt, Artificial Sequence
  derived and/or modified CDS sequence (opt3) from hemagglutinin__InfluenzaA__ABA42476
augaagaccaucauugcccugagcuacauacucugccuuguguucgcucagaaacugcccggcaacgacaauuccacagcaacuuuguguuuagggcaccaugccgucccuaacggaacgcugguuaagaccaucacaaaugaucaaauugaggugacuaacgcgaccgaauugguacagucuucaaguacagguagaaucugcgacagcccacaccagauucucgauggcgagaauuguacccugaucgacgcccuucugggggauccgcauugcgacggauuucagaacaaagaaugggauuuguucguggagagguccaaggcuuauucuaauuguuaccccuaugacgucccugauuacgugucgcuccggucacugguugcaagcaguggcacucuggaauuuaacaaugaguccuucaacuggacagguguggcccaaaaugggaccucuagcgcuugcaaacgccgauccgacaagucauuuuucagucgucucaacugguuacaccagcugaaguauaaauacccagcacuuaaugucacgaugcccaacaaugagaaguuugauaaauuguauauauggggagugcaucacccuggcacugacagcgaucagaucucucuguacgcccaggcuuccggcagaguaaccguuucaacaaagaggagccaacagacugugauuccaaacaucgggagucggcccuggguccgcggagugucuuccagaauuagcaucuacuggaccauagugaaaccuggugacauucuacucaucaacucgacaggcaaucugauugccccaaggggguauuucaagauccggucuggaaaguccucaaucaugcgcagugacgcgccgauuggcaaauguaacagcgaaugcauaacccccaaugguuccaucccuaacgauaagccauuucagaaugucaaccgaauuacguacgggcccuguccuagauauguuaaacagaauacucuuaagcuggcaacaggaaugaggaacgugccagagaaacaaacccggggcaucuucggcgccauagcuggguuuauugaaaauggaugggaggguaugauggacggcugguacggguuccgucaccagaacucugagggaacuggccaggccgcagaucuaaagagcacacaagcugccaucaaucagaucaacgguaaacucaaucgccugauugaaaagaccaacgagaaguuucaucagaucgaaaaagaguucucagaaguagaggggaggauucaggacuuagagaaguauguggaagauacgaaaauagaccuguggaguuacaaugcggagcuccuugucgcccuggaaaaccaacacaccaucgauuugacagacuccgagaugaacaagcuauucgaaagaacuaaaaagcagcugcgggagaaugcagaggauaugggcaacggaugcuuuaagauuuaucauaaaugugacaaugcuugcaucggcagcauccgaaacgggaccuacgaucacgacguguaccgcaaugaagcccucaacaauagauuccagauuaagggaguugagcugaaaucugguuauaaggacuggauacuuuggaucucauuugcuauuaguugcuuccuguuguguaucgugcuccugggcuuuauuaugugggccugccagaaagggaacaucagguguaauauaugcaucuga

SEQ ID NO: 128388 - RNA, 1701 nt, Artificial Sequence
  derived and/or modified CDS sequence (opt3) from hemagglutinin__InfluenzaA__ABA42498
augaagaccaucauugcccugagcuacauacucugccuuguguucgcucagaaacugcccggcaacgacaauuccacagcaacuuuguguuuagggcaccaugccgucccuaacggaacgcugguuaagaccaucacaaaugaucaaauugaggugacuaacgcgaccgaacuuguacagucuucaaguacaagcagaaucugcgacuccccacaccagauucucgauggugagaauuguacccugaucgacgcucuacugggcgauccgcauugcgacggguuucagaacaaagaaugggauuuguucguggagaggucuaaggccuauucgaauuguuaccccuaugacgucccugauuacgugucacuccggagccugguugcaaguuccggaacucuggaauuuaacaaugagucuuucaacuggacaggcguggcccaaaaugguaccagcuccgcuugcaaacgccgaucagacaagagcuuuuucagucgucucaacugguuacaccagcugaaguauaaauacccagcacuuaaugucacgaugcccaacaaugagaaguuugauaaauuguauauauggggagugcaucacccugggacugacucugaucagaucucccuguacgcccaggcuucaggcagaguaaccguuagcacaaagaggagucaacagacugugauuccaaacaucggcucucggcccuggguccgcgggguguccagcauuaucucgauauacuggaccauugugaaaccuggagacauccuacucauuaacucuacagguaaucugaucgccccaagaggcuauuucaagaucagguccgggaagucaaguauuaugcggagcgacgcgccgauaggaaaauguaacuccgaaugcaucacccccaauggcucuauuccuaacgauaagccauuucagaaugucaaccgcaucacguacggugcauguccccgauauguuaaacagaauacucuuaagcuggccacagggaugagaaacgugccugagaaacaaaccaggggaauauucggcgcuauugccggcuuuaucgaaaaugggugggagggaaugauggacgguugguacggcuuccggcaccagaacagcgaggggacuggacaggcagcugauuugaagucaacacaagccgcgaucaaucagauuaacggcaaacucaaucgucugaucgaaaagaccaacgagaaguuucaucagauugaaaaagaguucagugaaguagagggucgcauacaggacuuagagaaguauguggaagauacgaaaaucgaccugugguccuacaaugccgagcuccuugucgcacuggaaaaccaacacaccauugauuugacagacagcgagaugaacaagcuauucgaaagaacuaaaaagcagcugagggagaaugcugaggauauggggaacggcugcuuuaagaucuaucauaaaugugacaaugccugcaucggaucuauucggaacggcaccuacgaucacgacguguaccgagacgaagcucucaauaaccgcuuccagauaaaggggguugagcugaaaucaggauauaaggauuggauccuuuggauuaguuuugccaucagcugcuuccuguuguguauugugcuccuggguuuuaucaugugggcaugccagaaaggcaauauaagauguaacaucugcauuuga

SEQ ID NO: 128389 - RNA, 1701 nt, Artificial Sequence; identical to SEQ ID NO: 128120
  derived and/or modified CDS sequence (opt3) from hemagglutinin__InfluenzaA__ABA42509

SEQ ID NO: 128390 - RNA, 1701 nt, Artificial Sequence
  derived and/or modified CDS sequence (opt3) from hemagglutinin__InfluenzaA__ABA42520
augaagaccaucauugcccugagcuacauacucugccuuguguucgcucagaaacugcccgucaacgacaauuccacagcaacuuuguguuuaggccaccaugccguuccuaacgggacgcuggugaagaccaucacaaaugauuauauugagguaacuaacgcgaccgaacuugugcaaucuucaaguacaggaagaaucugcgacagcccacaccagauucucgauggugagaauuguacccugaucgacgcucuacugggcgauccgcauugcgacggguuucagaacaaagaaugggauuuguucgucgagagguccacugccuacucuaauuguuaucccuacgacgugccugauuaugcaucgcuccggucacugguugccagcaguggaacacuggaauuuaacaaugaguccuucaacuggaccggcguggcucagaaugguacgucuagcgcaugcaagcgccgauccauaaaaucauuuuucagucgucucaacugguuacaccaacugaaguacaaguauccagcccuuaaugucacuaugcccaacaaugagaaauuugacaaguuguacaucuggggagugcaucacccuagcaccgauucugaccagauuucccuguacgcucaggccucagggagaguaacaguuagcacuaaaaggagucagcaaaccgugaucccaaacauuggcucucggcccuggguccgcggcguguccagcaucauaucgauuuauuggacaaucgugaagccuggggauauucuacucaucaacucuaccggaaaucugaucgcgccaagagguuacuucaaaauuagguccggcaagucaaguauaaugcggagcaacgcaccgaucgggaaguguaauuccgaaugcauuacgcccaacggaucuaucccuaaugacaaaccauuucagaacgucaaucgcauaacuuauggcgccuguccccgauacguuaagcagaacacacuuaaacuggcuaccgguaugagaaaugugccugagaagcagacuagggggauuuucggagccaucgcaggcuuuaucgaaaacggcugggaggggaugguagacggaugguaugguuuccggcaccaaaauagcgagggcacagggcaggcugccgauuugaaaucaacccaggcggccauuaaccaaaucaauggaaagcucaaccgucugauugagaaaacgaaugaaaaguuucaucagauagaaaaggaguucagugaaguggagggccgcauccaggacuuagagaaauacgucgaagauaccaagauugaccugugguccuauaacgcagagcuccuuguggcucuggaaaaccagcacacaaucgauuugacugacagcgagaugaauaaacuauucgaaagaaccaggaagcaacugcgggagaacgccgaggauauggguaaugggugcuuuaaaaucuaccauaagugugacaacgcuugcauuggcucuauacgaaauggaacauacgaucacgacguuuaucgcgaugaagcccucaacaauagauuccagaucaagggcguggagcugaaaucaggguacaaggacuggauucuuuggaucaguuuugcaauuagcugcuuccuguugugugucgugcuccugggauuuaucaugugggccugccagaaagguaacauaagguguaauaucugcauuuga

SEQ ID NO: 128391 - RNA, 1701 nt, Artificial Sequence
  derived and/or modified CDS sequence (opt3) from hemagglutinin__InfluenzaA__ABA42531
augaagaccaucauugcccugagcuacauacucugccuuguguucgcucagaaacugcccgucaacgacaauuccacagcaacuuuguguuuaggccaccaugccguuccuaacgggacgcuggugaagaccaucacaaaugaucacauugagguaacuaacgcgaccgaacuugugcaaucuucaaguacaggaagaaucugcgacagcccacaucagauucucgauggugagaauuguacccugaucgacgcucuacugggcgauccgcacugcgacggguuucagaacaaagaaugggauuuguucgucgagagguccacugccuauucuaauuguuaccucuaugacgugcccgauuacgcaucgcugcggucacugguugccagcaguggaacacucgaauuuaacaaugaguccuucaacuggaccggcguggcucagaaugguacgucuagcgcaugcaagcgccgauccauaaaaucauuuuucagucguuuaaacuggcugcaucaacuuaaguauaaguacccugccuugaaugucacuaugccaaacaaugagaaauuugacaagcuguauaucuggggagugcaccaccccagcaccgauucugaccagauuucccuauacgcucaggccucagggagaguaacaguuagcacuaaaaggagucagcaaaccgugaucccuaacauuggcucucggccauggguccgcggcguguccagcagaaucucgauauacuggacaauugugaagcccggggauauccuccugauuaacucuaccggaaaucuuaucgcgccuagggguuauuucaaaauccgguccggcaagucaaguauuaugcgcagcaacgcaccaauagggaaguguaauuccgaaugcaucacgccgaacggaucuauucccaaugacaaaccuuuucagaacgucaaucgaaucacuuacggcgccuguccaagauauguuaagcagaacacacugaaauuggcuaccgguaugaggaaugugcccgagaagcagacucgggggauauucggagccauugcaggcuuuaucgaaaacggcugggaggggaugguagacggaugguacgguuuccgucaucaaaauagcgagggcacagggcaggcugccgaucucaaaucaacccaggcggccaucaaccaaauuaauggaaagcugaaccgcuuaaucgagaaaacgaaugaaaaguuucaccagauugaaaaggaguucagugaaguggagggcagaauacaggaccuggagaaauaugucgaagauaccaagaucgaccucugguccuacaacgcagagcuucugguggcuuuggaaaaccagcauacaauugaucuaacugacagcgagaugaauaaacuguucgaaaggacccggaagcaacuccgagagaacgccgaggauauggguaaugggugcuuuaaaaucuaucacaagugugacaacgcuugcaucggcucuauucgcaauggaacauacgaucacgacguuuacagagaugaagcccugaacaauagguuccagauaaagggcguggagcuuaaaucaggguauaaggacuggauccuguggauuaguuuugcaaucagcugcuucuugcucugugucgugcuguuaggauuuauuaugugggccugccagaaagguaacauccgguguaauauaugcaucuga

SEQ ID NO: 128392 - RNA, 1701 nt, Artificial Sequence; identical to SEQ ID NO: 128120
  derived and/or modified CDS sequence (opt3) from hemagglutinin__InfluenzaA__ABA42542

SEQ ID NO: 128393 - RNA, 1701 nt, Artificial Sequence
  derived and/or modified CDS sequence (opt3) from hemagglutinin__InfluenzaA__ABA42553
augaagaccaucauugcccugagcuacauacucugccuuguguucgcucagaaacugcccgucaacgacaauuccacagcaacuuuguguuuaggccaccaugccguuccuaacgggacgcuggugaagaccaucacaaaugaucacauugagguaacuaacgcgaccgaacuugugcaaucuucaaguacaggaagaaucugcgacagcccacaucagauucucgauggugagaauuguacccugaucgacgcucuacugggcgauccgcacugcgacggguuucagaacaaagaaugggauuuguucgucgagagguccacugcccauucuaauuguuaucccuacgacgugccugauuaugcaucgcuccggucacugguugccagcaguggaacacuggaauuuaacaaugaguccuucaacuggaccggcguggcucagaaugguacgucuagcgcaugcaagcgccgauccauaaaaucauuuuucagucgucucaacugguuacaccaacugaaguacaaguauccagcccuuaaugucacuaugcccaacaaugagaaauuugacaaguuguacaucuggggagugcaccauccuagcaccgauucugaccagauuucccuguaugcucaggccucagggagaguaacaguuagcacuaaaaggagucagcaaaccgugaucccaaacauuggcucucggcccuggguccgcggcguguccagcagaaucucgauauacuggacaauugugaagccuggggauauccuacucauuaacucuaccggaaaucugaucgcgccaagggguuacuucaaaauccgguccggcaagucaaguauuaugcgcagcaacgcaccgauagggaaguguaauuccgaaugcaucacgcccaacggaucuauuccuaaugacaaaccauuucagaacgucaaucgaaucacuuauggcgccugucccagauacguuaagcagaacacacuuaaacuggcuaccgguaugaggaaugugccugagaagcagacucgggggauauucggagccauugcaggcuuuaucgaaaacggcugggaggggaugguagacggaugguaugguuuccgucaccaaaauagcgagggcacagggcaggcugccgauuugaaaucaacccaggcggccaucaaccaaauuaauggaaagcucaaccgccugaucgagaaaacgaaugaaaaguuucaucagauugaaaaggaguucagugaaguggagggcagaauacaggacuuagagaaauacgucgaagauaccaagaucgaccugugguccuauaacgcagagcuccuuguggcucuggaaaaccagcacacaauugauuugacugacagcgagaugaauaaacuauucgaaaggacccggaagcaacugcgagagaacgccgaggauauggguaaugggugcuuuaaaaucuaccacaagugugacaacgcuugcaucggcucuauucgcaauggaacauaugaucaugacguuuacagagaugaagcccucaacaauagguuccagauaaagggcguggagcugaaaucaggguacaaggacuggauccuuuggauuaguuuugcaaucagcugcuuccuguugugugucgugcuccugggauuuauuaugugggccugccagaaagguaacauccgguguaauauaugcaucuga

SEQ ID NO: 128394 - RNA, 1701 nt, Artificial Sequence; identical to SEQ ID NO: 128120
  derived and/or modified CDS sequence (opt3) from hemagglutinin__InfluenzaA__ABA42564

SEQ ID NO: 128395 - RNA, 1701 nt, Artificial Sequence
  derived and/or modified CDS sequence (opt3) from hemagglutinin__InfluenzaA__ABA42928
augaagaccaucauugcccugagcuacauacucugccuuguguucgcucagaaacugcccgucaacgacaauuccacagcaacuuuguguuuaggccaccaugccguuccuaacgggacgcuggugaagaccaucacaaaugaucacauugagguaacuaacgcgaccgaacuugugcaaucuucaaguacaggaagaaucugcgacagcccacaucagauucucgauggugagaauuguacccugaucgacgcucuacugggcgauccgcacugcgacggguuucagaacaaagaaugggauuuguucgucgagagguccacugccuauucuaauuguuaccccuaugacgugccugauuacgcaucgcuccggucacugguugccagcaguggaacacuggaauuuaacaaugaguccuucaacuggaccggcguggcucagaaugguacgucuagcgcaugcaagcgccgauccauaaaaucauuuuucagucgucucaacugguuacaucaacugaaguauaaguacccagcccuuaaugucacuaugcccaacaaugagaaauuugacaaguuguauaucuggggagugcaccacccuagcaccgauucugaccagauuucccuguacgcucaggccucagggagaguaacaguuagcacuaaaaggagucagcaaaccgugaucccaaacauuggcucucggcccuggguccgcggcguguccagcaagaucucgauauacuggacaauugugaaaccuggggauauccuacucauuaacucuaccggaaaucugaucgcgccaagagguuauuucaagaucagguccggcaagucaaguauuaugcggagcaacgcaccgauagggaaauguaauuccgaaugcaucacgcccaacggaucuauuccuaaugacaagccauuucagaacgucaaucgcaucacuuacggcgccuguccccgauauguuaaacagaacacacuuaagcuggcuaccgguaugagaaaugugccugagaaacagacuagggggauauucggagccauugcaggcuuuaucgaaaacggcugggaggggaugguaaauggaugguacgguuuccggcaucaaaacagcgagggcacagggcaggcugccgacuugaagucaacccaggcggccaucaaucaaauuaacggaaaacucaaucgucugaucgaaaagacgaacgagaaguuucaccagauugaaaaagaguucagugaaguggagggccgcauacaggauuuagagaaguaugucgaagacaccaaaaucgaucugugguccuacaacgcagagcuccuuguggcucuggaaaaucagcauacaauugacuugacugauagcgagaugaacaagcuauucgaaagaaccaggaaacaacugcgggagaaugccgaggacauggguaacgggugcuuuaagaucuaucacaagugugauaaugcuugcaucggcucuauucgaaacggaacauacgaccacgauguuuaccgcgacgaagcccucaauaacagauuccagauaaaaggcguggagcugaagucaggguauaaagauuggauccuuuggauuaguuuugcaaucagcugcuuccuguugugugucgugcuccugggauuuauuaugugggccugccagaaggguaauaucagguguaacauaugcaucuga

SEQ ID NO: 128396 - RNA, 1701 nt, Artificial Sequence; identical to SEQ ID NO: 128120
  derived and/or modified CDS sequence (opt3) from hemagglutinin__InfluenzaA__ABA42939

SEQ ID NO: 128397 - RNA, 1701 nt, Artificial Sequence
  derived and/or modified CDS sequence (opt3) from hemagglutinin__InfluenzaA__ABA42978
augaagaccaucauugcccugagcuacauacucugccuuguguucgcucagaaacugcccgucaacgacaauuccacagcaacuuuguguuuaggccaccaugccguuccuaacgggacgcuggugaagaccaucacaaaugaucacauugagguaacuaacgcgaccgaacuugugcaaucuucaaguacaggaagaaucugcgacagcccacaucagauucucgauggugagaauuguacccugaucgacgcucuacugggcgauccgcacugcgacggguuucagaacaaagaaugggauuuguucgucgagagguccacugccuauucuaauuguuaccccuaugacgugccugauuacgcaucgcuccggucacugguugccagcaguggaacacuggaauuuaacaaugaguccuucaacuggaccggcguggcucagaaugguacgucuagcgcaugcaagcgccgauccauaaaaucauuuuucagucgucucaacugguuacaucaacugaaguauaaguacccagcccuuaaugucacuauccccaacaaugagaaauuugacaaguuguauauuuggggagugcaccacccuagcaccgauucugaccagaucucccuguacgcucaggccucagggagaguaacaguuagcacuaaaaggagucagcaaaccgugauuccaaacaucggcucucggcccuggguccgcggcguguccagcagaauaucgauuuacuggacaaucgugaagccuggggauauucuacucaucaacucuaccggaaaucugaucgcgccaagggguuauuucaaaauucgguccggcaagucaaguauaaugcgcagcaacgcaccgaucgggaaguguaauuccgaaugcauuacgcccaacggaucuaucccuaaugacaaaccauuucagaacgucaaucgaauaacuuacggcgccugucccagauauguuaagcagaacacacuuaaacuggcuaccgguaugaggaaugugccugagaagcagacucgggggauuuucggagccaucgcaggcuuuaucgaaaacggcugggaggggaugguagacggaugguacgguuuccgucaucaaaauagcgagggcacagggcaggcugccgauuugaaaucaacccaggcggccauuaaccaaaucaauggaaagcucaaccgccugauugagaaaacgaaugaaaaguuucaccagauagaaaaggaguucagugaaguggagggcagaauccaggacuuagagaaauaugucgaagauaccaagauugaccugugguccuacaacgcagagcuccuuguggcucuggaaaaccagcauacaaucgauuugacugacagcgagaugaauaaacuauucgaaaggacccggaagcaacugcgagagaacgccgaggauauggguaaugggugcuuuaaaaucuaucacaagugugacaacgcuugcauuggcucuauacgcaauggaacauacgaucacgacguuuacagagaugaagcccucaacaauagguuccagaucaagggcguggagcugaaaucaggguauaaggacuggauucuuuggaucaguuuugcaauuagcugcuuccuguugugugucgugcuccugggauuuaucaugugggccugccagaaagguaacauacgguguaauaucugcauuuga

SEQ ID NO: 128398 - RNA, 1701 nt, Artificial Sequence; identical to SEQ ID NO: 128291
  derived and/or modified CDS sequence (opt3) from hemagglutinin__InfluenzaA__ABA43167

SEQ ID NO: 128399 - RNA, 1701 nt, Artificial Sequence
  derived and/or modified CDS sequence (opt3) from hemagglutinin__InfluenzaA__ABA43178
augaagaccaucauugcccugagcuacauacucugccuuguguucgcucagaaacugcccggcaacgacaauuccacagcaacuuuguguuuagggcaccaugccgucccuaacggaacgaucguuaagaccauuacaaaugaucaaaucgaggugacuaacgcgaccgaacugguacagucuucaaguacagguggcauuugcgacagcccacaccagauccuagauggggagaauuguacccucauagacgcucugcuuggagauccgcagugcgacggcuuucaaaacaaaaagugggaucuguucguggaaagauccaaagccuauucuaauuguuaccccuaugacgucccugauuacgcaucguugaggucacucguggccagcagugguacucuggaguuuaacaaugaauccuucaacuggacagggguuacccagaauggaacgucuagcgcuugcaagcggcgcuccaacaauucauuuuucagucgacugaacuggcucacucauuuaaaguuuaaauauccagcacugaaugugaccaugcccaacaacgagaaguucgacaaacuuuacaucuggggcguccaccauccuggcacagauaaugaccagauuagcuuguaugcccaggcuucugggcguaucacuguguccaccaagagaucacaacagacaguaauuccaaacaucggaagcaggccccggguucgcgauauaccuaguagaauuucuaucuacuggaccauugugaaaccaggugacauccugcuaaucaauuccacgggcaaccucauugccccgaggggguacuuuaagauacggagcggaaagucgucuaucaugcgcuccgacgcgcccauuggcaaauguaauucagagugcaucacuccuaacgguaguauaccaaaugauaagcccuuccagaacgucaaucgaauuacauauggggcauguccuagauacgugaaacagaacacccugaaacuugccacuggaaugaggaaugugccagaaaagcaaacacggggcaucuuuggcgcuaucgccggguucauugagaacggaugggaagguauggucgacggcugguauggguuucgucaccagaauagcgagggaaucggccaggcagcugaucugaaguccacccaagccgcgauuaaccagauaaaugguaaauugaaccgccucaucgggaagacgaacgagaaguuccaccagauugaaaaagaguucucugaaguugagggcagaauccaggaccuggaaaaguacguggaggauaccaaaaucgacuuauggagcuauaaugccgagcugcucguagcacuugaaaaccaacauacaauugaucugacugacucagagaugaauaaguuguuugaaaggaccaaaaagcagcuacgggagaacgcugaagauaugggaaauggcugcuucaagauauaccacaaaugugacaacgccugcaucgggaguauucgaaauggaacauaugaucaugacguguaccgcgacgaggcucugaacaauagauuucagaucaagggugucgagcucaaauccggcuacaaggauuggauucuguggaucagcuucgccauaucuugcuuucuucuguguaucgcauugcucggguucauuaugugggccugccagaaaggaaacaucagguguaauauuugcaucuga

SEQ ID NO: 128400 - RNA, 1698 nt, Artificial Sequence
  derived and/or modified CDS sequence (opt3) from hemagglutinin__InfluenzaA__ABA43189
augaaggccaaacugcucgugcuucugugcaccuucacagcuacuuacgcagacacgaucugugucggcuaucacgccaacaauagcaccgauacaguugacacuguguuggagaagaacguaaccgugacacauuccgucaauuuacuggaagauucucacaacgggaaacuaugccuccugaagggaauugcgccccuucagcuggguaauuguucaguggcuggcuggauauuggggaacccugagugcgaacuccugaucaguaaagagagcugguccuacauuguugaaaccccaaauccggagaacggaacuuguuaucccggcuacuuugccgacuaugaggaacugagagagcaacucucuucggugagcucauucgaaagguuugagaucuucccuaaggguaguuccuggccaaaucauacagucaccggggugucugcaagcugcucccacaacggaaagucaaguuuuuaccggaauuuacuguggcuuacgggcaaaaacggcuuguaucccaaucugagcaugucuuacguaaacaauaaggagaaagaaguucuagugcucuggggaguccaucacccuccaaacauuggggaucagcgcgcccuguaccacacugagaacgcuuauguguccguggucucaagccauuacagucgacguuucacccccgaaaucgcaaagagaccuaaaguuagggaccaggagggucggauaaauuauuacuggacacuucuggaaccaggcgauacuaucauuuuugaggccaacgggaauuugaucgcuccgugguaugccuucgcgcucucucgcggauuuggcuccgguauuaucaccagcaacgcacccauggacgagugugaugccaagugccagacaccucaaggggcuauaaauucgucucugccauuccagaacgugcaccccguaaccauuggagaauguccuaaguacgugagauccgccaaauuaaggauggucacgggccugcggaauaucccaucaauucagagucgcggccucuuuggggcaaucgcuggauucaucgaggguggcuggacugggaugguggacggaugguauggcuaccaucaccagaacgaacaagguagcggguacgccgcggaucagaaguccacacagaaugccauuaacggcauaaccaauaaaguuaacucugugaucgagaagaugaauacucaguuuacagcagucggaaaagaguucaacaaacuugaacgaagaauggagaaucugaacaagaagguggacgauggcuucuuggacauuuggaccuauaacgcugaacuacugguacuccuggagaaugaaaggacgcuugacuuucacgauagcaacguuaagaaucuguacgagaaagugaagucacaauugaaaaacaaugccaaggaaaucgggaacggaugcuucgaguuuuaucauaaauguaauaacgagugcauggaaagugucaagaaugguaccuacgacuaucccaaguacuccgaggaaagcaaacucaaccgggagaagauagauggcgugaaacuggagucuaugggggucuaucagauuuuagcuaucuacucaacaguggccaguagccugguucuacucgugucccugggagcaaucucuuucuggaugugcucgaauggcagccuucagugucguauuugcaucuga

SEQ ID NO: 128401 - RNA, 1701 nt, Artificial Sequence
  derived and/or modified CDS sequence (opt3) from hemagglutinin__InfluenzaA__ABA43200
augaagaccaucauugcccugagcuacauacucugccuuguguucgcucagaaacugcccggcaacgacaauuccacagcaacuuuguguuuagggcaccaugccgucccuaacggaacgaucguuaagaccauuacaaaugaucaaaucgaggugacuaacgcgaccgaacugguacagucuucaaguacagguggcauuugcgacagcccacaccagauccuagauggggagaauuguacccucauagacgcucugcuuggagauccgcagugcgacggcuuucaaaacaaaaagugggaucuguucguggaaagauccaaagccuauucuaauuguuaccccuaugacgucccugauuacgcaucguugaggucacucguggccagcagugguacucuggaguuuaacaaugaauccuucaacuggacagggguuacccagaauggaacgucuagcgcuugcaagcggcgcuccaacaauucauuuuucagucgacugaacuggcucacucauuuaaaguuuaaauauccagcacugaaugugaccaugcccaacaacgagaaguucgacaaacuuuacaucuggggcguccaccauccuggcacagauaaugaccagauuagcuuguaugcccaggcuucugggcguaucacuguguccaccaagagaucacaacagacaguaauuccaaacaucggaagcaggccccggguucgcgauauaccuaguagaauuucuaucuacuggaccauugugaaaccaggugacauccugcuaaucaauuccacgggcaaccucauugccccgaggggguacuuuaagauacggagcggaaagucgucuaucaugcgcuccgacgcgcccauuggcaaauguaauucagagugcaucacuccuaacgguaguauaccaaaugauaagcccuuccagaacgucaaucgaauuacauauggggcauguccuagauacgugaaacagaacacccugaaacuugccacuggaaugaggaaugugccagaaaagcaaacacggggcaucuuuggcgcuaucgccggguucauugagaacggaugggaagguauggucgacggcugguauggguuucgucaccagaauagcgagggaaucggccaggcagcugaucugaaguccacccaagccgcgauuaaccagauaaaugguaaauugaaccgccucaucgggaagacgaacgagaaguuccaccagauugaaaaagaguucucugaaguugagggcagaauccaggaccuggaaaaguacguggaggauaccaaaaucgacuuauggagcuauaaugccgagcugcucguagugcuugaaaaccaacauacaauugaucugacugacucagagaugaauaaguuguuugaaaggaccaaaaagcagcuacgggagaacgcagaagauaugggaaauggcugcuucaagauauaccacaaaugugacaacgcuugcaucgggaguauucgaaauggaacauaugaucaugacgucuaccgcgacgaggcccugaacaauagauuucagaucaaggguguggagcucaaauccggcuacaaggauuggauucuguggaucagcuucgcuauaucuugcuuucuucuguguguuguguugcucggguucaucaugugggccugccagaaaggaaacauuagguguaauaucugcauuuga

SEQ ID NO: 128402 - RNA, 1701 nt, Artificial Sequence
  derived and/or modified CDS sequence (opt3) from hemagglutinin__InfluenzaA__ABA43336
augaagaccaucauugcccugagcuacauauucugccucguguuugcucagaaacuucccggcaacgacaauuccacagcaacucuguguuuggggcaccaugccgucccuaacggaacguuaguuaagaccaucacaaaugaucaaauugaggugacuaacgcgaccgaacugguacaaaauucuucaacagguagaaucugcgacaguccacacaggauucuagauggcaaaaacuguacccucaucgacgcucugcuuggggauccgcauugcgacggauuccagaauaaggagugggaucuguuuguggaacggagcaaagccuauuccaacuguuaccccuaugacgucccugauuacgcaucuuugcgcucgcucguggccucaagcggcacucuggaguucauaaaugaagacuuuaacuggacagguguugcucagagugggggauccuaugcaugcaagcgaggcucugugaauagcuucuuuucccgucugaacuggcuccacgagucagaguacaaguauccagccuuaaaugucaccaugcccaacaauggcaaauucgauaagcuguacguguggggaguacaucacccuaucacggacagagaacagacuaaacuuuacguuagggcuagugggcgggugaccgucagcacaaagcgcucucagcagacugugauuccaaacaucgguuccagacccugggugaggggcuugucaagccggauuaguaucuauuggaccauagucaaaccuggggauauucugcuaaucaacucuacaggaaaucucauugccccacgcggcuacuuuaagauccgaaccgguaaguccagcaucaugagaucggacgcgccgauugggacguguucuuccgagugcauaacucccaacggaucaaucccuaaugacaaaccauuccagaacguuaauaggauuacauauggcgcauguccccgguacgugaagcaaaacacccugaaacuugccacuggcaugcguaauguaccugaaaagcagacacgcgggaucuuuggagcuauagccgguuucauugagaacggcugggaggggaugguggauggaugguauggcuuuagacaccagaauagugaagguaccgggcaggcagcugaccugaaaagcacgcaagccgcgaucgaucagaucaacggcaaguugaauaggcucauugagaaaaccaacgaaaaguuccaucagaucgagaaggaguucuccgaagucgagggacggauucaagaccuggaaaaauacguggaggauacaaagauagacuuauggucuuauaaugccgaacugcucguugcacuugagaaccagcacacuaucgaucugaccgacagcgaaaugaauaaauuguuugagaagacacgaaaacagcuacgcgagaacgcugaagauaugggcaacgggugcuucaagauuuaccauaagugugacaaugccugcaucggaucaaucagaaacgguacuuacgaucacgacguguauagggacgaggcucugaauaaccgguuucagauuaaaggcgucgaacucaagaguggguacaaagauuggauacuguggaucuccuucgccauuagcugcuuucuucugugugugguauugcucggauucaucaugugggcaugccaaaagggcaauauucgcuguaacaucugcauauga

SEQ ID NO: 128403 - RNA, 1707 nt, Artificial Sequence
  derived and/or modified CDS sequence (opt3) from hemagglutinin__InfluenzaA__ABA54915
auggagaaggugguccugcuccuugccaccgcuagccugguuaaauccgaccagaucugcauuggcuaccacgcaaacaauucuacagaacaaguggauacuauaauggagaagaacguaacggugacccaugcccaggacaucuuggaaaagacacacaaugggaaguuaugugaucuggacggagucaaaccccuaauucucagagauugcucaguggcggguuggcugcuuggcaacccuaugugugacgaguucaucaauguuccagaauggaguuauauuguggagaaggcuagcccggccaacgaucugugcuaccccggggacuuuaaugauuaugaggaauugaagcaucuccuguccaggaucaaccacuucgagaaaauacagaucauuccuaagucuucguggucaaaucaugaagcaagcaguggagucuccgccgcuuguccauaccacggcaaacccagcuuuuuccggaacgugguauggcugaucaagaaaaauucugcauauccuacuauuaagcgcuccuacaacaauaccaaccaggaggaccucuuaguucugugggguauccaccauccaaaugaugccgcugagcaaacaaaacuuuaucagaaccccaccacuuacauaucaguggggacaaguaccuugaaccagcgacuggucccuaaaauugccacgcguagcaaggugaauggacagucuggcagaauggaauuuuucuggacuauccuaaaaccaaacgacgcgauuaauuuugaguccaacggcaauuucaucgcaccggaauacgccuauaagaucgugaaaaagggggauucagcuauuaugaaaagcgagcucgaauacggaaacugcaauaccaagugucaaacacccaugggugccauaaacaguucuaugccuuuucacaauauccauccacugacuauuggcgagugccccaaguaugucaaauccaacaggcuuguucuggcaaccggguugcggaauacaccucagcgcgagagaaggcggaagaaacgcggacucuucggcgcuaucgccgguuuuauagaagggggauggcagggcaugguggacggcugguacggguaucaccacagcaacgagcagggaucggguuacgcggccgacaaggaaucuacccaaaaagcaauugauggcguaacgaauaaggugaacuccaucaucgacaagaugaauacucaguucgaggcugucgggcgagaauuuaacaaccuggagagaaggauugagaauuuaaacaaaaagauggaagauggauuccuggacguguggacauauaaugccgagcuccuuguucugauggaaaacgagcggaccuuggauuuccaugacucaaaugugaaaaaccuauacaauaagguccgucugcagcuccgcgauaacgcuaaagaacugggcaaugguuguuuugaguucuaccacaagugcgacaacgaguguauggaaagugugaagaaugggacuuaugauuacccacaauauagcgaggaagccagacuuaacagggaggagaucuccggcguaaaacuggaaucuaugggaacauaccagauuuugagcauauauucaaccguugcaaguucccucgcccuggcuaucaugguggcgggcuuaagccuguggaugugcucuaaugggucacuacagugccggauuuguaucuga

SEQ ID NO: 128404 - RNA, 1698 nt, Artificial Sequence
  derived and/or modified CDS sequence (opt3) from hemagglutinin__InfluenzaA__ABA87080
augaaggugaaacugcucguccuucugugcaccuucacagccacuuacgcugacacgaucuguauuggcuaucacgcaaacaauagcaccgauacaguugacacuguguuggagaagaacguaaccgugacacauuccgucaauuuacuggaagauucucacaacgggaaacuaugccuccugaagggaauagcgccccuucagcuggguaauuguucaguggccggcuggaucuuggggaacccugagugcgaacuccugauuaguaaagagagcugguccuacaucauugaaaccccaaauccggagaacggaacuuguuaucccggcuacuuugcugacuaugaggaacugagagagcaacucucuucgguuagcucauucgaaagguuugagaucuucccuaaggagaguuccuggccaaaucauacagugaccggugucucugccagcugcucccacaacgggaagucaaguuuuuaccggaauuuacuguggcuuacgggcaaaaacggauuguaucccaaucugagcaagucuuacgcaaacaauaaagaaaaggaggugcuaguacucuggggcguucaucacccuccaaacaugggggaucagcgcgcccuguaccacacugaaaacgcuuauguguccgucgugucaagccauuacagucgacguuucacccccgagauagcaaaaagaccuaaggugagggaccaggaaggacggaucaauuauuacuggacacuucuggagccaggugauacuauuaucuuugaggccaacggcaauuugauugcuccgcgcuaugccuucgcgcucucuagaggguuuggauccggcaucauaaccagcaacgcacccauggacgaaugugaugccaagugccagacaccucaaggugcuauuaauucgucucugccauuccagaacguccaccccguuaccaucggggaguguccuaaauacgugagguccgccaaguuacggaugguaacgggacugcgcaauauuccaucaauccagagucgaggccucuuuggcgcaaucgcuggguucauugaaggagguuggacuggcaugguggacgggugguauggauaccaucaccagaacgagcaaggcagcgguuacgccgcggaucagaaauccacacagaaugccauaaacgggaucaccaauaaggucaacucugugauugaaaagaugaauacucaguuuacagcaguuggcaaagaguucaacaaacuugagagaaggauggaaaaucugaacaagaagguggacgauggauucuuggacaucuggaccuauaacgcugagcuacugguccuccuggaaaaugagcggacgcuugacuuucacgauagcaacgugaaaaaucuguacgaaaagguaaaaucacaauugaagaacaaugccaaagagauaggcaacgggugcuucgaguuuuaucauaaguguaaugacgaaugcauggagaguguuaagaacggaaccuacgauuaucccaaauacuccgaagagagcaagcucaaucgugagaaaauugacggugugaagcuggaaucuaugggcgucuaucagaucuuagcuaucuacucaacaguggccaguagccugguccuacucgugucccugggggcaauuucuuucuggaugugcucgaacggaagccuucagugucgcaucugcauuuga

SEQ ID NO: 128405 - RNA, 1698 nt, Artificial Sequence; identical to SEQ ID NO: 128344
  derived and/or modified CDS sequence (opt3) from hemagglutinin__InfluenzaA__ABA87091

SEQ ID NO: 128406 - RNA, 1698 nt, Artificial Sequence; identical to SEQ ID NO: 128344
  derived and/or modified CDS sequence (opt3) from hemagglutinin__InfluenzaA__ABA87231

SEQ ID NO: 128407 - RNA, 1701 nt, Artificial Sequence; identical to SEQ ID NO: 128303
  derived and/or modified CDS sequence (opt3) from hemagglutinin__InfluenzaA__ABA87242

SEQ ID NO: 128408 - RNA, 1701 nt, Artificial Sequence; identical to SEQ ID NO: 128304
  derived and/or modified CDS sequence (opt3) from hemagglutinin__InfluenzaA__ABA87253

SEQ ID NO: 128409 - RNA, 1698 nt, Artificial Sequence
  derived and/or modified CDS sequence (opt3) from hemagglutinin__InfluenzaA__ABB02781
augaaggugaaacugcucauccuucugugcaccuucacagccacuuacgcugacacgauuuguauaggcuaucacgcaaacaauagcaccgauacagucgacacuguuuuggagaagaacgugaccguaacacauuccgugaauuuacuggaagauucucacaacgggaaacuaugccuccugaagggaaucgcgccccuucagcuggguaauuguucagucgccggcuggauuuuggggaacccugagugcgaacuccugaucaguaaagagagcugguccuacauuguggaaaccccaaauccggagaacggagcuuguuaucccggcuacuuugccgacuaugaggaacugagagagcaacucucuucgguuagcucauucgaaagguuugagaucuucccuaaggagaguuccuggccaaaucauacugugacaggugucucugcaagcugcucccacaacgggaagucaaguuuuuaccggaauuuacuguggcuuaccggcaaaaacggauuguaucccaaucugagcaagucuuacgccaacaauaaagaaaaggaggugcuaauacucuggggcguacaucacccuccaaacaucggggaucagcgcacgcuguaccacacugaaaacgcuuauguuuccguggucucaagccauuacagucgacguuucacccccgagauuacaaaaagaccuaaggugagggaccaggaaggacggaucaauuauuacuggacucuucuggagccaggugauaccauuaucuuugaggcaaacggcaauuugauagccccgugguaugcuuucgcccucucucgcggguuuggauccggcauuaucacaagcaacgcgcccauggacgaaugugaugcaaagugccagaccccucaaggugccauuaauucgucucugccauuccagaacgugcaccccgucacgaucggggaguguccuaaauacguuagauccgcuaaguuaaggauggugacuggacugcggaauaucccaucaauucagagucgcggccucuuuggcgccauagcaggguucaucgaaggagguuggacaggcaugguagacgggugguauggauaccaucaccagaacgagcaaggcagcgguuacgcugccgaucagaaauccacccagaaugcgauuaacgggaucacuaauaaggugaacucugucauagaaaagaugaauacacaguuuaccgccgugggcaaagaguucaacaaacuugagcgaagaauggaaaaucugaacaagaagguugacgauggauucuuggacauuuggacguauaacgcagagcuacuggugcuccuggaaaaugagaggacccuugacuuucacgauagcaacgucaaaaaucuguacgaaaaggugaaaucacaauugaagaacaaugcuaaagagaucggcaacgggugcuucgaguuuuaucauaaguguaauaacgaaugcauggagaguguaaagaauggaacauacgacuaucccaaauacuccgaagagagcaagcucaaccgggagaaaaucgaugguguuaagcuggacucuaugggcguguaucagauuuuagccaucuacucaacugucgcuaguagccuggugcuacucgucucccugggggccauuucuuucuggaugugcucgaauggaagccuucagugucgugugugcauauga

SEQ ID NO: 128410 - RNA, 1698 nt, Artificial Sequence; identical to SEQ ID NO: 128349
  derived and/or modified CDS sequence (opt3) from hemagglutinin__InfluenzaA__ABB02792

SEQ ID NO: 128411 - RNA, 1698 nt, Artificial Sequence; identical to SEQ ID NO: 128347
  derived and/or modified CDS sequence (opt3) from hemagglutinin__InfluenzaA__ABB02803

SEQ ID NO: 128412 - RNA, 1698 nt, Artificial Sequence
  derived and/or modified CDS sequence (opt3) from hemagglutinin__InfluenzaA__ABB02814
augaaggccaaacugcucgugcuucugugcaccuucacagcuacuuacgcagacacgaucuguauuggcuaucacgccaacaauagcaccgauacagucgacacuguuuuggagaagaacgugaccguaacacauuccgugaauuuacuggaagauucucacaacgggaaacuaugccuccugaagggaauagcgccccuucagcuggguaauuguucagucgcuggcuggaucuuggggaacccugagugcgaacuccugauuaguaaagagagcugguccuacaucguggaaaccccaaauccggagaacggaacuuguuaucccggcuacuuugccgacuaugaggaacugagagagcaacucucuucgguuagcucauucgaaagguuugagauuuucccuaaggguaguuccuggccaaaucauacagugaccggggucucugcaagcugcucccacaacggaaagucaaguuuuuaccggaauuuacuguggcuuacgggcaaaaacggcuuguaucccaaucugagcaugucuuacgugaacaauaaggagaaagaaguacuuguucucuggggagugcaucacccuccaaacaucggggaucagcgcgcccuguaccacacugagaacgcuuaugucuccguggugucaagccauuacagucgacguuucacccccgaaauagcaaagagaccuaaagucagggaccaggagggucggaucaauuauuacuggacacuucuggaaccaggcgauacuauuaucuuugaggccaacgggaauuugauugcuccgugguaugccuucgcgcucucucgcggauuuggcuccgguaucauaaccagcaacgcacccauggacgagugugaugccaagugccagacaccucaaggggcuauuaauucgucucugccauuccagaacguucaccccgugaccaucggagaauguccuaaguacguaagauccgccaaauuaaggauggugacgggccugcggaauauuccaucaauccagagucgcggccucuuuggggcaaucgcuggauucauugaggguggcuggacugggauggucgacggaugguauggcuaccaucaccagaacgaacaagguagcggguacgccgcggaucagaaguccacacagaaugccauaaacggcaucaccaauaaagugaacucuguuauugagaagaugaauacucaguuuacagcagugggaaaagaguucaacaagcuagaacgaagaauggagaaucugaacaaaaaggucgacgauggcuucuuggacaucuggaccuauaacgcugaacuacuggugcuccuggagaaugaaaggacgcuugacuuucacgauagcaacguaaagaaucuguacgagaaaguuaagucacaauugaaaaacaaugccaaggaaauagggaacggaugcuucgaguuuuaucauaaaugugacaaugagugcauggaaagugugaagaacgguaccuacgauuaucccaaguacuccgaggaaagcaaacucaaucgggagaagauugacggcgucaaacuggagucuauggggguguaucagaucuuagcuaucuacucaacagucgccaguagccuggugcuacucguuucccugggagcaauuucuuucuggaugugcucgaacggcagccuucagugucguaucugcauuuga

SEQ ID NO: 128413 - RNA, 1698 nt, Artificial Sequence
  derived and/or modified CDS sequence (opt3) from hemagglutinin__InfluenzaA__ABB02825
augaaggccaaacugcucgugcuucugugcaccuucacagcuacuuacgcagacacgaucuguauuggcuaucacgccaacaauagcaccgauacagucgacacuguuuuggagaagaacgugaccguaacacauuccgugaauuuacuggaagauucucacaacgggaaacuaugccuccugaagggaauagcgccccuucagcuggguaauuguucagucgcuggcuggaucuuggggaacccugagugcgaacuccugauuaguaaagagagcugguccuacaucguggaaaccccaaauccggagaacggaacuuguuaucccggcuacuuugccgacuaugaggaacugagagagcaacucucuucgguuagcucauucgaaagguuugagauuuucccuaaggguaguuccuggccaaaucauacagugaccggggucucugcaagcugcucccacaacggaaagucaaguuuuuaccggaauuuacuguggcuuacgggcaaaaacggcuuguaucccaaucugagcaugucuuacgugaacaauaaggagaaagaaguacuuguucucuggggagugcaucacccuccaaacaucggggaucagcgcgcccuguaccacacugagaacgcuuaugucuccguggugucaagccauuacagucgacguuucacccccgaaauagcaaagagaccuaaagucagggaccaggagggucggaucaauuauuacuggacacuucuggaaccaggcgauacuauuaucuuugaggccaacgggaauuugauugcuccgugguaugccuucgcgcucucucgcggauuuggcuccgguaucauaaccagcaacgcacccauggacgagugugaugccaagugccagacaccucaaggggcuauuaauucgucucugccauuccagaacguucaccccgugaccaucggagaauguccuaaguacguaagauccgccaaauuaaggauggugacgggccugcggaauauuccaucaauccagagucgcggccucuuuggggcaaucgcuggauucauugaggguggcuggacugggauggucgacggaugguauggcuaccaucaccagaacgaacaagguagcggguacgccgcggaucagaaguccacacagaaugccauaaacggcaucaccaauaaagugaacucuguuauugagaagaugaauacucaguuuacagcagugggaaaagaguucaacaagcuagaacgaagaauggagaaucugaacaaaaaggucgacgauggcuucuuggacaucuggaccuauaacgcugaacuacuggugcuccuggagaaugaaaggacgcuugacuuucacgauagcaacguaaagaaucuguacgagaaaguuaagucacaauugaaaaacaaugccaaggaaauagggaacggaugcuucgaguuuuaucauaaaugugacaaugagugcauggaaagugugaagaacgguaccuacgauuaucccaaguacuccgaggaaagcaaacucaaucgggagcguauugacggcgucaagcuggagucuauggggguguaucagaucuuagcuaucuacucaacagucgccaguagccuggugcuacucguuucccugggagcaauuucuuucuggaugugcucgaacggcagccuucagugucgcaucugcauuuga

SEQ ID NO: 128414 - RNA, 1701 nt, Artificial Sequence
  derived and/or modified CDS sequence (opt3) from hemagglutinin__InfluenzaA__ABB02836
augaagaccaucauugcccugagcuacauacucugccuuguguucgcucagaaacugcccggcaacgacaauuccacagcaacuuuguguuuagggcaccaugccgucccuaacggaacgaucguuaagaccauuacaaaugaucaaaucgaggugacuaacgcgaccgaacugguacagucuucaaguacagguggcauuugcgacagcccacaccagauccuagauggggagaauuguacccucauagacgcucugcuuggagauccgcagugcgacggcuuucaaaacaaaaagugggaucuguucguggaaagauccaaagccuauucuaauuguuaccccuaugacgucccugauuacgcaucguugaggucacucguggccagcagugguacucuggaguuuaacaaugaauccuucaacuggacagggguuacccagaauggaacgucuagcgcuugcaagcggcgcuccaacaauucauuuuucagucgacugaacuggcucacucauuuaaaguuuaaauauccagcacugaaugugaccaugcccaacaacgagaaguucgacaaacuuuacaucuggggcguccaccauccuggcacagauaaugaccagauuagcuuguaugcccaggcuucugggcguaucacuguguccaccaagagaaaccaacagacaguaauuccaaauaucggaucaaggccccggguucgcgauauaccuagcagaauuaguaucuacuggaccauugugaaaccaggugacauccugcuaaucaacucuacgggcaaucucauugccccgaggggguacuuuaagauacgguccggaaagagcucgaucaugcgcucugacgcgcccauuggcaaauguaaguccgagugcaucacuccuaacgguucaauaccaaaugauaaacccuuccagaacgucaaucgaauuacauauggggcauguccuagauacgugaagcagaacacccugaaacuugccacuggaaugaggaaugugccagaaaagcaaacacggggcaucuuuggcgcuaucgccggguucauugagaacggaugggaagguauggucgacggcugguauggguuucgucaccagaauagugagggaaucggccaggcagcugaucugaaaagcacccaagccgcgauuaaccagauaaaugguaaguugaaccgccucaucgggaagacgaacgagaaauuccaccagauugaaaaggaguucuccgaaguugagggcagaauccaggaccuggaaaaauacguggaggauaccaagaucgacuuauggucuuauaaugccgagcugcucguagcacuugaaaaccaacauacaauugaucugacugacagcgagaugaauaaauuguuugaaaggaccaagaagcagcuacgggagaacgcugaagauaugggaaauggcugcuucaaaauauaccacaagugugacaacgccugcaucgggucaauucgaaauggaacauaugaucaugacguguaccgcgacgaggcucugaacaauagauuucagaucaaaggugucgagcucaagaguggcuacaaagauuggauucuguggaucuccuucgccauaagcugcuuucuucuguguguggcauugcucggguucaucaugugggccugccagaagggaaacauuagguguaauaucugcauuuga

SEQ ID NO: 128415 - RNA, 1701 nt, Artificial Sequence
  derived and/or modified CDS sequence (opt3) from hemagglutinin__InfluenzaA__ABB02847
augaagaccaucauugcccugagcuacauacucugccuuguguucgcucagaaacugcccggcaacgacaauuccacagcaacuuuguguuuagggcaccaugccgucccuaacggaacgaucguuaagaccauuacaaaugaucaaaucgaggugacuaacgcgaccgaacugguacagucuucaaguacagguggcauuugcgacagcccacaccagauccuagauggggagaauuguacccucauagacgcucugcuuggagauccgcagugcgacggcuuucaaaacaaaaagugggaucuguucguggaaagauccaaagccuauucuaauuguuaccccuaugacgucccugauuacgcaucguugaggucacucguggccagcagugguacucuggaguuuaacaaugaauccuucaacuggaucgggguuacacagaauggaaccucuagcgcuugcaagcggcgcuccaacaauucauuuuucagucgacugaacuggcucacgcauuuaaaguuuaaauauccagcacugaaugugacuaugcccaacaacgagaaguucgacaaacuuuacauuuggggcguccaccauccuggcaccgauaaugaccagaucagcuuguaugcccaggcuucugggcguauuacaguguccacuaagagaucacaacagaccguaaucccaaacauaggaagcaggccccggguucgcgauauuccuaguagaaucucuauuuacuggacaaucgugaaaccaggugacauccugcuaauuaauuccaccggcaaccucauagccccgaggggguacuuuaagauccggagcggaaagucgucuauuaugcgcuccgacgcgcccaucggcaaauguaauucagagugcauaacgccuaacgguaguauuccaaaugauaagcccuuccagaacgucaaucgaaucacuuauggggcauguccuagauacgugaaacagaacacacugaaacuugccaccggaaugaggaaugugccagaaaagcaaacucggggcaucuuuggcgcuauugccggguucaucgagaacggaugggaagguauggucgacggcugguauggguuucgucaccagaauagcgagggaauuggccaggcagcugaucugaaguccacacaagccgcgauaaaccagaucaaugguaaauugaaccgccucauugggaagaccaacgagaaguuccaccagaucgaaaaagaguucucugaaguugagggcagaauccaggaccuggaaaaguacguggaggauacgaaaauugacuuauggagcuauaaugccgagcugcucguagcacuugaaaaccaacauaccauagaucugacagacucagagaugaauaaguuguuugaaaggacuaaaaagcagcuacgggagaacgcugaagauaugggaaauggcugcuucaagaucuaccacaaaugugacaacgccugcauugggaguauccgaaauggaaccuaugaucaugacguguaccgcgacgaggcucugaacaauagauuucagauuaagggugucgagcucaaauccggcuacaaggauuggauccuguggaucagcuucgccauaucuugcuuucuucugugugugguuuugcucggguucauuaugugggcaugccagaaaggaaacaucagguguaauauuugcaucuga

SEQ ID NO: 128416 - RNA, 1701 nt, Artificial Sequence; identical to SEQ ID NO: 128095
  derived and/or modified CDS sequence (opt3) from hemagglutinin__InfluenzaA__ABB02858

SEQ ID NO: 128417 - RNA, 1701 nt, Artificial Sequence
  derived and/or modified CDS sequence (opt3) from hemagglutinin__InfluenzaA__ABB02869
augaagaccaucauugcccugagcuacauacucugccuuguguucgcucagaaacugcccgucaacgacaauuccacagcaacuuuguguuuaggccaccaugccguuccuaacgggacgcuggugaagaccaucacaaaugaucacauugagguaacuaacgcgaccgaacuugugcaaucuucaaguacaggaagaaucugcgacagcccacaucagauucucgauggugagaauuguacccugaucgacgcucuacugggcgauccgcacugcgacggguuucagaacaaagaaugggauuuguucgucgagagguccacugccuauucuaauuguuaccccuaugacgugccugauuacgcaucgcuccggucacugguugccagcaguggaacacuggaauuuaacaaugaguccuucaacuggaccggcguggcucagaaugguacgucuagcgcaugcaagcgccgauccauaaaaucauuuuucagucgucucaacugguuacaucaacugaaguauaaguacccagcccuuaaugucacuaugcccaacaaugagaaauuugacaaguuguauaucuggggagugcaccacccuagcaccgauucugaccagauuucccuguacgcucaggccucagggagaguaacaguuagcacuaaaaggagucagcaaaccgugaucccaaacauuggcucucggcccuggguccgcggcguguccagcagaaucucgauauacuggacaauugugaagccuggggauauccuacucauuaacucuaccggaaaucugaucgcgccaagggguuauuucaaaauccgguccggcaagucaaguauuaugcgcagcaacgcaccgauagggaaguguaauuccgaaugcaucacgcccaacggaucuauuccuaaugacaaaccauuucagaacgucaaucgaaucacuuacggcgccugucccagauauguuaagcagaacacacuuaaacuggcuaccgguaugaggaaugugccugagaagcagacucgggggauauucggagccauugcaggcuuuguagaaaacggcugggaggggaugguggacggaugguacgguuuccgucaucaaaauagcgagggcacagggcaggcugccgauuugaaaucaacccaggcggccaucaaccaaaucaauggaaagcucaaccgccugauugagaaaacgaaugaaaaguuucaccagaucgaaaaggaguucagugaagucgagggcaggauucaggacuuagagaaauauguggaagauaccaagauagaccugugguccuacaacgcagagcuccuuguugcucuggaaaaccagcauacaaucgauuugacugacagcgagaugaauaaacuauucgaaagaacccggaagcaacugcgagagaacgccgaggauauggguaaugggugcuuuaaaauuuaucacaagugugacaacgcuugcaucggcucuauccgcaauggaacauacgaucacgacguguacagagaugaagcccucaacaauagguuccagauuaagggcgucgagcugaaaucaggguauaaggacuggauacuuuggaucaguuuugcaauuagcugcuuccuguugugugugguacuccugggauuuaucaugugggccugccagaaagguaacauucgguguaauaucugcauauga

SEQ ID NO: 128418 - RNA, 1701 nt, Artificial Sequence
  derived and/or modified CDS sequence (opt3) from hemagglutinin__InfluenzaA__ABB02880
augaagaccaucauugcccugagcuacauacucugccuuguguucgcucagaaacugcccgucaacgacaauuccacagcaacuuuguguuuaggccaccaugccguuccuaacgggacgcuggugaagaccaucacaaaugaucacauugagguaacuaacgcgaccgaacuugugcaaucuucaaguacaggaagaaucugcgacagcccacaucagauucucgauggugagaauuguacccugaucgacgcucuacugggcgauccgcacugcgacggguuucagaacaaagaaugggauuuguucgucgagagguccacugccuauucuaauuguuaccccuaugacgugccugauuacgcaucgcuccggucacugguugccagcaguggaacacuggaauuuaacaaugaguccuucaacuggaccggcguggcucagaaugguacgucuagcgcaugcaagcgccgauccauaaaaucauuuuucagucgucucaacugguuacaucaacugaaguauaaguacccagcccuuaaugucacuaugcccaacaaugagaaauuugacaaguuguauaucuggggagugcaccacccuagcaccgauucugaccagauuucccuguacgcucaggccucagggagaguaacaguuagcacuaaaaggagucagcaaaccgugaucccaaacauuggcucucggcccuggguccgcggcguguccagcagaaucucgauauacuggacaauugugaagccuggggauauccuacucauuaacucuaccggaaaucugaucgcgccaagggguuauuucaaaauccgguccggcaagucaaguauuaugcgcagcaacgcaccgauagggaaguguaauuccgaaugcaucacgcccaacggaucuauuccuaaugacaaaccauuucagaacgucaaucgaaucacuuacggcgccugucccagauauguuaagcagaacacacuuaaacuggcuaccgguaugaggaaugugccugagaagcagacucgggggauauucggagccauugcaggcuuuaucgaaaacggcugggaggggaugguagacggaugguacgguuuccgucaucaaaauagcgagggcacagggcaggcugccgauuugaaaucaacccaggcggccaucaaccaaauuaaucgcaagcucaacagacugaucgagaaaacgaaugaaaaguuucaccagauugaaaaggaguucagugaaguggagggaaggauacaggacuuagagaaauaugucgaagauaccaagaucgaccugugguccuacaacgcagagcuccuuguggcucuggaaaaccagcauacaauugauuugacugacagcgagaugaauaaacuauucgaacggacccgaaagcaacugcgcgagaacgccgaggauaugggcaaugguugcuuuaaaaucuaucacaagugugacaacgcuugcaucgggucuauuagaaauggcacauacgaucacgacguuuacagggaugaagcccucaacaaucgguuccagauaaagggaguggagcugaaaucaggcuauaaggacuggauccuuuggauuaguuuugcaaucagcugcuuccuguugugugucgugcuccugggguuuauuaugugggccugccagaaaggaaacauccgcuguaauauaugcaucuga

SEQ ID NO: 128419 - RNA, 1701 nt, Artificial Sequence
  derived and/or modified CDS sequence (opt3) from hemagglutinin__InfluenzaA__ABB02891
augaagaccaucauugcccugagcuacauacucugccuuguguucgcucagaaacugcccgucaacgacaauuccacagcaacuuuguguuuaggccaccaugccguuccuaacgggacgcuggugaagaccaucacaaaugaucacauugagguaacuaacgcgaccgaacuugugcaaucuucaaguacaggaagaaucugcgacagcccacaucagauucucgauggugagaauuguacccugaucgacgcucuacugggcgauccgcacugcgacggguuucagaacaaagaaugggauuuguucgucgagagguccacugccuauucuaauuguuaccccuaugacgugccugauuacgcaucgcuccggucacugguugccagcaguggaacacuggaauuuaacaaugaguccuucaacuggaccggcguggcucagaaugguacgucuagcgcaugcaagcgccgauccauaaaaucauuuuucagucgucucaacugguuacaucaacugaaguauaaguacccagcccuuaaugucacuaugcccaacaaugagaaauuugacaaguuguauaucuggggagugcaccacccuagcaccgauucugaccagauuucccuguacgcucaggccucagggagaguaacaguuagcacuaaaaggagucagcaaaccgugaucccaaacauuggcucucggcccuggguccgcggcguguccagcaucauaucgauuuacuggacaaucgugaagccuggggauauucuacucaucaacucuaccggaaaucugaucgcgccaagagguuauuucaaaauuagguccggcaagucaaguauaaugcggagcaacgcaccgaucggggaauguaauuccgagugcauuacgcccaacggaucuaucccuaaugacaagccauuucagaacgucaaucgcauaacuuacggcgccuguccccgauauguuaaacagaacacacuuaagcuggcuaccgguaugagaaaugugccugaaaaacagacuagggggauuuucggagccaucgcaggcuuuaucgagaacggcugggaggggaugguagacggaugguacgguuuccggcaucaaaauagcgaaggcacagggcaggcugccgauuugaagucaacccaggcggccauuaaccaaaucaauggaaaacucaaccgucugauugagaagacgaaugaaaaauuucaccagauagagaaggaguucagugaaguggagggccgcauccaggacuuagaaaaguaugucgaggauaccaaaauugaccugugguccuacaacgcagaacuccuuguggcucuggagaaccagcauacaaucgauuugacugacagcgaaaugaauaagcuauucgagagaaccaggaaacaacugcgggagaacgccgaagauauggguaaugggugcuuuaagaucuaucacaaaugugacaacgcuugcauuggcucuauacgaaauggaacauacgaucacgacguuuaccgcgaugaggcccucaacaauagauuccagaucaagggcguggaacugaagucaggguauaaagacuggauucuuuggaucaguuuugcaauuagcugcuuccuguugugugucgugcuccugggauuuaucaugugggccugccagaaggguaacauaagguguaauaucugcauuuga

SEQ ID NO: 128420 - RNA, 1701 nt, Artificial Sequence
  derived and/or modified CDS sequence (opt3) from hemagglutinin__InfluenzaA__ABB02902
augaagaccaucauugcccugagcuacauacucugccuuguguucgcucagaaacugcccgucaacgacaauuccacagcaacuuuguguuuaggccaccaugccguuccuaacgggacgcuggugaagaccaucacaaaugaucacauugagguaacuaacgcgaccgaacuugugcaaucuucaaguacaggaagaaucugcgacagcccacaucagauucucgauggugagaauuguacccugaucgacgcucuacugggcgauccgcacugcgacggguuucagaacaaagaaugggauuuguucgucgagagguccacugccuauucuaauuguuaccccuaugacgugccugauuacgcaucgcuccggucacugguugccagcaguggaacacuggaauuuaacaaugaguccuucaacuggaccggcguggcucagaaugguacgucuagcgcaugcaagcgccgauccauaaaaucauuuuucagucgucucaacugguuacaucaacugaaguauaaguacccagcccuuaaugucacuaugcccaacaaugagaaauuugacaaguuguauaucuggggagugcaccacccuagcaccgauucugaccagauuucccuguacgcucaggccucagggagaguaacaguuagcacuaaaaggagucagcaaaccgugaucccaaacauuggcucucggcccuggguccgcggcguguccagcagaaucucgauauacuggacaauugugaagccuggggauauccuacucauuaacucuaccggaaaucugaucgcgccaagggguuauuucaaaauccgguccggcaagucaaguauuaugcgcagcaacgcaccgauagggaaguguaauuccgaaugcaucacgcccaacggaucuauuccuaaugacaaaccauuucagaacgucaaucgaaucacuuacggcgccugucccagauauguuaagcagaacacacuuaaacuggcuaccgguaugaggaaugugccugagaagcagacucgggggauauucggagccauugcaggcuuuaucgaaaacggcugggaggggaugauggacggaugguacgguuuccgucaucaaaauagcgagggcacagggcaggcugccgauuugaaaucaacccaggcggccaucaaccaaauuaauggaaagcucaaccgccugaucgagaaaacgaaugaaaaguuucaccagauugaaaaggaguucagugaaguagagggcagaauacaggacuuagagaaauauguggaagauaccaagaucgaccugugguccuacaacgcagagcuccuugucgcucuggaaaaccagcauacaauugauuugacugacagcgagaugaauaaacuauucgaaaggacccggaagcaacugcgagagaacgccgaggauauggguaaugggugcuuuaaaaucuaucacaagugugacaacgcuugcaucggcucuauucgcaauggaacauacgaucacgacguguacagagaugaagcccucaacaauagguuccagauaaagggcguugagcugaaaucaggguauaaggacuggauccuuuggauuaguuuugcaaucagcugcuuccuguugugugugguccuccugggauuuauuaugugggccugccagaaagguaacauccgguguaauauaugcaucuga

SEQ ID NO: 128421 - RNA, 1698 nt, Artificial Sequence
  derived and/or modified CDS sequence (opt3) from hemagglutinin__InfluenzaA__ABB02913
augaaggccaaacugcucgugcuucugugcaccuucacagcuacuuacgcagacacgaucuguauuggcuaucacgccaacaauagcaccgauacagucgacacuguuuuggagaagaacgugaccguaacacauuccgugaauuuacuggaagauucucacaacgggaaacuaugccuccugaagggaauagcgccccuucagcuggguaauuguucagucgcuggcuggaucuuggggaacccugagugcgaacuccugauuaguaaagagagcugguccuacaucguggaaaccccaaauccggagaacggaacuuguuaucccggcuacuuugccgacuaugaggaacugagagagcaacucucuucgguuagcucauucgaaagguuugagauuuucccuaaggguaguuccuggccaaaucauacagugaccggggucucugcaagcugcucccacaacggaaagucaaguuuuuaccggaauuuacuguggcuuacgggcaaaaacggcuuguaucccaaucugagcaugucuuacgugaacaauaaggagaaagaaguacuuguucucuggggagugcaucgcccuccaaacaucggggaucagcgagcccuguaccacacugagaacgcuuaugucuccguggugucaagccacuacagucguagauucacccccgaaauagcaaagaggccuaaaguccgggaccaggagggucgcaucaauuauuacuggacacuucuggaaccaggcgauacuauuaucuuugaggccaacgggaauuugauugcuccgugguaugccuucgcgcucucuagaggauuuggcuccgguaucauaaccagcaacgcacccauggacgagugugaugccaagugccagacaccucaaggggcuauuaauucgucucugccauuccagaacguucaucccgugaccaucggagaauguccuaaguacguaagguccgccaaauuacggauggugacgggccugcgcaauauuccaucaauccagagucgaggccucuuuggggcaaucgcuggauucauugaggguggcuggacugggauggucgacggaugguauggcuaccaccaucagaacgaacaagguagcggguacgccgcggaucagaaguccacacagaaugccauaaacagaaucaccaauaaagugaacucuguuauugagaagaugaauacucaguuuacagcagugggcaaagaguucaacaagcuagaaaggcggauggagaaucugaacaaaaaggucgacgauggauucuuggacaucuggaccuauaacgcugaacuacuggugcuccuggagaaugaacguacgcuugacuuucacgauagcaacguaaagaaucuguacgagaaaguuaagucacaauugaaaaacaaugccaaggaaauaggcaacgggugcuucgaguuuuaucacaaauguaauaacgagugcauggaaagugugaagaauggaaccuacgacuaucccaaguacuccgaggaaagcaaacucaaccgcgagaagauugauggugucaaacuggagucuaugggcguguaucagaucuuagcuaucuacucaacagucgccaguagccuggugcuacucguuucccugggggcaauuucuuucuggaugugcucgaauggaagccuucaguguagaaucugcauuuga

SEQ ID NO: 128422 - RNA, 1698 nt, Artificial Sequence
  derived and/or modified CDS sequence (opt3) from hemagglutinin__InfluenzaA__ABB02924
augaaggugaaacugcucguccuucugugcaccuucacagccacuuacgcugacacgaucuguauuggcuaucacgcaaacaauagcaccgauacaguugacacuguguuggagaagaacguaaccgugacacauuccgucaauuuacuggaagauucucacaacgggaaacuaugccuccugaagggaauagcgccccuucagcuggguaauuguucaguggccggcuggaucuuggggaacccugagugcgaacuccugauuaguaaagagagcugguccuacaucguugaaaccccaaauccggagaacggaacuuguuaucccggcuacuuugcugacuaugaggaacugagagagcaacucucuucggugagcucauucgaaagguuugagauuuucccuaaggagaguuccuggccaaaucauacagucaccggugugucugccagcugcucccacaacgggaagucaaguuuuuaccggaauuuacuguggcuuacgggcaaaaacggauuguaucccaaucugagcaagucuuacgcaaacaauaaagaaaaggagguucuaguacucuggggcgugcaucacccuccaaacaucggggaucagcgcgcccuguaccacacugaaaacgcuuaugucuccguggugucaagccauuacagucgacguuucacccccgagauagcaaaaagaccuaaggucagggaccaggaaggacggaucaauuauuacuggacacuucuggagccaggugauacuauuaucuuugaggccaacggcaauuugauugcuccgcgcuaugccuucgcgcucucuagaggguuuggauccggcaucauaaccagcaacgcacccauggacgaaugugaugccaagugccagacaccucaaggugcuauuaauucgucucugccauuccagaacguucaccccgugaccaucggggaguguccuaaauacguaagguccgccaaguuacggauggugacgggacugcgcaauauuccaucaauccagagucgaggccucuuuggcgcaaucgcuggguucauugaaggagguuggacuggcauggucgacgggugguauggauaccaucaccagaacgagcaaggcagcgguuacgccgcggaucagaaauccacacagaaugccauaaacgggaucaccaauaaggugaacgcaguuauugaaaagaugaauacucaguuuacagcugugggcaaagaguucaacaaacuugagagaaggauggaaaaucugaacaagaaggucgacgauggauucuuggacaucuggaccuauaacgccgagcuacuggugcuccuggaaaaugagcggacgcuugacuuucacgauucuaacguuaaaaaucuguacgaaaagguaaaaagccaauugaagaacaaugcuaaagagauaggcaacgggugcuucgaguuuuaucauaaguguaaugacgaaugcauggagucagugaagaacggaaccuacgauuaucccaaauacagugaagaguccaagcucaaucgugagaaaauugacggugucaagcuggaaagcaugggcguguaucagaucuuagccaucuacucuacagucgcaucaagucuggugcuacucguuagccugggggccauuuccuucuggaugugcucuaacggaucgcuucagugucgcaucugcauuuga

SEQ ID NO: 128423 - RNA, 1698 nt, Artificial Sequence
  derived and/or modified CDS sequence (opt3) from hemagglutinin__InfluenzaA__ABB02936
augaaggccaaacugcucgugcuucugugcaccuucacagcuacuuacgcagacacgaucuguauuggcuaucacgccaacaauagcaccgauacagucgacacuguuuuggagaagaacgugaccguaacacauuccgugaauuuacuggaagauucucacaacgggaaacuaugccuccugaagggaauagcgccccuucagcuggguaauuguucagucgcuggcuggaucuuggggaacccugagugcgaacuccugauuaguaaagagagcugguccuacaucguggaaaccccaaauccggagaacggaacuuguuaucccggccauuuugccgacuacgaggaacugagagagcaacucucuucgguuagcucauucgaaagguuugagauuuucccuaaggguaguuccuggccaaaucacacagugaccggggucucugcaagcugcucccauaacggaaagucaaguuuuuaucggaauuuacuguggcuuacgggcaaaaacggcuuguaccccaaucugagcaugucuuaugugaacaauaaggagaaagaaguacuuguucucuggggagugcaccacccuccaaacaucggggaucagcgcgcccuguaccauacugagaacgcuuacgucuccguggugucaagccacuauagucgacguuucacccccgaaauagcaaagagaccuaaagucagggaccaggagggucggaucaauuacuauuggacacuucuggaaccaggcgauacuauuaucuuugaggccaacgggaauuugauugcuccgugguacgccuucgcgcucucucgcggauuuggcuccgguaucauaaccagcaacgcacccauggacgagugugaugccaagugccagacaccucaaggggcuauuaauucgucucugccauuccagaacguucaucccgugaccaucggagaauguccuaaguauguaagauccgccaaauuaaggauggugacgggccugcggaauauuccaucaauccagagucgcggccucuuuggggcaaucgcuggauucauugaggguggcuggacugggauggucgacggaugguacggcuaucaccaccagaacgaacaagguagcggguacgccgcggaucagaaguccacacagaaugccauaaacggcaucaccaauaaagugaacucuguuauugagaagaugaauacucaguuuacagcagugggaaaagaguucaacaagcuagaacgaagaauggagaaucugaacaaaaaggucgacgauggcuucuuggacaucuggaccuacaacgcugaacuacuggugcuccuggagaaugaaaggacgcuugacuuucaugauagcaacguaaagaaucuguaugagaaaguuaagucacaauugaaaaacaaugccaaggaaauagggaacggaugcuucgaguuuuaccacaaauguaauaacgagugcauggaaagugugaagaaugguaccuaugacuaccccaaguauuccgaggaaagcaaacucaaccgggagaagauugauggcgucaaacuggagucuauggggguguaccagaucuuagcuaucuauucaacagucgccaguagccuggugcuacucguuucccugggagcaauuucuuucuggaugugcucgaauggcagccuucagugucguaucugcauuuga

SEQ ID NO: 128424 - RNA, 1701 nt, Artificial Sequence
  derived and/or modified CDS sequence (opt3) from hemagglutinin__InfluenzaA__ABB02947
augaagaccaucauugcccugagcuacauacucugccuuguguucgcucagaaaauccccggcaacgacaauuccacagcaacucuguguuuggggcaccaugccgucccuaacggaacguuaguuaagaccauuacaaaugaucaaaucgaggugacuaacgcgaccgaacugguacagucuucaaguacagguagaauuugcgacagcccacacaggauccuagauggcgagaauuguacccucauagacgcucugcuuggggauccgcauugcgacggauuucagaacaaagaaugggaucuguucguggagcgguccaaggccuauucuaauuguuaccccuaugacguccaggauuacgcaucguugcgcucacucguggccagcaguggcacucuggaauuuaacaaugaguccuucaacuggacagguguugcucaaaaugggaccucuuaugcaugcaaacgacguagcaucaaguccuuuuucucaagacugaacuggcuccaccaguuaaaguacaaauauccugcccugaaugugacgaugccaaacaaugacaaguuugauaaacuuuacauuuggggaguccaucaccccaguacugacagcgaucagaccucuuuguacgcucaggccuccggcagggugacaguaucaacuaagcggagccaacagaccguuaucccuaacauuggcagucgcccaugggugagaggggucucuuccaggaucagcauauauuggacaauugugaaacccggagacauccugcuaauuaacucgaccgguaaucucaucgcgccucggggcuacuucaagauccgcucugggaaguccucaauuaugcgaagugacgcaccaauaggaaaauguaacagcgagugcaucacgccgaauggcuccauucccaacgauaagccuuuucagaaugugaacagaaucacuuauggugccuguccaagguacgucaaacagaauacacugaagcuggcuaccgggaugcggaacguucccgaaaaacaaacucguggaauauucggcgccauugcaggcuuuaucgagaaugggugggaaggaaugguggacgguugguauggcuuccgccaccagaacucugaggggacaggacaggcugccgaucuuaagagcacccaagcggccaucaaucagauuaacggcaaauugaauagacucaucgagaagacgaacgaaaaguuucaucagauugagaaagaguucucagaaguagaagguaggauacaggaccuggagaaguacguggaggauaccaaaaucgacuuauggaguuauaaugcagaacugcucgucgcucuugagaaccaacacacaauugaucugacugacuccgaaaugaacaaguuguucgagcggacccgaaaacagcuacgcgaaaaugccgaggauauggggaacggcugcuuuaagaucuaccauaagugugacaaugcuugcaucggaagcauuagaaacggcacauacgaucacgacguguauagggacgaggcccugaauaaccgguuccagauaaaagggguugaacucaagucuggauacaaagauuggauccuguggauuucauuugcaaucaguugcuuccuucuguguguggucuugcucgguuuuauuaugugggccugccagaagggcaauauccgcuguaacauaugcaucuga

SEQ ID NO: 128425 - RNA, 1701 nt, Artificial Sequence; identical to SEQ ID NO: 128234
  derived and/or modified CDS sequence (opt3) from hemagglutinin__InfluenzaA__ABB02958

SEQ ID NO: 128426 - RNA, 1701 nt, Artificial Sequence; identical to SEQ ID NO: 128234
  derived and/or modified CDS sequence (opt3) from hemagglutinin__InfluenzaA__ABB02969

SEQ ID NO: 128427 - RNA, 1701 nt, Artificial Sequence
  derived and/or modified CDS sequence (opt3) from hemagglutinin__InfluenzaA__ABB02980
augaagaccaucauugcccugagcuacauacucugccuuguguucgcucagaaacugcccggcaacgacaauuccacagcaacuuuguguuuagggcaccaugccgucccuaacggaacgcugguuaagaccaucacaaaugaucaaauugaggugacuaacgcgaccgaacuuguacagucuucaaguacagguagaaucugcgacagcccacaccagauucucgauggcgagaauuguacccugaucgacgcucuacugggggauccgcauugcgacggauuucagaacaaagaaugggauuuguucguggagagguccaaggccuauucuaauuguuaccccuaugacgucccugauuacgcaucgcuccggucacugguggccagcaguggcacucuggaauuuaacaaugaguccuucaacuggacagguguugcucaaaaugggaccucuagcgcaugcaaacgccgauccaacaagucauuuuucagucgucucaauugguuacaccagcugaaguauaaauacccagcccuuaacgugacgaugcccaauaacgagaaguuugacaaauuguauauauggggaguccaucacccuagcacugauucugaccagaucucccuguacgcucaggccucaggcagagugaccguaagcacaaagaggagucaacagacuguuauuccaaacaucggcucucggcccugggugcgcggggucuccagcauuaucucgauauacuggaccauugugaaaccuggagauauccuacucauuaauucuacagguaaccugaucgcgccaagaggcuauuucaagaucagguccgggaagucaaguauuaugcggagcgacgcaccgauaggaaaauguaauuccgaaugcaucacccccaacggcucuauuccuaaugacaagccauuucagaacgugaaucgcaucacguacggugccuguccccgauaugucaaacagaacacucuuaagcuggcuacagggaugagaaauguuccugagaaacaaaccaggggaauauucggcgccauugcaggcuuuaucgaaaacgggugggagggaaugguggaugguugguacggcuuccggcaccagaauagcgaggggacuggacaggcugccgacuugaagucaacacaagcggccaucaaccagauuaauggcaaacucaaccgucugaucgaaaagaccaaugagaaguuucaucagauugaaaaagaguucagugaaguagagggucgcauacaggauuuagagaaguauguggaagacacgaaaaucgaucugugguccuacaacgcagagcuccuugucgcucuggaaaaccaacacaccauugacuugacagauagcgagaugaauaagcuauucgaaagaacuaaaaagcagcugagggagaacgccgaggacauggggaauggcugcuuuaagaucuaucauaaaugugauaacgcuugcaucggaucuauucggaauggcaccuacgaccacgauguguaccgagacgaagcccucaacaaucgcuuccagauaaaggggguugagcugaaaucaggauauaaggacuggauccuuuggauuaguuuugcaaucagcugcuuccuguugugugugguccuccuggguuuuauuaugugggccugccagaaaggcaacaucagauguaauauaugcaucuga

SEQ ID NO: 128428 - RNA, 1701 nt, Artificial Sequence
  derived and/or modified CDS sequence (opt3) from hemagglutinin__InfluenzaA__ABB02991
augaagaccaucauugcccugagcuacauacucugccuuguguucgcucagaaacugcccggcaacgacaauuccacagcaacuuuguguuuagggcaccaugccgucccuaacggaacgcugguuaagaccaucacaaaugaucaaauugaggugacuaacgcgaccgaauugguacagucuucaaguacagguagaaucugcgacaauccacaccagauucucgauggcgagaacuguacccugaucgacgcccuucugggggauccgcauugcgacggauuucagaauaaagaaugggauuuguucguggagaggagcaaggcuuauuccaacuguuaccccuaugacgucccugauuacgcaucucuccggucgcugguggccucaagcggcacucuggaauuuaauaacgagaguuucaauuggacagguguugcucaaaacgggaccuccucugcaugcaaacgccgaagcaauaaguccuuuuucucacgucucaacugguuacaccagcugaaguauaaauacccagcccuuaaugugacgaugcccaacaacgagaaguuugacaaauuguauauauggggaguccaucacccuaguacugauagcgaccagaucucucuguacgcucaggccuccggcagagugaccguaucaacaaagaggagccaacagacuguuauuccaaauaucggcagucggcccugggugcgcggggucucuuccauuaucagcauauacuggaccauugugaaaccuggagauauccuacucauuaacucgacagguaaucugaucgcgccaagaggcuauuucaagaucaggucugggaaguccucaauuaugcggagugacgcaccgauaggaaaauguaacagcgaaugcaucacccccaauggcuccauuccuaacgacaagccauuucagaaugugaaccgcaucacguacggugccuguccccgauaugucaaacagaauacucuuaagcuggcuacagggaugagaaacguuccugagaaacaaaccaggggaauauucggcgccauugcaggcuuuaucgaaaaugggugggagggaaugguggaugguugguacggcuuccggcaccagaacucugaggggacuggacaggcugccgaccuaaagagcacacaagcggccaucaaucagauuaacggcaaacucaaucgucugaucgaaaagaccaacgagaaguuucaucagauugaaaaagaguucucagaaguagagggucgcauacaggauuuagagaaguauguggaagacacgaaaaucgaucuguggaguuacaacgcagagcuccuugucgcucuggaaaaucaacacaccauugacuugacagauuccgagaugaacaagcuauucgaaagaacuaaaaagcagcugagggagaaugccgaggacauggggaacggcugcuuuaagaucuaucauaaaugugauaaugcuugcaucggaagcauucggaacggcaccuacgaccacgauguguaccgagacgaagcccucaauaaccgcuuccagauaaaggggguugagcugaaaucuggauauaaggacuggauccuuuggauuucauuugcaaucaguugcuuccuguugugugugguccuccuggguuuuauuaugugggccugccagaaaggcaauaucagauguaacauaugcaucuga

SEQ ID NO: 128429 - RNA, 1701 nt, Artificial Sequence
  derived and/or modified CDS sequence (opt3) from hemagglutinin__InfluenzaA__ABB03002
augaagaccaucauugcccugagcuacauacucugccuuguguucgcucagaaacugcccggcaacgacaauuccacagcaacuuuguguuuagggcaccaugccgucccuaacggaacgcugguuaagaccaucacaaaugaucaaauugaggugacuaacgcgaccgaacuuguacagucuucaaguacagguagaaucugcaauagcccacaccagauucucgacggcgagaacuguacccugaucgaugcucuacugggggacccgcauugcgauggauuucagaauaaagaaugggacuuguucguggagagguccaaggccuauucuaacuguuaccccuaugaugucccugacuacgcaucgcuccggucacugguggccagcaguggcacucuggaauuuaauaacgaguccuucaauuggacagguguugcucaaaacgggaccucuagcgcaugcaaacgccgauccaauaagucauuuuucagucgucucaacugguuacaccagcugaaguauaaauacccagcccuuaaugugacgaugcccaacaacgagaaguuugauaaauuguauauauggggaguccaucacccuagcacugacucugaucagaucucccuguacgcucaggccucaggcagagugaccguaagcacaaagaggagucaacagacuguuauuccaaauaucggcucugggcccugggugcggggagucuccagccgcauuucgaucuacuggaccauagugaaaccuggugacauucuacucaucaacucuacaggcaaucugauugcgccaagaggguauuucaagaucagguccggaaagucaaguaucaugcggagcgaugcaccgauuggcaaauguaacuccgaaugcauaacccccaaugguucuaucccuaacgacaagccauuucagaaugugaaccgcauuacguacggggccuguccccgauaugucaaacagaauacucuuaagcuggcuacaggaaugagaaacguuccugagaaacaaaccaggggcaucuucggcgccauagcaggguuuauugaaaauggaugggaggguaugguggacggcugguacggguuccggcaccagaacagcgagggaacuggccaggcugccgauuugaagucaacacaagcggccaucaaucagaucaacgguaaacucaaucgucugauugaaaagaccaacgagaaguuucaucagaucgaaaaagaguucagugaaguagaggggcgcauucaggacuuagagaaguauguggaagauacgaaaauagaccugugguccuacaacgcagagcuccuugucgcucuggaaaaucaacacaccaucgauuugacagacagcgagaugaacaagcuauucgaaagaacuaaaaagcagcugagggagaaugccgaggauaugggcaacggaugcuuuaagauuuaucauaaaugugacaaugcuugcaucggcucuauccggaacgggaccuacgaucacgacguguaccgagaugaagcccucaauaaccgcuuccagauuaagggaguugagcugaaaucagguuauaaggacuggauacuuuggaucaguuuugcaauuagcugcuuccuguugugugugguccuccugggcuuuaucaugugggccugccagaaagggaauauuagauguaacaucugcauauga

SEQ ID NO: 128430 - RNA, 1701 nt, Artificial Sequence
  derived and/or modified CDS sequence (opt3) from hemagglutinin__InfluenzaA__ABB03013
augaagaccaucauugcccugagcuacauacucugccuuguguucgcucagaaacugcccggcaacgacaauuccacagcaacuuuguguuuagggcaccaugccgucccuaacggaacgcugguuaagaccaucacaucugaucaaauugaggugacuaaugcgaccgaacugguacagucaaguagcacagguagaaucugcgacuccccacacaggauucucgauggcgagaacuguacccugaucgacgcuuugcugggggauccgcauugcgacggauuucagaauaaagaaugggauuuguucguggagcggucuaaggccuauucgaacuguuaccccuaugacgucccugauuacgcaucacuccgcagccugguggccaguuccggcacucuggaauuuaauaacgagucuuucaauuggacagguguugcucagaacgggaccagcuuugcaugcaaacgacguuccauaaagucauucuuuaguagacucaauugguuacaccaacugaaguauaaauacccagcccuuaacgugacgaugcccaauaacgacaaguucgauaaauuguauaucuggggaguccaucacccuggcacugacagcgaucagaccucucuguacgcucaggccuccggcagggugacaguaucaacuaagcggagccagcaaaccguuauuccaaauaucgggaguggacccugggugcgcggugucucuuccagaauuagcaucuacuggacaauagugaaaccuggcgacauucuacucaucaacucgaccgggaaccugauugcgccaaggggauauuuuaagauccggucuggcaaguccucaaucaugcgcagugacgcaccgauugguaaauguaauagcgagugcauaacgcccaacggguccaucccuaaugauaagccauuccagaacgugaaucgaauuacuuacggagccugucccagauaugucaaacagaacacacuuaagcuggcuaccggcaugaggaauguuccugaaaaacagacucggggcaucuuuggggccauagcaggauucauugagaacgguugggaaggcaugguggacgggugguacggauuucgucaccaaaauucugagggcacaggucaggcugccgaucuuaagagcacccaggcggccaucaaccaaaucaaugggaaacucaaccgccugauugagaagacgaaugaaaaguuccaucagaucgagaaagaguucaccgaaguagaaggcaggauucaggacuuagagaaguauguggaggauacaaaaauagaccuguggucauacaacgcagaacuccuugucgcucuggagaaucagcacacuaucgauuugaccgacagugaaaugaacaagcuauuugagagaacacggaaacaacugcgagaaaacgccgaggauaugggaaauggcugcuucaagauuuaucauaagugugacaacgcuugcaucggguccauccgcaauggaacuuacgaucacgacguguacagagacgaggcccucaacaauagguuucagauuaaagguguugaacuaaagagcggcuauaaagauuggauacuuuggaucucuuucgcaaccucaugcuuucuguugugugugguccuccugggguucauuaugugggccugccagaagggaaacauccgguguaauauuugcaucuga

SEQ ID NO: 128431 - RNA, 1701 nt, Artificial Sequence
  derived and/or modified CDS sequence (opt3) from hemagglutinin__InfluenzaA__ABB03024
augaagaccaucauugcccugagcuacauacucugccuuguguucgcucagaaacugcccggcaacgacaauuccacagcaacuuuguguuuagggcaccaugccgucccuaacggaacgcugguuaagaccaucacaaaugaucaaauugaggugacuaacgcgaccgaacuuguacagucuucaaguacagguagaaucugcgacagcccacaccagauucucgauggcgagaauuguacccugaucgacgcucuacugggggauccgcauugcgacggauuucagaacaaagaaugggauuuguucguggagagguccaaggccuauucuaauuguuaccccuaugacgucccugauuacgcaucgcuccggucacugguggccagcaguggcacucuggaauuuaacaaugaguccuucaacuggacagguguugcucaaaaugggaccucuagcgcaugcaaacgccgauccaacaagucauuuuucagucgucucaauugguuacaccagcugaaguauaaauacccagcccuuaacgugacgaugcccaauaacgagaaguuugacaaauuguauauauggggaguccaucacccuagcacugauucugaccagaucucccuguacgcucaggccucaggcagagugaccguaagcacaaagaggagucaacagacuguuauuccaaacaucggcucucggcccuggauucgcgggguguccagcagaaucucgauauacuggaccauugucaaaccuggagauauccuacucauuaauucuacagguaaccugaucgcgccaaggggcuauuucaagauccgguccgggaagucaaguauuaugcgcagcgacgcaccgauaggaaaauguaauuccgaaugcaucacccccaacggcucuauuccuaaugacaagccauuucagaacgugaaucgaaucacguacggugccugucccagauaugugaaacagaacacucuuaagcuggcuacagggaugaggaaugucccugagaaacaaacccggggaauauucggcgccauugcaggcuuuaucgaaaacgggugggagggaaugguugaugguugguacggcuuccgucaccagaauagcgaggggacuggacaggcugccgacuugaagucaacacaagcggccaucaaccagauuaauggcaaacucaaccgccugaucgaaaagaccaaugagaaguuucaucagauugaaaaagaguucagugaaguggaggguagaauacaggauuuagagaaguauguagaagacacgaaaaucgaucugugguccuacaacgcagagcuccuuguggcucuggaaaaccaacacaccauugacuugacagauagcgagaugaauaagcuauucgaaaggacuaaaaagcagcugcgggagaacgccgaggacauggggaauggcugcuuuaagaucuaucauaaaugugauaacgcuugcaucggaucuauucgaaauggcaccuacgaccacgaugucuaccgcgacgaagcccucaacaauagauuccagauaaaggggguggagcugaaaucaggauauaaggacuggauccuuuggauuaguuuugcaaucagcugcuuccuguuguguguugugcuccuggguuuuauuaugugggccugccagaaaggcaacaucagguguaauauaugcaucuga

SEQ ID NO: 128432 - RNA, 1701 nt, Artificial Sequence
  derived and/or modified CDS sequence (opt3) from hemagglutinin__InfluenzaA__ABB03035
augaagaccaucauugcccugagcuacauacucugccuuguguucgcucagaaacugcccggcaacgacaauuccacagcaacuuuguguuuagggcaccaugccgucccuaacggaacgcugguuaagaccaucacaucugaucaaauugaggugacuaaugcgaccgaacugguacagucaaguagcacagguagaaucugcgacuccccacacaggauucucgauggcgagaacuguacccugaucgacgcuuugcugggggauccgcauugcgacggauuucagaauaaagaaugggauuuguucguggagcggucuaaggccuauucgaacuguuaccccuaugacgucccugauuacgcaucacuccgcagccugguggccaguuccggcacucuggaauuuaauaacgagucuuucaauuggacagguguugcucagaacgggaccagcuuugcaugcaaacgacguuccauaaagucauucuuuaguagacucaauugguuacaccaacugaaguauaaauacccagcccuuaacguggcuaugcccaauaacgacaaguucgauaaauuguauaucuggggaguccaucacccuggcacggacagcgaucagacuucucuguacgcccaggcguccggcagggugaccguaucaacaaagcggagccagcaaacuguuauuccaaauaucgggagucgccccugggugagaggagucucuuccaggauuagcaucuacuggaccauagugaaaccuggugacauucuacucaucaacucgacaggcaaccugauugcaccacggggguauuuuaagauccgcucuggaaaguccucaaucaugcgaagugacgccccgauuggcaaauguaauagcgagugcauaacccccaacgguuccaucccuaaugauaagccauuccagaacgugaauagaauuacguacggggcuugucccagguaugucaaacagaacacucuuaagcuggccacaggaaugcggaauguuccugaaaaacagacccguggcaucuuuggcgcaauagcuggguucauugagaacggaugggaagguaugguggacggcugguacggguuucgccaccaaaauucugagggaacuggccaggccgcggaucuuaagagcacacaggccgcaaucaaccaaaucaaugguaaacucaacagacugauugagaagaccaaugaaaaguuccaucagaucgagaaagaguucacggaaguagaagggaggauucaggacuuagagaaguauguggaggauaccaaaauagaccuguggucauacaacgcugaacuccuugucgcccuggagaaucagcacacaaucgauuugacugacagugaaaugaacaagcuauuugagcggacccgaaaacaacugcgcgaaaacgcugaggauaugggcaauggaugcuucaagauuuaucauaagugugacaacgccugcaucggcuccaucagaaaugggacauacgaucacgacguguacagggacgaggcacucaacaaucgguuucagauuaaaggaguugaacuaaagagcgguuauaaagauuggauacuuuggaucucuuucgccacuucaugcuuucuguugugugugguccuccugggcuucauuaugugggcuugccagaaggggaacauccgcuguaauauuugcaucuga

SEQ ID NO: 128433 - RNA, 1701 nt, Artificial Sequence
  derived and/or modified CDS sequence (opt3) from hemagglutinin__InfluenzaA__ABB03046
augaagaccaucauugcccugagcuacauacucugccuuguguucgcucagaaacugcccggcaacgacaauuccacagcaacuuuguguuuagggcaccaugccgucccuaacggaacgcugguuaagaccaucacaaaugaucaaauugaggugacuaacgcgaccgaacuuguacagucuucaaguacagguagaaucugcgacagcccacaccagauucucgauggcgagaauuguacccugaucgacgcucuacugggggauccgcauugcgacggauuucagaacaaagaaugggauuuguucguggagagguccaaggccuauucuaauuguuaccccuaugacgucccugauuacgcaucgcuccggucacugguggccagcaguggcacucuggaauuuaacaaugaguccuucaacuggacagguguugcucaaaaugggaccucuagcgcaugcaaacgccgauccaacaagucauuuuucagucgucucaauugguuacaccagcugaaguauaaauacccagcccuuaacgugacgaugcccaauaacgagaaguuugacaaauuguauauauggggaguccaucacccuagcacugauucugaccagaucucccuguacgcucaggccucaggcagagugaccguaagcacaaagaggagucaacagacuguuauuccaaacaucggcucucggcccugggugcgcggggucuccagcggaauuucgaucuacuggaccauagugaaaccuggugauauucuacucaucaauucuacaggcaaccugauugcgccaagaggguauuucaagaucagguccggaaagucaaguaucaugcggagcgacgcaccgauuggcaaauguaauuccgaaugcauaacccccaacgguucuaucccuaaugacaagccauuucagaacgugaaucgcauuacguacggggccuguccccgauaugucaaacagaacacucuuaagcuggcuacaggaaugagaaauguuccugagaaacaaaccaggggcaucuucggcgccauagcaggguuuauugaaaacggaugggaggguaugguggauggcugguacggguuccggcaccagaauagcgagggaacuggccaggcugccgacuugaagucaacacaagcggccaucaaccagaucaaugguaaacucaaccgucugauugaaaagaccaaugagaaguuucaucagaucgaaaaagaguucagugaaguagaggggcgcauucaggauuuagagaaguauguggaagacacgaaaauagaucugugguccuacaacgcagagcuccuugucgcucuggaaaaccaacacaccaucgacuugacagauagcgagaugaauaagcuauucgaaagaacuaaaaagcagcugagggagaacgccgaggacaugggcaauggaugcuuuaagauuuaucauaaaugugauaacgcuugcaucggcucuauccggaaugggaccuacgaccacgauguguaccgagacgaagcccucaacaaucgcuuccagauuaagggaguugagcugaaaucagguuauaaggacuggauacuuuggaucaguuuugcaauuagcugcuuccuguuguguguggcccuccugggcuuuaucaugugggcuugccagaaagggaacauuagauguaauaucugcauauga

SEQ ID NO: 128434 - RNA, 1701 nt, Artificial Sequence
  derived and/or modified CDS sequence (opt3) from hemagglutinin__InfluenzaA__ABB03057
augaagaccaucauugcccugagcuacauacucugccuuguguucgcucaggagcugcccggcaacgacaauuccacagcaacuuuguguuuagggcaccaugccgucccuaacggaacgaucguuaaaaccauuacaaaugaucaaaucgaagugacuaacgcgaccgagcugguacagucuucaaguacagguggcauuugcgacagcccacaccagauccuagauggggaaaauuguacccucauagacgcucugcuuggagauccgcagugcgacggcuuucaaaacaagaaaugggaucuguucguggagagauccaaggccuauucuaauuguuaccccuaugacgucccugauuacgcaucguugaggucacucguggccagcagugguacucuggaauuuaacaaugaguccuucaacuggacagggguuacccagaauggaacgucuagcgcuugcaaacggcgcuccaacaauucauuuuucagucgacugaacuggcucacucauuuaaaguuuaaguauccagcacugaaugugaccaugcccaacaacgagaaauucgacaaacuuuacaucuggggcguccaccauccuggcacagauaaugaccagacuagcuuguaugcccaggcuucugggcguauuaccguguccacaaagagaucacaacagaccguaaucccaaacauuggaagcaggccccggguucgcgauaucccuaguagaauaucuauuuacuggacgaucgugaagccaggugacauucugcuaaucaauuccacuggcaaccucaucgccccgaggggguacuuuaaaauucggagcggaaagucgucuauaaugcgcuccgacgcgcccaucggcaaguguaauucagaaugcauuacaccuaacgguaguaucccaaaugauaaacccuuccagaacgucaaucgaauaaccuauggggcauguccuagauacgugaagcagaacacucugaaacuugccacaggaaugaggaaugugccagagaagcaaacccggggcauuuuuggcgcuaucgccggguucaucgaaaacggaugggaggguauggucgacggcugguauggguuucgucaccagaauagcgagggaauuggccaggcagcugaucugaaauccacgcaagccgcgaucaaccagauuaaugguaaguugaaccgccucauagggaaaaccaacgaaaaguuccaccagaucgagaaggaguucucugaaguugaaggcaggauucaggaccuggagaaauacguggaggauacaaagaucgacuuauggagcuauaaugccgaacugcucguagcacuugagaaccaacauacuaucgaucugaccgacucagaaaugaauaaauuguuugagagaacaaagaaacagcuacgggaaaacgcugaggauaugggaaauggcugcuucaagauuuaccacaagugugacaacgccugcauagggaguauccgaaauggaacuuaugaucaugacguguaccgcgacgaggcucugaacaauagauuucagauuaaaggugucgaacucaagcugggcuacaaagauuggauccuuuggauuuccuucgccaucagcugcuuucuguuguguguggcacuccugggguucauaaugugggccugccagaagggaaacaucagguguaauauuugcaucuga

SEQ ID NO: 128435 - RNA, 1701 nt, Artificial Sequence; identical to SEQ ID NO: 128334
  derived and/or modified CDS sequence (opt3) from hemagglutinin__InfluenzaA__ABB03068

SEQ ID NO: 128436 - RNA, 1701 nt, Artificial Sequence; identical to SEQ ID NO: 128291
  derived and/or modified CDS sequence (opt3) from hemagglutinin__InfluenzaA__ABB03079

SEQ ID NO: 128437 - RNA, 1701 nt, Artificial Sequence; identical to SEQ ID NO: 128291
  derived and/or modified CDS sequence (opt3) from hemagglutinin__InfluenzaA__ABB03090

SEQ ID NO: 128438 - RNA, 1698 nt, Artificial Sequence
  derived and/or modified CDS sequence (opt3) from hemagglutinin__InfluenzaA__ABB03101
augaaggugaaacugcucauccuucugugcaccuucacagccacuuacgcugacacgauuuguauaggcuaucacgcaaacaauagcaccgauacagucgacacuguuuuggagaagaacgugaccguaacacauuccgugaauuuacuggaagauucucacaacgggaaacuaugccuccugaagggaaucgcgccccuucagcuggguaauuguucagucgccggcuggauuuuggggaacccugagugcgaacuccugaucaguaaagagagcugguccuacauuguggaaaccccaaauccggagaacggagcuuguuaucccggcuacuuugccgacuaugaggaacugagagagcaacucucuucgguuagcucauucgaaagguuugagaucuucccuaagaagaguuccuggccaaaucauacugugacaggugucucugcaagcugcucccacaacgggaaaucaaguuuuuaccggaauuuacuguggcuuaccggaaagaacggcuuguaucccaaucugagcaaaucuuacgccaacaauaaggagaaagaagugcuaauacucuggggcguacaucacccuccaaacaucggggaucagcgcacgcuguaccacacugagaacgcuuauguuuccguggucucaagccauuacagucgacguuucacccccgaaauuacaaagagaccuaaggugagggaccaggagggacggaucaauuauuacuggacucuucuggaaccaggugauaccauuaucuuugagacaaacggcaauuugauagcaccgugguaugccuucgcucucucucgcggguuuggauccggcauuaucaccagcaacgcccccauggacgagugugaugcgaaaugccagacgccucaaggugcaauuaauucgucucugccauuccagaacgugcaccccgucacuaucggggaauguccuaaguacguuagauccgccaaauuaaggauggugacaggacugcggaauaucccaucaauucagagucgcggccucuuuggcgcuauagccggguucaucgagggagguuggaccggcaugguagacgggugguauggauaccaucaccagaacgaacaaggcagcgguuacgcagcugaucagaaguccacucagaaugccauuaacgggaucacaaauaaagugaacucugucauagagaagaugaauacccaguuuacggcggugggcaaagaguucaacaaacuugaacgaagaauggagaaucugaacaagaaaguugacgauggauucuuggacauuuggaccuauaacgccgaacuacuggugcuccuggagaaugaaaggacacuugacuuucacgauagcaacgucaagaaucuguacgagaaagugaagucacaauugaaaaacaaugcaaaggaaaucggcaacgggugcuucgaguuuuaucauaaguguaauaacgagugcauggaaaguguaaagaauggaacuuacgacuaucccaaguacuccgaggaaagcaaacucaaccgggagaagaucgaugguguuaaacuggacucuaugggcguguaucagauuuuagcuaucuacucaaccgucgccaguagccuggugcuacucgucucccugggggcuauuucuuucuggaugugcucgaauggaagccuucagugucguauaugcaucuga

SEQ ID NO: 128439 - RNA, 1701 nt, Artificial Sequence
  derived and/or modified CDS sequence (opt3) from hemagglutinin__InfluenzaA__ABB03112
augaagaccaucauugcccugagcuacauacucugccuuguguucgcucagaaacugcccggcaacgacaauuccacagcaacuuuguguuuagggcaccaugccgucccuaacggaacgaucguuaagaccauuacaaaugaucaaaucgaggugacuaacgcgaccgaacugguacagucuucaaguacagguggcauuugcgacagcccacaccagauccuagauggggagaauuguacccucauagacgcucugcuuggagauccgcagugcgacggcuuucaaaacaaaaagugggaucuguucguggaaagauccaaagccuauucuaauuguuaccccuaugacgucccugauuacgcaucguugaggucacucguggccagcagugguacucuggaguuuaacaaugaauccuucaacuggacagggguuacccagaauggaacgucuagcgcuugcaagcggcgcuccaacaagucauuuuucagucgacugaauuggcucacucauuuaaaauauaaguacccagcacugaacgugaccaugcccaauaacgagaaauuugacaagcuguauaucuggggcguccaccauccuggcacagauagcgaccagauuucuuuguacgcccaggcuuccgggcguaucacugugucaaccaaaagaagccaacagacaguaauuccaaacaucggaaguaggccccggguucgcgaugugucuuccagaauaagcauuuacuggaccaucgucaagccuggugacauucugcuaaucaauucgacgggcaaccucaucgccccaaggggguauuucaagauucggucuggaaaauccucaauaaugcgcagugacgcgccgaucggcaaguguaauagcgagugcauuacucccaacgguuccaucccuaaugauaaaccauuucagaacgugaauaagauaacauacggggcauguccccgauaugugaaacagaacacccugaaacuugccacuggaaugagaaaugucccugaaaagcaaacaaggggcauuuucggcgcuaucgccggguuuaucgagaacggaugggaagguaugguugacggcugguacggguuccggcaccaaaauucugagggaaccggccaggcagcugaucuuaagagcacgcaggccgcgauuaaccagaucaaugguaaguugaaccgucucauugggaaaaccaaugagaaguuucaccagauagaaaaagaguucucagaaguggagggccgcauccaggaccuggaaaaguauguagaggauacaaaaauugacuuauggaguuacaacgccgagcugcucguggcacuugaaaaccaacauacuaucgaucugaccgacuccgagaugaauaaguuguucgaaagaacaaagaaacagcuaagggagaacgcugaagauaugggaaauggcugcuuuaagaucuaucacaaaugugacaacacuugcauugagagcauacggaaugggaccuacgaucaugacgucuaccgagacgaggcccugaacaaucgcuuccagaucaagggaguggaacucaaaucugguuauaaggauuggauucuguggaucucauuugcuauuaguugcuuccuucuguguguugccuugcucggcuuuaucaugugggcaugccagaaggggaacauaagauguaauaucugcauuuga

SEQ ID NO: 128440 - RNA, 1698 nt, Artificial Sequence
  derived and/or modified CDS sequence (opt3) from hemagglutinin__InfluenzaA__ABB03123
augaaggugaaacugcucguccuucugugcaccuucacagccacuuacgcugacacgaucuguauuggcuaucacgcaaacaauagcaccgauacaguugacacuguguuggagaagaacguaaccgugacacauuuugucaauuuacuggaagauucccacaacgggaaacuaugccuccugaagggaauagcgccccuucagcuggguaauuguucuguggccggcuggaucuuggggaacccugagugcgaacuccugauuucaaaagagaguuggagcuacaucguugaaaccccaaauccggagaacggaacuuguuaucccggcuacuucgcugacuaugaggaacugagagagcaacucuccucugugucgucauuugaaagguucgagauuuuuccuaaggagagcaguuggccaaaucauacagucaccgguguguccgccucuugcagccacaacgggaaguccucauucuaccggaauuuacuguggcuuacgggcaaaaacggauuguaucccaaucugaguaagagcuacgcaaacaauaaagaaaaggagguucuaguacucuggggcgugcaucacccuccaaacaucggggaucagcgcgcccuguaccacacugaaaacgcuuaugucucugugguguccucacauuacagccgacguuuuacccccgagauagcaaaaagaccuaaggucagggaccaggaaggacggaucaauuauuacuggacacuucuggagccaggugauacuauuaucuucgaggccaacggcaauuugauugcuccgcgcuaugccuuugcgcucaguagaggguucggaucuggcaucauaaccuccaacgcacccauggacgaaugugaugccaagugccagacaccucaaggugcuauuaauagcucgcugccauuucagaacguucaccccgugaccaucggggaguguccuaaauacguaaggucugccaaguuacggauggugacgggacugcgcaauauuccauccauccagucacgaggccucuucggcgcaaucgcuggguuuauugaaggagguuggacuggcauggucgacgggugguauggauaccaucaccagaacgagcaaggcagugguuacgccgcggaucagaaaagcacacagaaugccauaaacgggaucaccaauaaggugaacuccguuauugaaaagaugaauacucaguucacagcagugggcaaagaguucaacaaacuugagagaaggauggaaaaucugaacaagaaggucgacgauggauuuuuggacaucuggaccuauaacgcugagcuacuggugcuccuggaaaaugagcggacgcuugacuuccacgauucuaacguuaaaaaucuguacgaaaagguaaaaagccaauugaagaacaaugccaaagagauaggcaacgggugcuuugaguucuaucauaaguguaaugacgaaugcauggagucagugaagaacggaaccuacgauuaucccaaauacagugaagaguccaagcucaaucgugagaaaauugacggugucaagcuggaaagcaugggcguguaucagaucuuagcuaucuacucuacagucgccucaagucuggugcuacucguuagccugggggcaauuuccuuuuggaugugcucuaacggaucgcuucagugucgcaucugcauuuga

SEQ ID NO: 128441 - RNA, 1698 nt, Artificial Sequence
  derived and/or modified CDS sequence (opt3) from hemagglutinin__InfluenzaA__ABB03134
augaaggugaaacugcucauccuucugugcaccuucacagccacuuacgcugacacgauuuguauaggcuaucacgcaaacaauagcaccgauacagucgacacuguuuuggagaagaacgugaccguaacacauuccgugaauuuacuggaagauucucacaacgggaaacuaugccuccugaagggaaucgcgccccuucagcuggguaauuguucagucgccggcuggauuuuggggaacccugagugcgaacuccugaucaguaaagagagcugguccuacauuguggaaaccccaaauccggagaacggaacuuguuaucccggcuacuuugcugacuaugaggaacugagagagcaacucucuucgguuucaucuuucgaaagguuugagaucuucccuaaggagaguuccuggccaaaucauacagugaccggugucucugccagcugcucccacaacgggaagucaaguuuuuaccggaauuuacuguggcuuacggagaaaaacggauuguaucccacucugagcaagucuuacgcaaauaacaaagagaaggaagugcuaauacucuggggcguacaucacccuccaaauaucggcgaucagcgcacccuguaccacacagagaacgccuauguuuccguggucucaagccauuacagucgacguuucacucccgaaauuaccaaaagaccuaaggugagggaccaggaggggcggaucaacuauuacuggacacuucuggagccaggagauaccauuaucuuugaagcuaaugguaacuugauagcaccgugguaugccuucgcucucucucgcggcuuuggguccggaauuaucacgagcaaugcccccauggacgagugugaugcgaagugccagacuccucaaggcgcaauuaacucgucucugccauuccagaaugugcaccccgucacaaucggugaauguccuaaauacguuagauccgccaaguuaaggauggugaccgggcugcggaacaucccaucaauucagagucgcggacucuuuggcgcuauagccggcuucaucgaagggggauggacugguaugguagacggcugguauggguaccaucaccagaaugaacaaggaagcggcuacgcagcugaucagaaauccacacagaacgccauuaaugguaucaccaacaaggugaauagcgucauagagaaaaugaacacgcaguuuaccgcgguggggaaggaguucaauaaacuugaacgaagaauggagaaccugaauaagaagguugacgauggcuucuuggacauuuggacauauaacgccgaacuacuggugcuccuggagaacgaaaggacucuugacuuucacgauagcaaugucaaaaaccuguacgagaaggugaaaucacaauugaagaauaacgcaaaagagaucggaaauggcugcuucgaauuuuaucauaaguguaacaaugagugcauggaaaguguaaagaacgggaccuacgacuaucccaaauacuccgaggagagcaagcucaaucgggagaaaaucgauggaguuaagcuggaaucuauggguguguaucagauuuuagcuaucuacucaacagucgccaguagccuggugcuacucgucucccugggcgcuauuucuuucuggaugugcucgaacgggagccuucagugucguauaugcaucuga

SEQ ID NO: 128442 - RNA, 1698 nt, Artificial Sequence; identical to SEQ ID NO: 128347
  derived and/or modified CDS sequence (opt3) from hemagglutinin__InfluenzaA__ABB03145

SEQ ID NO: 128443 - RNA, 1701 nt, Artificial Sequence
  derived and/or modified CDS sequence (opt3) from hemagglutinin__InfluenzaA__ABB04283
augaagaccaucauugcccugagcuacauauucugccucguguuugcucagaaccuucccggcaaugacaacuccacagcaacucuguguuuggggcaccaugccgucccuaauggaacguuaguuaaaaccaucacaaacgaucaaauugaggugacuaaugcgaccgaacugguacagucuucaaguacagguagaaucugcgacagcccacacaggauucuagauggcaagaacuguacccucaucgacgcucugcuuggggauccgcauugcgacggauuccagaaugagaaaugggaucuguuuguggaacgguccaaggccuucucuaacuguuaucccuacgacgucccugauuaugcaucguugcgcucacucguggccagcaguggcacucuggaguuuauaaaugaagguuucaacuggacagggguuacccaguccggaggcucuuacgcuugcaaacgaggcagcgacaaguccuuuuucucacgucugaauuggcucuaugagagugagagcaaguacccagcauuaaacgugacgaugcccaauaacgggaauuuugauaaacuguauaucuggggaguccaccauccuucuacugacaaggaacaaaccaaccuuuacgugagagccuccgguaggguaacaguuucaacuaaacggagccagcagaccauuaucccaaacauuggcccccgcccuugggugagaggguugaguucuaggaucuccauauacuggacaauugucaagccaggagauauccugcuaauuaauagcucgggcaaccucaucgcuccgcgggguuauuucaaaauccgcaccgggaagucuuccauuaugcgaucagacgcccccauaggaacguguaguagcgagugcaucacuccuaauggcuccauuccaaacgacaagcccuuucagaaugugaacaaaaucacauacggcgcguguccuaaguaugugaaacaaaauacccugaagcuggcaacugggaugagaaacauaccagaaaaacagacaaggggaauuuucggugccaucgcuggcuuuaucgagaaugggugggagggaauggucgauggcugguacgguuuccggcaccagaacucugaagggaccggccaggccgcagaccuuaagagcacgcaagcugccauugaucagaucaauggaaaauugaaccguguuauugagaagaccaaugaaaaguuccaccagauagagaaagaauuuucagagguggagggccgcauccaagaccucgaaaaguauguagaggauacaaaaauugaccuguggaguuacaacgcggaauuacugguggcccucgagaaucagcauacuaucgaucuuaccgacuccgaaaugaacaagcuguucgagaaaacaagaaggcaguugcgggagaacgcagaagauauggggaauggaugcuuuaagaucuaucacaagugugacaacgcuugcauugguagcauacgaaauggcacuuacgaucaugacgucuaccgcgacgaggcccuaaacaauagauuccagaucaaagggguggaacugaagucuggauauaaagauuggauucucuggaucucauuugcuauuaguugcuuccugcuuuguguugugcuguugggcuuuaucaugugggccugccaaaaggguaacauaagguguaauaucugcauuuga

SEQ ID NO: 128444 - RNA, 1701 nt, Artificial Sequence
  derived and/or modified CDS sequence (opt3) from hemagglutinin__InfluenzaA__ABB04294
augaagaccaucauugcccugagcuacauauucugccucgugcuuggccaggaccugcccgggaacgauaauuccacagcuacuuuguguuuaggacaccaugcagucccuaacgguacgcugguuaaaaccaucacaaaugaccaaauugaggugacuaacgccaccgaacuuguacagucuucaaguacaggcaagaucugcaauaacccacacaggauucucgaugggaucaauuguacccugauagacgcgcuucugggagauccgcauugcgacggcuuucagaacgagaaaugggauuuguucguggaaagaagcaaggcuuuuuccaauuguuaucccuacgacgucccugauuaugccucucuccggucgcugguggcaucaagcgguacucuggaguucaucaacgaaggguuuaauuggacaggaguuacccagaacggcggcaguaaugccugcaaacgcgggccagacuccggauucuuuucucgacucaacugguuauacaagagcgguuccacguaucccgugcugaaugucacuaugccuaacaacgauaauuucgacaagcuauacauuuggggcgugcaccauccaucaaccgaucaagagcagacaaacuuguauguacaggcuagugggcguguuacugugagcaccaaaagaucucagcaaacaaucauucccaauaucggauccaggccuuggguccggggccugucaagccgcauaaguauuuacuggaccaucgugaagccaggugacauucuagugaucaacucuaaugggaaccucaucgcaccgagaggauacuuuaaaaugaggacgggcaaguccagcauuaugcggucggacgcccccauaggcacuuguaucucugagugcauuacaccuaauggguccaucccaaacgauaaacccuuccagaaugucaacaagauaaccuauggagcuuguccuaaguacguuaaacagaauacucugaaacuugccacagguaugcgcaacgugccagaaaagcagacccgaggcauuuuuggggcgaucgcaggauucaucgagaauggcugggaagguaugauugacgggugguauggcuuuagacaccaaaacucagagggaacgggccaggccgcugaucugaagaguacccaggccgcaaucgaccaaauuaaugggaaauugaacaggguaauagagaagacaaacgaaaaauuccaccagaucgagaaggaguucagcgaaguggaaggacggauucaggaucucgagaaguacgucgaggacacuaaaaucgaucugugguccuauaaugcugaauuacugguggcccucgagaaccagcauaccaucgaccuuacagauucugaaaugaauaagcuguuugagaaaacucgucgccaauugagagaaaacgcggaggacauggguaauggcugcuucaagauuuaccacaaaugugauaacgccugcauagggagcaucaggaauggaaccuaugaccaugacguuuaccgggaugaggcacuaaacaaucgauuucagauuaagggcguggaacugaagucagguuacaaagacuggauccucuggauuaguuucgcuaucuccugcuuucugcuuugugucgugcuguugggguucauaaugugggccugccagaagggcaacauccgcuguaauauuugcaucuga

SEQ ID NO: 128445 - RNA, 1701 nt, Artificial Sequence
  derived and/or modified CDS sequence (opt3) from hemagglutinin__InfluenzaA__ABB04305
augaagaccaucauugcccugagcuacauauucugccucguguuugcucagaaacuucccgagaacgacaauuccacagcaacucuguguuugggccaccaugccgucccuaacgggacguuaguuaagaccaucacaaaugaucaaauugaagugacuaacgcgaccgagcugguacagucuucaaguacaggaagaaucugcgacagcccacacaggauucuagaugguaaaaauuguacccucaucgacgcucugcuuggcgauccgcauugcgacggguuccagaacgaaaagugggaucuguuuguggagcgguccaaagccuucucuaauuguuaucccuacgacgucccugauuaugcaucguugcgcucacucguggccagcaguggaacucuggaauuuauaaacgagggcuucaauuggacagguguuacccaguccgggggaucuuacgcuugcaagcgaggcagcgugaacuccuuuuucucacgucugaauuggcucuauaagagugagagcaaauacccagucuuaaacgugacgaugcccaauaacggcaaguuugacaaacuguauaucuggggaguacaccauccuucuacugauaaggaacaaaccaaucuuuacguuagagcauccgggaaagugacagucucaacuaagaggagccagcagaccgugauuccaaacaucgguagucggcccugggugcgcggcuugucuuccagaauuagcaucuacuggacaauagucaagccuggggacauucugcuaaucaacucgaccggaaaucucauugccccaaggggcuauuucaaaauccggacggguaagucuuccaucaugcgcucagaugcuccgauugggacuuguaguagcgagugcauaacacccaacggauccaucccuaaugacaaaccauuucagaacguuaauaagauuaccuacggcgccuguccccgauaugugaaacaaaacacucugaagcuggcgacaggcaugagaaauguaccugaaaaacagaccagggggaucuucggagcaauagccgguuuuauugagaacggcugggaggggaugguggacggaugguacggcuuccggcaccaaaauucugaagguacggggcaggcugccgaucuuaagagcacccaggcagcuaucgaccagaucaacggcaaguugaaucgucucauugagaaaacaaacgaaaaguuccaccagaucgagaaagaauuuucagaggucgagggacgcauucaagaucuggaaaaguauguggaggacacuaaaauagauuuauggaguuacaaugccgaacugcucguugcgcuugagaaccagcauaccaucgaccugacagauuccgaaaugaauaaguuguucgagaagacuagaaaacagcuaagggagaacgccgaagacaugggcaacgggugcuuuaagauuuaucacaaaugugauaaugcaugcaucggaagcauccggaacgguaccuacgaccaugauguguaccgagacgaggcucugaauaaccgcuuccagauuaagggcgucgaacucaaaucuggguauaaggacuggauacuguggaucucauuugccauuaguugcuuccuucugugugugguauugcucggauuuaucaugugggcuugccaaaagggcaauauuagauguaacaucugcauauga

SEQ ID NO: 128446 - RNA, 1701 nt, Artificial Sequence
  derived and/or modified CDS sequence (opt3) from hemagglutinin__InfluenzaA__ABB04316
augaagaccaucauugcccugagcuacauauucugccucguguuugcucagaaacuucccggcaacgacaauuccacagcaacucuguguuuggggcaccaugccgucccuaacggaacguuaguuaagaccaucacaaaugaucaaauugaggugacuaacgcgaccgaacugguacagucuucaaguacagguagaaucugcgacagcccacacaggauucuagauggcaaaaauuguacccucaucgacgcucugcuuggggauccgcauugcgacggauuccagaacgagaagugggaucuguuuguggaacgguccaaagccuauucuaauuguuaccccuaugacgucccugauuacgcaucguugcgcucacucguggccagcaguggcacucuggaguucauaaacgaagacuuuaauuggacagguguuacccaguccgggggaucuuaugcuugcaagcgaggcagcgugaaguccuucuuuucacgucugaacuggcuccacgagagugaguacaaauauccagcauuaaaugucacgaugcccaacaauggcaaguucgauaaacuguacaucuggggagugcaucacccuagcacugacagagaacaaaccaaccuuuacguaagggccucugggcggguuacaguguccacuaagcgcucacagcagaccgucauuccaaauaucgguagcagacccugggugaggggcuugaguucucggauuuccaucuauuggacaauagugaaaccuggggauauucugcuaaucaacagcaccggaaaccucauugcuccacgcggcuacuuuaagauccgaacggguaagucgucuaucaugagauccgacgccccgauugggacuuguucaagugagugcauaacacccaauggaagcaucccuaacgacaaaccauuccagaaugucaacaagauuaccuauggcgcgugucccagguacguuaaacaaaauacucugaaacuugcaacaggcaugcggaacgugccugaaaagcagacccgugggaucuuuggagccauagcugguuucauugagaauggcugggaggggaugguagauggaugguauggcuuucgccaccagaacuccgaagguacggggcaggccgcagaccugaagucuacccaagcugccaucgaucagaucaauggcaaauugaacagacucauugagaagacaaaugaaaaguuccaucagaucgagaaagaguucagcgaaguggagggaaggauucaagaccuggaaaaguacgucgaggauacuaaaauagacuuauggucauauaacgcggaacugcucguggcccuugagaaucagcacaccaucgaucugacagacagugaaaugaacaaguuguuugagaaaacucggaagcagcuacgagagaaugcagaagauaugggcaacgggugcuucaagauuuaccauaaaugugacaacgcuugcaucggauccauccgcaaugguaccuacgaucacgacguuuauagagacgaggcccugaacaauagguuucagauuaagggcguggaacucaaaagcggguacaagaacuggauacuguggaucucuuucgcuauuucaugcuuucuucugugugucguguugcucggauucaucaugugggccugccaaaaaggcaauauucgguguaacaucugcauauga

SEQ ID NO: 128447 - RNA, 1701 nt, Artificial Sequence
  derived and/or modified CDS sequence (opt3) from hemagglutinin__InfluenzaA__ABB04327
augaagaccaucauugcccugagcuacauauucugccucguguuugcucagaaacuucccggcaacgacaauuccacagcaacucuguguuuggggcaccaugccgucccuaacggaacguuaguuaagaccaucacaaaugaucaaauugaggugacuaacgcgaccgaacugguacagucuucaaguacagguagaaucugcgacagcccacacaggauucuagauggcaaaaauuguacccucaucgacgcucugcuuggggauccgcauugcgacggauuccagaacgagaagugggaucuguuuguggaacgguccaaagccuucucuaauuguuaucccuacgacgucccugauuaugcaucguugcgcucacucguggccagcaguggcacucuggaguuuauaaacgaagguuucaauuggacagggguuacccaguccggaggcucuuacgcuugcaagcgaggcagcgugaacuccuuuuucucacgucugaauuggcucuauaagagugaguacaaauauccagcauuaaacgucacgaugcccaauaacgggaaguuugacaaacuguacaucuggggagugcaccauccuagcacugagaaggaacaaaccaaucuuuacguaagagccucugguaggguuacaguguccacuaaacggucacagcagaccgucauuccaaacaucggcagcauucccugggugcgcggguugaguucuagaaucuccauauauuggacaauugugaagccuggagauauccugcuaauuaacagcaccggcaaucucaucgcuccaagggguuacuucaagauccggacggggaaaucgucuauuaugcgcuccgacgccccgauaggaacuuguucaagugagugcaucacacccaacggcagcauuccuaaugauaagccauuucagaacgucaauaaaaucaccuauggcgcguguccccgauacguuaagcaaaacacucugaaacuugcaacagggaugagaaaugugccugaaaagcagaccaggggaauauucggugccauugcuggcuuuaucgagaacgggugggagggaaugguagacggcugguaugguuuccggcaccaaaauuccgaagggacgggccaggccgcagaccugaaaucuacccaggcugccaucgaucagauuaacggaaaguugaaucgucucaucgagaagacaaacgaaaaauuccaccagauugagaaggaauuuagcgagguggagggccgcauacaagaccuggaaaaauacgucgaggauacuaagaucgacuuauggucauauaaugcggaacugcucguggcccuugagaaccagcauaccauugaucugacagacagugaaaugaauaaauuguucgagaagacuagaaagcagcuaagggagaacgcagaagauauggggaacggaugcuuuaaaaucuaccacaagugugacaaugcuugcaucgguuccauucggaacggcaccuacgaucaugacguuuaucgagaugaggcccugaauaaccgcuuccagauaaaagggguggaacucaagagcggauacaaagacuggauccuguggauuucuuuugcuaucucaugcuuccuucugugugucguguugcucggcuuuauuaugugggccugccaaaaggguaauaucagauguaacauaugcaucuga

SEQ ID NO: 128448 - RNA, 1701 nt, Artificial Sequence
  derived and/or modified CDS sequence (opt3) from hemagglutinin__InfluenzaA__ABB04338
augaagaccaucauugcccugagcuacauauucugccucgugcuuggccaggacuuucccgggaacgauaauuccacagcuacucuguguuugggacaccaugcagucccuaacgguacguuaguuaaaaccaucacaaaugaccaaauugaggugacuaacgccaccgaacugguacagucuucaaguacaggcaagaucugcaauaacccacacaggauucuagaugggaucgacuguacccucauagaugcgcugcuuggagacccgcauugcgauggcuuccagaaugagacuugggaccuguuuguggaaagaagcaaggcuuucuccaacuguuaucccuacgaugucccugacuaugccucuuugcggucgcucguggcaucaagcgguacacuggaguuuaucaaugaaggguucaccuggacgggaguuacucagaacggcggcaguaaugccugcaaacgcgggccagauuccggauuuuucucucgacugaacuggcucuacaaaagcgguuccaccuaucccguguuaaaugucacaaugccuaacaaugacaacuuugauaagcuguacauuuggggcgugcaccauccaucaacugaccaagagcagaccagucuuuauguacaggcuagcgggcguguuacagugucuaccaagagaucccagcaaacgaucauucccaacaucggaucaaggccuuggguccggggcuugagcagucgcauaucuauuuacuggacuaucgugaaaccaggugacauucuggugcuaaauuccaacgggaaucucaucgcaccgagaggauacuucaagaugaggacaggcaaaagcucgaucaugcggucugaugcccccauuggcaccuguauauccgagugcaucacuccuaacgggucaauuccaaaugacaagcccuuucagaacgucaauaaaaucacauauggagcuuguccuaaguacguuaagcagaacacccugaaacuugccacggguaugcgcaaugugccagaaaagcagacccgaggccuguucggggcgauagcaggauuuauugagaacggcugggaagguaugaucgaugggugguauggcuucagacaccaaaauagugagggaacaggccaggccgcugacuugaaaagcacucaggccgcaaucgaucaaauuaacgggaagcucaauaggguaaucgagaaaaccaacgaaaaguuccaccagauugagaaagaauuuuccgagguggaaggacggauacaggaccuggagaaguacgucgaggauacaaagaucgacuuauggucuuauaaugcugaacugcucguggcccuugagaaccagcauacuauugaucugaccgacagcgaaaugaacaaauuguucgagaagacacgucgccaacuaagagaaaaugcggaggauauggguaacggcugcuuuaaaaucuaccacaagugugacaaugccugcaucgggucaauuaggaacggaaccuaugaccaugauguuuaccgggacgaggcacugaauaaccgauuccagauaaaaggcguggaacucaagagugguuacaaggauuggauccuguggauuuccuuugcuaucagcugcuuccuucugugugucguguugcucggguuuauuaugugggccugccagaaaggcaauauccgcuguaacauaugcaucuga

SEQ ID NO: 128449 - RNA, 1701 nt, Artificial Sequence
  derived and/or modified CDS sequence (opt3) from hemagglutinin__InfluenzaA__ABB04349
augaagaccaucauugcccugagcuacauauucugccucguguuugcucagaaacuucccggcaacgacaauuccacagcaacucuguguuuggggcaccaugccgucccuaacggaacguuaguuaagaccaucacaaaugaucaaauugaggugacuaacgcgaccgaacugguacagucuucaaguacagguagaaucugcgacagcccacacaggauucuagauggcaaaaauuguacccucaucgacgcucugcuuggggauccgcauugcgacggauuccagaacgagaagugggaucuguuuguggaacgguccaaagccuucucuaauuguuaucccuacgacgucccugauuaugcaucguugcgcucacucguggccagcaguggcacucuggaguuuauaaacgaagguuucaauuggacagggguuacccaguccggaggcucuuacgcuugcaagcgaggcagcgugaacuccuuuuucucacgucugaauuggcucuauaagagugagagcaaauacccagucuuaaacgugacgaugcccaauaacgggaaguuugacaaacuguauaucuggggaguacaccauccuucuacugauaaggagcaaaccaaucuuuacguuagagcauccgguaaagugacagucucaacuaagaggagccagcagaccgugauuccaaacaucggcagucggcccugggugcgcggguugucuuccagaauuagcaucuacuggacaauagucaagccuggagacauucugcuaaucaacucgaccggcaaucucauugccccaagggguuauuucaaaauccggacggggaagucuuccaucaugcgcucagaugcuccgauuggaacuuguaacagugaaugcauaacacccaauggcagcaucccuaacgacaaaccauuucagaauguuaacaagauuaccuacggcgccuguccccgauaugugaaacaaaauacucugaaacuugcgacagggaugagaaacguaccugagaaacagaccaggggaaucuucggugcaauagccggcuuuauugaaaaugggugggagggaaugguggacggcugguacgguuuccggcaccagaacuccgaggggacgggccaggcugccgaucugaagucuacccaagcagcuaucgaccagaucaauggaaaguugaaccgucucauugaaaagacaaaugagaaguuccaccagaucgaaaaagaguuuagcgaagucgagggccgcauucaagaucuggagaaguauguggaagacacuaaaauagauuuauggucauacaacgccgagcugcucguugcgcuugaaaaucagcauaccaucgaccugacagauagugagaugaacaaguuguucgaaaagacuagaaaacagcuaagggagaacgccgaggacauggggaauggaugcuuuaagauuuaucacaaaugugauaacgcaugcaucgguuccauccggaauggcaccuacgaccaugauguguaccgagacgaagcucugaacaaucgcuuccagauuaagggggucgagcucaaaagcggauauaaggacuggauacuguggaucucuuuugccauuucaugcuuccuucugugugugguauugcucggcuuuaucaugugggcuugccaaaaggguaacauuagauguaauaucugcauauga

SEQ ID NO: 128450 - RNA, 1701 nt, Artificial Sequence
  derived and/or modified CDS sequence (opt3) from hemagglutinin__InfluenzaA__ABB04360
augaagaccaucauugcccugagcuacauauucugccucguguuugcucagaaacuucccggcaacgacaauuccacagcaacucuguguuuggggcaccaugccgucccuaacggaacguuaguuaagaccaucacaaaugaucaaauugaggugacuaacgcgaccgaacugguacagucuucaaguacagguagaaucugcgacagcccacacaggauucuagauggcaaaaauuguacccucaucgacgcucugcuuggggauccgcauugcgacggauuccagaacgagaagugggaucuguuuguggaacgguccaaagccuauucuaauuguuaccccuaugacgucccugauuacgcaucguugcgcucacucguggccagcaguggcacucuggaguucauaaacgaagacuuuaauuggacagguguuacccaguccgggggaucuuaugcuugcaagcgaggcagcgugaacuccuucuuuucacgucugaauuggcuccacaagagugaguacaaauauccagcauuaaacgucacgaugcccaauaacggcaaguucgauaaacuguacaucuggggagugcaucacccuagcacugacagagagcaaaccaaucuuuacguaagggccucugggcggguuacaguguccacuaagcgcucacagcagaccgucauuccaaacaucgguagcagacccugggugaggggcuugaguucucggauuuccaucuauuggacaauagugaaaccuggggauauucugcuaaucaacagcaccggaaaucucauugcuccacgcggcuacuuuaagauccgaacggguaagucgucuaucaugagauccgacgccccgauugggacuuguucaagugaaugcauaacacccaacggaagcaucccuaaugacaaaccauuccagaacgucaauaagauuaccuauggcgcgugucccagguacguuaaacaaaacacucugaaacuugcaacaggcaugcggaaugugccugagaaacagacccgugggaucuuuggagccauagcugguuucauugaaaacggcugggaggggaugguagauggaugguauggcuuucgccaccaaaauuccgaggguacggggcaggccgcagaccugaagucuacccaggcugccaucgaucagaucaacggcaaauugaauagacucauugaaaagacaaacgagaaguuccaucagaucgaaaaagaguucagcgaaguggagggaaggauucaagaccuggagaaguacgucgaagauacuaaaauagacuuauggucauauaaugcggagcugcucguggcccuugaaaaccagcacaccaucgaucugacagacagugagaugaauaaguuguuugaaaagacucggaagcagcuacgagagaacgcagaggauaugggcaacgggugcuucaagauuuaccauaaaugugacaaugcuugcaucggauccauccgcaacgguaccuacgaucacgacguuuauagagacgaagcccugaauaacagguuucagauuaagggcguggagcucaaaagcggguacaaggauuggauacuguggaucucuuucgcuauuucaugcuuucuucugugugucguguugcucggauucaucaugugggccugccaaaaaggcaauauucgguguaacaucugcauauga

SEQ ID NO: 128451 - RNA, 1701 nt, Artificial Sequence
  derived and/or modified CDS sequence (opt3) from hemagglutinin__InfluenzaA__ABB04371
augaagaccaucauugcccugagcuacauauucuaucucgcucuuggccaggaccugcccgggaacgauaauuccaaagcaacauugugcuuaggacaccaugccgugccuaacgguacucuggucaagacgaucaccgacgaucaaacagagguuacuaaugcgaccgaacuugugcagucuucaaguacaggcaaaauuuguaacaauccacacagaauccucgacgggauggauugcacccugauugacgcucuacugggagauccgcauugugacguauuucagaacgagacuugggauuuguucguggaaaggagcaaggccuuuuccaauugcuaccccuaugacgucccugauuacgcaucucuccggucgcugguggccucaagcggcacaauggaguucaucaccgaagguuuuacguggacugagguuacccagaacgggggaaguaaugcuuguaaacgcggcccagacuccggcuucuuuucucgacugaacuggcucacaaagagcgggcguacuuaucccguguuaaaugucaccaugccuaacaaugauaacuucgacaagcuguacauauggggagugcaccauccauccacagaccaagagcagaccaaucuuuauguacagacgucagguagaguuacugugaguacaaggcggagccagcaaaccaucauucccaacaucggcucucgcccuugggucagaggguuguccucaaggauuagcaucuacuggacuauagugaaaccaggagaugugcuggucauuaacaguaauggcaaccuaaucgcaccgcgggguuacuuuaagaugcgcacagggaaaucuuccauuaugcgaagcgacgcccccaucgauaccugcaucucggaauguauuacgccuaauggaucuauaccaaacgacaagcccuuccagaauguuaacaaaaucaccuauggcgcuugcccuaaguacgugaagcagaauacacucaaacuggccacuggcaugagaaacguaccagagaagcagaccagggggcuuuuuggagcgauugcagguuucaucgaaaauggcugggaggggaugauagauggaugguauggcuuucggcaccaaaacuccgaggguacagggcaggccgcugaccugaaaucaacucaggccgcaauugaucaaaucaauggcaaguugaaccguaucauugaaaagaccaaugagaaguuccaccagaucgaaaaagaguucagugaaguggagggacgcauucaggaccucgagaaguacgucgaagauacaaagauagaccuguggagcuauaacgcugaguuacugguggcccucgaaaaucagcauaccaucgaucuuacugacuccgagaugaacaaacuguuugaaaagacgagaaggcaauugcgggagaacgcggaggacaugggcaauggguguuucaaaauuuaccacaagugcgauaacgccuguaucgaaucuauccgaaauggaacauaugaccaugauguuuaccgcgacgaggcacuaaacaauagauuucagauuaaagguguggaacugaaaagcggcuacaaggauuggauacucuggaucucauucgcuauuaguugcuuucugcuuugcgucgugcuguugggguucaucaugugggccugucagaggggaaacauucggugcaauaucuguauauga

SEQ ID NO: 128452 - RNA, 1701 nt, Artificial Sequence
  derived and/or modified CDS sequence (opt3) from hemagglutinin__InfluenzaA__ABB04906
augaagaccaucauugcccugagcuacauacucugccuuguguucgcucagaaacugcccggcaacgacaauuccacagcaacuuuguguuuagggcaccaugccgucccuaacggaacgcugguuaagaccaucacaaaugaucaaauugaggugacuaacgcgaccgagcuaguacagucuucaaguacagguagaaucugcgacagcccacacaggauucucgauggcaaaaauuguacccugaucgacgcucugcugggggauccgcauugcgacggauuucagaacaaggaaugggauuuguucguggaacgguccaaagccuauucuaauuguuaccccuaugacgucccugauuacgcaucgcuccgcucacugguggccagcaguggcacucuggaguuuauaaacgaagacuucaauuggacagguguugcucagaacggggauuccuaugcaugcaagcgaggaucugucaagagcuuuuucucccgucucaauugguuacacaaaucagaguacaaguauccagcccugaacgugaccaugcccaauaacgacaaauuugauaaacuuuacaucuggggcgugcaucacccuaguacggacagagagcaaacuagcuuguacauuagggcuucuggcaagguaaccguuuccacaaagcggucacagcagacugugaucccaaauauugggagccgccccugggucagaggacugaguucuaggaucuccauauauuggaccauugugaagccuggugacauccuacucauuaacagcacaggcaaccugaucgccccacggggguacuucaaaauccgcaccggaaagucgucuauuaugcgauccgaugcgccgauaggcacguguucaagugaaugcaucacucccaaugguagcauuccuaacgacaaaccauuucagaaugugaacagaaucacauauggggcaugucccagguacgucaagcaaaauacccuuaaacuggccacuggaaugcggaacguuccugagaagcagacacguggcauauucggcgcuauugccggguuuaucgaaaauggaugggaggguaugguggauggcugguauggguuccgccaccagaacuccgagggaaccggccaggcagcugacuugaaaucuacgcaagccgcgaucgaucagauuaaugguaagcucaacagacugaucgaaaagaccaaugagaaauuucaucagauugaaaaggaguucagcgaaguagaggggaggauacaagacuuagagaaauacguggaagauacaaagaucgaccuguggucauauaacgccgagcuccuugucgcacuggaaaaucagcacacuauugauuugaccgacagugagaugaacaaacuauucgaaaagacacggaagcagcugcgagagaaugcugaggauaugggcaacggaugcuuuaaaaucuaccauaagugugacaacgccugcaucggcuccauucgcaaugggacuuacgaccacgauguguauagagacgaagcucucaacaauagguuccagauaaaaggaguugagcuuaagagcgguuacaaagauuggauccuuuggauuucuuuugccaucucaugcuuccuguugugugugguccuccugggcuuuauuaugugggcaugccaaaaggggaacauccgguguaauauaugcaucuga

SEQ ID NO: 128453 - RNA, 1701 nt, Artificial Sequence
  derived and/or modified CDS sequence (opt3) from hemagglutinin__InfluenzaA__ABB04917
augaagaccaucauugcccugagcuacauauucugccucguguuugcucagaaacuucccggcaacgacaauuccacagcaacucuguguuuggggcaccaugccgucccuaacggaacguuaguuaagaccaucacaaaugaucaaauugaggugacuaacgcgaccgaacugguacagaucucuucaacagguagaauuugcgacaguccacacaggauccuagauggcaaaaauuguacccucauagacgcucugcuuggggauccgcauugcgacggauuccagaacgagaagugggaucuguuuguggaacggagcaaagccuucuccaauuguuaucccuacgacgucccugauuaugcaucuuugcgcucgcucguggccucaagcggcacucuggaguuuaucaacgaagguuucaauuggacagggguuacccagaguggaggcuccuacacgugcaagcgaggcucugugaacagcuuuuucucccgucugaauuggcucuaugagucagagaguaaguacccagucuuaaacgugacuaugcccaauaacgggaaauuugacaagcuguauauuuggggaguacaccauccuagcaccgauaaagaacaaacaaaucuuuacguuagagcuucugguagggugacugucuccaccaagcggucacagcagacagugaucccaaacauuggcagccgccccugggugagaggguugaguucuaggaucuccauauacuggaccauugucaaaccuggagacauccugcuaauuaacagcacgggcaaucucaucgcaccacgggguuauuucaagauccgcacugggaagucgucuauuaugcgauccgaugccccgauaggaacauguucaagugagugcaucacccccaacggcagcauuccuaaugacaaaccauuucagaacguuaauaagaucacuuacggcgcuugucccagauaugugaaacaaaacacacugaaacuugccaccgggaugaggaauguaccugaaaagcagacgcggggaauauucggugcgauugcaggcuuuaucgagaacgggugggagggaaugguggacggcugguacgguuuccgucaccaaaauuccgaagggaccggccaggccgcugaucugaagucuacacaggccgcaaucgaccagauuaacggaaaauugaaucgccucaucgagaagacuaacgaaaaguuccaccagauugagaaagaauuuagcgaggucgagggcagaauacaagaucuggaaaaguauguggaggacaccaaaaucgauuuauggucauacaaugcugaacugcucguugcccuugagaaccagcauacaauugaccugacugauagugaaaugaauaaguuguucgagaaaaccaggaagcagcuacgggagaacgcggaagacauggggaacggaugcuuuaagaucuaucacaaaugugauaaugccugcaucgguuccauucgaaacggcacauacgaccaugauguguaccgcgacgaggcacugaauaacagauuccagauaaagggggucgaacucaaaagcggauauaaggacuggauccuguggauuucuuuugcuaucucaugcuuccuucugugugugguauugcucggcuuuauuaugugggccugccaaaaagguaauaucagguguaacauaugcaucuga

SEQ ID NO: 128454 - RNA, 1701 nt, Artificial Sequence
  derived and/or modified CDS sequence (opt3) from hemagglutinin__InfluenzaA__ABB04928
augaagaccaucauugcccugagcuacauauucugccucguguuugcucaggaccuucccggcaacgauaauuccacagcaacucuguguuuggggcaccaugccgucccuaacggaacguuaguuaaaaccaucacaaaugaccaaauugaggugacuaacgcgaccgaacugguacagucuucaaguacagguaagaucugcaauaacccacacaggauucuagauggcaucaauuguacccucauagacgcucugcuuggggauccgcauugcgacggauuccagaacgagaaaugggaucuguuuguggaaagaagcaaggccuucuccaauuguuaucccuacgacgucccugauuaugcaucuuugcggucgcucguggccucaagcggcacucuggaguuuaucaacgaagguuucaauuggauugggguuacacagaacggaggcaguaaugcuugcaaacgcggcaccgacuccggguuuuucucucgacugaacuggcucuacaagagcggauccacguauccagugcaaaaugucacuaugcccaacaacgauaauucagacaaguuauacaucuggggugugcaccauccuaguaccgauaaagagcagacagaccuguauguacaggcaagcggcaagguuacugugucuaccaaacguucccagcaaacaauuaucccaaacgucgggucaagacccugggugaggggacuuagcagucggauaucuauuuacuggaccaucgugaagccuggcgacauuuuggucaucaauuccaacgguaaucugaucgccccacgcggguacuuuaaaaugagaacgggaaagagcucgauuaugaggucugaugcuccgauaggcacuuguuccucagagugcaucacacccaacggcaguauuccuaaugacaagccauuccagaacguuaauaaaaucaccuauggggccugucccaaguacgugaaacagaacacucuaaagcucgcgacaggaaugcggaauguaccugaaaaacagacccgcgguauauuuggcgcaauugccggguucaucgagaacggaugggaaggcaugaucgaugguugguauggguuucgacaccaaaauagcgagggcacgggacaggcugccgaccugaaguccacccaggcagcuauugaucaaaucaacggcaaacuuaauagagugauugagaagacaaacgaaaaguuccaccagauagagaaagaguucucugaagucgaagggaggauccaggaccuggagaaguacguggaggauacuaaaauugacuuguggagcuauaacgccgaacuccugguugcguuagagaaucagcauaccaucgaucugacagacucagaaaugaacaagcucuuugagaaaacucggcgucaacuucgcgaaaaugccgaggauaugggaaacgguugcuucaagaucuaccacaagugugacaaugcaugcauuggcaguauaagaaacgggaccuaugaccaugauguguacagggacgaggcucugaauaaccgguuucagaucaaaggagucgaauugaaguccggcuacaaagauuggauucuauggaucagcuucgccauuucuugcuuucugcucugugugguacugcuugguuucaucaugugggcuugccagaaggggaauauacgauguaacaucugcauuuga

SEQ ID NO: 128455 - RNA, 1701 nt, Artificial Sequence
  derived and/or modified CDS sequence (opt3) from hemagglutinin__InfluenzaA__ABB04939
augaagaccaucauugcccugagcuacauauucugccucguguuugcucagaaacuucccggcaacgacaauuccacagcaacucuguguuuggggcaccaugccgucccuaacggaacguuaguuaagaccaucacaaaugaucaaauugaggugacuaacgcgaccgaacugguacagucuucaaguacagguagaaucugcgacagcccacacaggauucuagauggcaaaaauuguacccucaucgacgcucugcuuggggauccgcauugcgacggauuccagaacgagaagugggaucuguuuguggaacgguccaaagccuucucuaauuguuaucccuacgacgucccugauuaugcaucguugcgcucacucguggccagcaguggcacucuggaguuuauaaacgaagguuucaauuggacagggguuacccaguccggaggcucuuacacgugcaagcgaggcagcgugaacuccuuuuucucacgucugaauuggcucuaugagagugagagcaaguacccagucuuaaacgugacuaugcccaauaacgggaaauuugacaagcuguauaucuggggaguacaccauccuucuaccgauaaagaacaaacaaaucuuuacguuagagcuuccgguagggugacugucucaaccaagcggagccagcagacagugauuccaaacaucggcagucgccccugggugagaggguugucuuccaggauuagcaucuacuggaccauagucaaaccuggagacauucugcuaaucaacucgauuggcaaucucaucgcaccacgggguuauuucaagauccgcacggggaagucuuccauuaugcgaucagaugccccgauaggaaucuguaguagcgagugcauuacucccaacggcuccaucccuaaugacaaaccauuucagaacguuaauaagauaacauacggcgcuugucccagauaugugaaacaaaacacccugaagcuggccacugggaugaggaauguaccugaaaaacagacacggggaauuuucggugcgaucgcaggcuuuaucgagaacgggugggagggaaugguggacggcugguacgguuuccgucaccaaaauucugaagggaccggccaggccgcugaucuuaagagcacgcaggccgcagucgaccagauuaacggaaaauugaaucgccucaucgagaagaccaacgaaaaguuccaccagauugagaaagaauuuucagagguggagggcagaauacaagaucuggaaaaguauguugaggacacaaaaaucgauuuauggaguuacaaugcugaacugcucguggcccuugagaaccagcauacuauugaccugaccgauuccgaaaugaauaaguuguucgagaaaacaaggaagcagcuacgggagaacgcggaagacauggggaacggaugcuuuaagaucuaucacaaaugugauaaugccugcaucgguagcauucgaaacggcacuuacgaccaugaugucuaccgcgacgaggcacugaauaacagauuccagauaaaggggguggaacucaaaucuggauauaaggacuggauccuguggauuucauuugcuaucaguugcuuccuucuguguguaguuuugcucggcuuuauuaugugggccugccaaaaagguaauaucagguguaacauaugcaucuga

SEQ ID NO: 128456 - RNA, 1701 nt, Artificial Sequence
  derived and/or modified CDS sequence (opt3) from hemagglutinin__InfluenzaA__ABB04950
augaagaccaucauugcccugagcuacauauucugccucguguuugcucagaaacuucccggcaacgacaauuccacagcaacucuguguuuggggcaccaugccgucccuaacggaacguuaguuaagaccaucacaaaugaucaaauugaggugacuaacgcgaccgaacugguacagucuucaaguacagguagaaucugcgacagcccacacaggauucuagauggcaaaaauuguacccucaucgacgcucugcuuggggauccgcauugcgacggauuccagaacgagaagugggaucuguuuguggaacgguccaaagccuucucuaauuguuaucccuacgacgucccugauuaugcaucguugcgcucacucguggccagcaguggcacucuggaguuuauaaacgaagguuucaauuggacagggguuacccaguccggaggcucuuacacgugcaagcgaggcagcgugaacuccuuuuucucacgucugaauuggcucuaugagagugagagcaaguacccagucuuaaacgugacuaugcccaauaacgggaaauuugacaagcuguauaucuggggaguacaccauccuucuaccgauaaagaacaaacaaaucuuuacguuagagcuuccgguaaggugacugucucaaccaaaaggagccagcagacagugauuccaaacaucggcagucggcccugggugcgcggguugucuuccagaauuagcaucuacuggaccauagucaagccuggagacauucugcuaaucaacucgacgggcaaucucauugcaccaagggguuauuucaagauccggacugggaaaucuuccaucaugcgcucagaugccccgauuggaacauguaguagcgagugcauaacccccaacggcuccaucccuaaugacaagccauuucagaacguuaauaaaauuacuuacggcgcuuguccccgauaugugaagcaaaacacacugaaacuugccaccgggaugagaaauguaccugaaaagcagacgaggggaaucuucggugcgauagcaggcuuuauugagaacgggugggagggaaugguggacggcugguacgguuuccggcaccaaaauucugaagggaccggccaggccgcugaucugaaaagcacacaggccgcaaucgaccagaucaacggaaaguugaaucgucucauugagaagacuaacgaaaaauuccaccagaucgagaaggaauuuucagaggucgagggccgcauucaagaucuggaaaaauauguggaggacaccaagauagauuuauggaguuacaaugcugaacugcucguugcccuugagaaccagcauacaaucgaccugacugauuccgaaaugaauaaauuguucgagaagaccagaaagcagcuaagggagaacgcggaagacauggggaacggaugcuuuaaaauuuaucacaagugugauaaugccugcaucgguagcauccggaacggcacauacgaccaugauguguaccgagacgaggcacugaauaaccgcuuccagauuaaaggggucgaacucaagucuggauauaaagacuggauacuguggaucucauuugcuauuaguugcuuccuucugugugugguauugcucggcuuuaucaugugggccugccaaaaggguaauauuagauguaacaucugcauauga

SEQ ID NO: 128457 - RNA, 1701 nt, Artificial Sequence
  derived and/or modified CDS sequence (opt3) from hemagglutinin__InfluenzaA__ABB04983
augaagaccaucauugcccugagcuacauacucugccuuguguucgcucagaaacugcccggcaacgacaauuccacagcaacuuuguguuuagggcaccaugccgucccuaacggaacgcugguuaagaccaucacaaaugaucaaauugaggugacuaacgcgaccgaauugguacagucuucaaguacagacagaaucugcgauagcccacaccagauucucgacggugagaauuguacccugaucgaugcccuucugggcgacccgcauugcgauggguuucagaacaaagaaugggacuuguucguggagagguccaaggcuuauucuaauuguuaccccuaugaugucccugacuacgugucgcuccggucacugguugcaagcaguggaacucuggaauuuaacaaugaguccuucaacuggacaggcguggcccaaaaugguaccucuagcgcuugcaaacgccgauccgauaagucauuuuucagucgucucaacugguuacaccagcugaaguauaaauacccagcacuuaaugucacgaugcccaacaaugagaaguuugacaaauuguauauauggggagugcaucacccugggacugauagcgaccagaucucucuguacgcccaggcuuccggcagaguaaccguuucaacaaagaggagccaacagacugugauuccaaacaucggcagucggcccuggguccgcggggugucuuccagaauuagcaucuacuggaccauagugaaaccuggagacauucuacucaucaacucgacagguaaucugauugccccaaggggcuauuucaagauccggucugggaaguccucaaucaugcgcagugaugcgccgauuggaaaauguaacagcgaaugcauaacccccaauggcuccaucccuaacgacaagccauuucagaaugucaaccgaauuacguacggucccuguccuagauauguuaaacagaauacucuuaagcuggcaacagggaugaggaacgugccagagaaacaaacccggggaaucuucggcgccauagcuggcuuuauugaaaaugggugggagggaaugauggaugguugguacggcuuccgucaccagaacucugaggggacuggacaggccgcagaccuaaagagcacacaagcugccaucaaucagaucaacggcaaacucaaucgccugauugaaaagaccaacgagaaguuucaucagaucgaaaaagaguucucagaaguagaggguaggauucaggauuuagagaaguauguggaagacacgaaaauagaucuguggaguuacaaugcggagcuccuugucgcccuggaaaaccaacacaccaucgacuugacagauuccgagaugaacaagcuauucgaaagaacuaaaaagcagcugcgggagaaugcagaggacauggggaacggcugcuuuaagauuuaucauaaaugugauaaugcuugcaucggaagcauccgaaacggcaccuacgaccacgacguguaccgcgaugaagcccucaauaacagauuccagauuaaggggguugagcugaaaucuggauauaaggacuggauacuuuggaucucauuugcuauuaguugcuuccuguuguguaucgugcuccuggguuuuauuaugugggccugccagaaaggcaauaucagguguaacauaugcaucuga

SEQ ID NO: 128458 - RNA, 1701 nt, Artificial Sequence; identical to SEQ ID NO: 128220
  derived and/or modified CDS sequence (opt3) from hemagglutinin__InfluenzaA__ABB04994

SEQ ID NO: 128459 - RNA, 1701 nt, Artificial Sequence
  derived and/or modified CDS sequence (opt3) from hemagglutinin__InfluenzaA__ABB05005
augaagaccaucauugcccugagccacauacucugccuuguguucgcucagaaacugcccgucaacgacaauuccacagcaacuuuguguuuaggccaucacgccguuccuaacgggacgcuggugaagaccaucacaaaugaucauauugagguaacuaacgcgaccgaacuugugcaaucuucaaguacaggaagaaucugcgacagcccacaccagauucucgauggugagaauuguacccugaucgacgcucuacugggcgauccgcauugcgacggguuucagaacaaagaaugggauuuguucgucgagagguccacugccuacucuaauuguuaucccuacgacgugccugauuaugcaucgcuccggucacugguugccagcaguggaacacuggaauuuaacaaugaguccuucaacuggaccggcguggcucagaaugguacgucuagcgcaugcaagcgccgauccauaaaaucauuuuucagucgucucaacugguuacaccaacugaaguacaaguauccagcccuuaaugucacuaugcccaacaaugagaaauuugacaaguuguacaucuggggagugcaccauccuagcaccgauucugaccagauuucccuguaugcucaggccucagggagaguaacaguuagcacuaaaaggagucagcaaaccgugaucccagauauuggcucucggcccuggguccgcggcguguccagcagaaucucgauauacuggacaauugugaagccuggggacauccuacucauuaacucuaccggaaaccugaucgcgccaagggguuacuucaaaauccgguccggcaagucaaguauuaugcgcagcaaugcaccgauagggaaguguaacuccgaaugcaucacgcccaauggaucugucccuaacgacaaaccauuucagaauguuaaccgaauuacuuauggcgccugucccagauacgugaagcagaauacacuuaaacuggcuaccgguaugaggaacguaccugagaagcagacucgggggaucuucggagccauagcaggcuuuauugaaaauggcugggaggggaugguggauggaugguaugguuuccgucaccaaaacagcgagggcacagggcaggcugccgacuugaaaucaacccaggcggccaucaaucaaaucaacggaaagcucaaucgccugauugagaaaacgaacgaaaaguuucaucagaucgaaaaggaguucagugaagucgagggcaggauucaggauuuagagaaauacguggaagacaccaagauagaucugugguccuauaaugcagagcuccuuguugcucuggaaaaccagcacacaaucgacuugacugauagcgagaugaacaaacuauucgaaagaacccggaagcaacugcgagagaaugccgaggacauggguaacgggugcuuuaaaauuuaccacaagugugauaaugcuugcaucggcucuauccgcaacggaacauaugaccaugauguguacagagacgaagcccucaauaacagguuccagauuaagggcgucgagcugaaaucaggguacaaggacuggauacuuuggaucaguuuugcaauuagcugcuuccuguugugugugguacuccugggauuuaucaugugggccugccagaaagguaauauucgguguaacaucugcauauga

SEQ ID NO: 128460 - RNA, 1701 nt, Artificial Sequence
  derived and/or modified CDS sequence (opt3) from hemagglutinin__InfluenzaA__ABB05183
augaagaccaucauugcccugagcuacauacucugccuuguguucgcucagaaacugcccgucaacgacaauuccacagcaacuuuguguuuaggccaccaugccguuccuaacgggacgcuggugaagaccaucacaaaugagcacauugaaguaacuaacgcgaccgagcuagugcaaucuucaaguacaggaagaaucugcgauagcccacaucagauucucgacggugaaaauuguacccugaucgaugcccuucugggcgacccgcacugcgauggguuucagaacaaagagugggacuuguucgucgaaagguccacugcuuauucuaauuguuaccccuaugaugugccugacuacgcaucgcuccggucacugguugccagcaguggaacacuggaguuuaacaaugaguccuucaacuggaccggcguggcucagaaugguacgucuagcgcaugcaagcgccgauccauaaaaucauuuuucagucgucucaacugguuacaucaacugaaguauaaguacccagcccuuaaugucacuaugcccaacaaugaaaaauuugauaaguuguauaucuggggagugcaccacccuagcaccgacucugaucagauuucccuguacgcucaggccucagggagaguaacaguuagcacuaaaaggagucagcaaaccgugaucccaaacauuggcucucggcccuggguccgcggcguguccagcagaaucucgauauacuggacaauugugaagccuggggacauccuacucauuaacucuaccggaaaucugaucgcgccaagggguuauuucaaaauccgguccggcaagucaaguauuaugcgcagcaacgcaccgauagggaaguguaauuccgagugcaucacgcccaacggaucuauuccuaaugauaaaccauuucagaacgucaaucgaaucacuuacggcgccugucccagauauguuaagcagaacacacuuaaacuggcuaccgguaugaggaaugugccugaaaagcagacucgggggauauucggagccauugcaggcuuuaucgagaacggcugggaggggaugguagacggaugguacgguuuccgucaucaaaauagcgaaggcacagggcaggcugccgacuugaaaucaacccaggcggccaucaaccaaauuaauggaaagcucaaccgccugaucgagaaaacgaaugaaaaguuucaccagauugagaaggaguucagugaaguggagggcagaauacaggauuuagaaaaauaugucgaggacaccaagaucgaucugugguccuacaacgcagaacuccuuguggcucuggagaaccagcauacaauugacuugacugauagcgaaaugaauaaacuauucgagaggacccggaagcaacugcgagagaacgccgaagacauggguaaugggugcuuuaaaguuuaucacaagugugauaacgcuugcaucggcucuauccgcaauggaacauacgaccacgauguguacagagacgaggcccucaacaauagguuccagauuaagggcgucgaacugaaaucaggguauaaggauuggauacuuuggaucaguuuugcaauuagcugcuuccuguugugugugguacuccugggauuuaucaugugggccugccagaaagguaacauucgguguaauaucugcauauga

SEQ ID NO: 128461 - RNA, 1701 nt, Artificial Sequence
  derived and/or modified CDS sequence (opt3) from hemagglutinin__InfluenzaA__ABB05194
augaagaccaucauugcccugagcuacauacucugccuuguguucgcucagaaacugcccggcaacgacaauuccacagcaacuuuguguuuagggcaccaugccgucccuaacggaacgcugguuaagaccaucacaaaugaucaaauugaggugacuaacgcgaccgaacuuguacagucuucaaguacagguagaaucugcgacagcccacaccagauucucgauggcgagaauuguacccugaucgacgcucuacugggggauccgcauugcgacggauuucagaacaaagaaugggauuuguucguggagagguccaaggccuauucuaauuguuaccccuaugacgucccugauuacgcaucgcuccggucacugguggccagcaguggcacucuggaauuuaacaaugaguccuucaacuggacagguguugcucaaaaugggaccucuagcgcaugcaaacgccgauccaacaagucauuuuucagucgucucaauugguuacaccagcugaaguauaaauacccagcccuuaacgugauaaugcccaauaacgagaaguuugacaaauuguauaucuggggaguccaucacccuagcacggauucugaccagauuucccuguacgcucaggccucaggcagagugacuguaagcaccaagaggagucaacagacaguuaucccaaacauuggcucucggcccugggugcgcggggucuccagcagaaucucgauauacuggacuauugugaaaccuggagauauccuacucauuaauucuaccgguaaccugaucgcgccaaggggcuauuucaagauccgguccgggaagucaagugugaugcgcagcgacgcauccauuggaaaauguaauucugaaugcauaacaccgaacggcagcauccccaaugacaagccuuuucagaacgucaaucgaauuaccuacggugccuguccaagauauguuaaacagaacacgcuuaagcuggcuacugggaugaggaaugugcccgagaaacaaacacggggaaucuucggcgccauagcaggcuuuauugaaaacgggugggagggaaugguagaugguugguacggcuuccgucaccaaaauucagaggggaccggacaggcugccgacuugaagaguacucaggcggccaucaaccagaucaauggcaaacucaaccgccugauugaaaagacaaaugagaaguuucaucagaucgaaaaagaguucuccgaaguggaggguaggauucagaacuuagagaaguaugucgaagauaccaaaauagaccuguggagcuacaacgcagagcuccuuguggcucuggaaaaucaacacacgaucgauuugaccgacucugagaugaacaagcuauucgaaagaacuaaaaagcagcugcgggagaaugccgaggauauggggaacggcugcuuuaagauuuaucauaaaugugacaaugcuugcaucggaucaauccgaaacggcacauacgaucacgacguuuaccgcgaugaagcccucaauaacagauuccagauuaaggggguggagcugaaaaguggauauaaggacuggauacuuuggaucagcuuugcaauuuccugcuuccuguugugugucgugcuccuggguuuuaucaugugggccugccagaaaggcaauauuagguguaacaucugcauauga

SEQ ID NO: 128462 - RNA, 1701 nt, Artificial Sequence
  derived and/or modified CDS sequence (opt3) from hemagglutinin__InfluenzaA__ABB05205
augaagaccaucauugcccugagcuacauacucugccuuguguucgcucagaaacugcccggcaacgacaauuccacagcaacuuuguguuuagggcaccaugccgucccuaacggaacgcugguuaagaccaucacaaaugaucaaauugaggugacuaacgcgaccgaacuuguacagucuucaaguacagguagaaucugcgacagcccacaccagauucucgauggcgagaauuguacccugaucgacgcucuacugggggauccgcauugcgacggauuucagaacaaagaaugggauuuguucguggagagguccaaugccuauucuaacuguuaccccuaugacgucccugauuacgcaucgcuccggucacugguggccagcaguggcacucuggaauuuaauuccgagucuuucaacuggacagguguugcucaaaaugggaccagcuccgcaugcaagcgccgaucaaacaaaaguuucuuuagccgucucaauugguuacaccagcugaaguauaaguacccagcccuuaacgugacgaugcccaauaacgagaaauuugacaaguuguauauauggggaguccaucacccuggcacugauucugaccagaucucccuguacgcucaggccucaggcagagugaccguaagcacaaaaaggagucaacagacuguuauuccaaacaucgggucucggcccugggugcgcggagucuccagcagaauuucgaucuacuggaccauagugaagccuggugauauucuacucaucaauucuacaggcaaccugauugcgccaaggggguauuucaaaauccgguccggaaagucaaguaucaugcgcagcgacgcaccgauuggcaaguguaauuccgaaugcauaacccccaacgguucuaucccuaauaacaaaccauuucagaaugugaaccgaauuacguacggggccugucccagauaugucaagcagaauacucuuaaacuggcuacaggaaugaggaacguuccugagaagcaaacccggggcaucuucggcgccauagcaggguuuauugaaaauggaugggaggguaugguggacggcugguacggguuccgucaccagaacagcgagggaacuggccaggcugccgauuugaaaucaacacaagcggccaucaaucagaucaacgguaagcucaaucgccugauugagaaaaccaacgaaaaguuucaucagaucgaaaaggaguucagugaaguagaggggaggauucaggacuuagagaaauauguggaagauacgaagauagaccugugguccuacaacgcagagcuccuugucgcucuggaaaaucaacacaccaucgauuugacagacagcgagaugaacaaacuauucgaaagaacuaagaaacagcugcgggagaaugccgaggauaugggcaacggaugcuuuaagauuuaucauaagugugacaaugcuugcaucggcucuauccgaaacgggaccuacgaucacgacguguaccgcgaugaagcccucaauaacagauuccagauuaaaggaguugagcugaagucagguuauaaagacuggauacuuuggaucaguuuugcaauuagcugcuuccuguugugugugguccuccugggcuuuaucaugugggccugccagaaggggaauauuagguguaacaucugcauauga

SEQ ID NO: 128463 - RNA, 1701 nt, Artificial Sequence; identical to SEQ ID NO: 128120
  derived and/or modified CDS sequence (opt3) from hemagglutinin__InfluenzaA__ABB05216

SEQ ID NO: 128464 - RNA, 1701 nt, Artificial Sequence
  derived and/or modified CDS sequence (opt3) from hemagglutinin__InfluenzaA__ABB46392
augaagaccaucauugcccugagcuacauauucugccucgcuuuugcacaggaccuucccggcaacgauaauuccacagccacucuguguuuggggcaccaugcggugccuaacggaacguuagucaaaaccaucacaaaugaccaaauugagguuacuaacgcuaccgaacuggugcagucuucaaguacagguaagaucugcgauaauccacacaggauucuagacggcaucaacuguacccucauagaugcccugcuuggggacccgcauugcgauggauuccagaaugagaaaugggaccuguuuguagaaagaagcaaggcauucuccaacuguuaucccuacgaugugccugacuaugccucuuugcggucgcucgucgcuucaagcggcacucuggaguuuaucaaugaagguuucaacuggacaggggugacccagaauggaggcaguuccgcaugcaaacgcggcccagauaacggguuuuucucucgacugaauuggcucuacaagagcggauccacguaucccguucaaaacgugacuaugccuaauaacgacaacucagauaaguuauacauuugggguguccaccauccaaauaccgacaaagagcagacagaccuguaugugcaggccaguggcaagguaacuguuagcaccaaacguucucagcaaacaaucauucccaacgugggguccagaccuugggucaggggacuuucaagccgggugaguaucuacuggaccauagugaagccaggcgauauuuuggucaucaauucuaacgguaaucugauugcuccgcgcggguacuuuaaaaugagaacgggaaaguccagcaucaugaggucggacgcccccaucggcacuuguucuuccgagugcauuacaccuaacggcucaauaccaaaugauaagcccuuccagaacguuaauaaaaucaccuauggggcguguccuaaguacgugaaacagaacacucuaaagcucgcaacaggaaugcggaauguaccagaaaaacagacccgcgguauuuuuggcgccaucgcuggguucauagagaacggaugggaaggcaugauugacgguugguauggguuucgacaccaaaauagugagggcacgggacaggccgcagaucuuaagagcacccagacagcuaucgaccaaaucaacggcaaacugaauagagugauugagaagacuaacgaaaaguuccaccagaucgagaaagaguucuccgaagucgaagggaggauucaggaucuggagaaguacguggaggacaccaaaauagauuuguggucuuauaacgccgaacuccugguugcguuagagaaucagcauacaaucgaccugacugauagcgaaaugaacaagcucuuugagaaaacccggcgucaacuucgcgaaaaugccgaggacaugggaaacgguugcuucaagauuuaccacaagugugacaaugcaugcaucggcucaaucagaaacgggacauaugaucaugacguguacagggaugaggcucugaauaaccgguuucagauuaaaggagucgaauugaagaguggcuacaaagacuggauacuauggaucuccuucgccauuagcugcuuucugcucugugugguacugcuugguuucaucaugugggcuugccagaaggggaauauucgauguaacaucugcauauga

SEQ ID NO: 128465 - RNA, 1701 nt, Artificial Sequence
  derived and/or modified CDS sequence (opt3) from hemagglutinin__InfluenzaA__ABB46414
augaagaccaucauugcccugagcuacauacucugccuuguguucgcucagaaacugcccggcaacgacaauuccacagcaacuuuguguuuagggcaccaugccgucccuaacggaacgcugguuaagaccaucacaaaugaucaaauugaggugacuaacgcgaccgaacuuguacagucuucaaguacagguagaaucugcgacagcccacacaggauucucgauggcgagaauuguacccugaucgacgcucuacugggggauccgcauugcgacggauuucagaacaaagaaugggauuuguucguggagcgguccaaggccuauucuaauuguuaccccuaugacgucccugauuacgcaucgcuccgcucacugguggccagcaguggcacucuggaauuuaacaaugaguccuucaacuggacagguguugcucagaaugggaccucuagcgcaugcaaacgacguuccauaaagucauuuuucaguagacucaacugguuacaccaacugaaguauaaauacccagcccuuaaugugacgaugcccaacaaugacaaguuugauaaauuguauaucuggggaguccaucacccuagcacugacucugaucagaccucccuguacgcucaggccucaggcagggugacaguaagcacuaagcggagucagcaaaccguuauuccaaacaucggcucucgccccugggugagaggggucuccagcaggauuucgaucuacuggacaauagugaaaccuggagacauucuacucaucaacucuaccgguaaucugauugcgccacggggcuauuucaagauccgcuccgggaagucaaguaucaugcgaagcgacgcaccgauuggaaaauguaacuccgagugcauaacgcccaauggcucuaucccuaacgauaagccauuucagaaugugaacagaauuacuuacggugccugucccagguaugucaaacagaauacacuuaagcuggcuaccgggaugcggaacguuccugaaaaacagacucguggaaucuucggcgccauagcaggcuuuauugagaaugggugggaaggaaugguggacgguugguacggcuuccgccaccaaaacagcgaggggacaggacaggcugccgauuugaagucaacccaggcggccaucaaucaaaucaacggcaaacucaauagacugauugagaagacgaacgaaaaguuucaucagaucgagaaagaguucagugaaguagaagguaggauucaggacuuagagaaguauguggaggauaccaaaauagaccugugguccuacaaugcagaacuccuugucgcucuggagaaccagcacacaaucgauuugacugacagcgaaaugaacaagcuauucgagcggacccgaaaacaacugcgcgaaaaugccgaggauauggggaacggcugcuuuaagauuuaucauaagugugacaaugcuugcaucggaucuaucagaaacggcacauacgaucacgacguguacagggacgaggcccucaauaaccgguuccagauuaaagggguugaacugaagucaggauauaaagauuggauacuuuggaucaguuuugcaauuagcugcuuccuguuuuguguggucuugcucgguuucaucaugugggccugccagaagggcaauauucgcuguaacaucugcauauga

SEQ ID NO: 128466 - RNA, 1701 nt, Artificial Sequence
  derived and/or modified CDS sequence (opt3) from hemagglutinin__InfluenzaA__ABB46425
augaagaccaucauugcccugagcuacauacucugccuuguguucgcucagaaacugcccggcaacgacaauuccacagcaacuuuguguuuagggcaccaugccgucccuaacggaacgcugguuaagaccaucacaucugaucaaauugaggugacuaaugcgaccgaacuuguacagucaaguagcacagguaaaaucugcgacuccccacacaggauucucgauggcgagaacuguacccugaucgacgcucuacugggggauccgcauugcgacggauuucagaauaaggaaugggauuuguucguggagagaucuaaagccuauucgaacuguuaccccuaugacgucccugauuacgcaucacuccggagccugguggccaguuccggcacucuggaauuuaauaacgagucuuucaauuggacagguguugcucagaacgggaccagcuuugcaugcaagcgccgauccauaaagucauucuuuagucgucucaauugguuacaccaacugaaauauaaguacccagcccuuaacgugacgaugcccaauaacgacaaauucgauaaguuguauaucuggggaguccaucacccuagcacugacucugaucagaccucccuguacgcucaggccucaggcagagugacaguaagcacuaaaaggagucagcaaaccguuauuccaaauaucggcucucggcccugggugcgcggggucuccagcagaauuucgaucuacuggacaauagugaagccuggagacauucuacucaucaacucuaccgguaaccugauugcgccaaggggcuauuuuaagauccgguccgggaaaucaaguaucaugcgcagcgacgcaccgauuggaaaguguaauuccgagugcauaacgcccaacggcucuaucccuaaugauaaaccauuccagaacgugaaucgaauuacuuacggugccugucccagauaugucaagcagaacacacuuaaacuggcuaccgggaugaggaauguuccugaaaagcagacucggggaaucuuuggcgccauagcaggcuucauugagaacgggugggaaggaaugguggacgguugguacggcuuucgucaccaaaauagcgaggggacaggacaggcugccgauuugaaaucaacccaggcggccaucaaccaaaucaauggcaagcucaaccgccugauugagaagacgaaugaaaaauuccaucagaucgagaaggaguucagugaaguagaagguaggauucaggacuuagagaaauauguggaggauaccaagauagaccugugguccuacaacgcagaacuccuugucgcucuggagaaucagcacacaaucgauuugacugacagcgaaaugaacaaacuauuugagagaacccggaagcaacugcgagaaaacgccgaggauauggggaauggcugcuucaagauuuaucauaaaugugacaacgcuugcaucggaucuauccgcaauggcacauacgaucacgacguguacagagacgaggcccucaacaauagguuucagauuaaggggguugaacugaaaucaggauauaaggauuggauacuuuggaucaguuucgcaauuagcugcuuucuguugugugugguccuccuggguuucaucaugugggccugccagaaaggcaacauucgguguaauaucugcauauga

SEQ ID NO: 128467 - RNA, 1701 nt, Artificial Sequence
  derived and/or modified CDS sequence (opt3) from hemagglutinin__InfluenzaA__ABB46436
augaagaccaucauugcccugagcuacauacucugccuuguguucgcucagaaacugcccggcaacgacaauuccacagcaacuuuguguuuagggcaccaugccgucccuaacggaacgaucguuaagaccauuacaaaugaucaaaucgaggugacuaacgcgaccgaacugguacagucuucaaguacagguggcauuugcgacagcccacaccagauccuagauggggagaauuguacccucauagacgcucugcuuggagauccgcagugcgacggcuuucaaaacaaaaagugggaucuguucguggaaagauccaaagccuauucuaauuguuaccccuaugacgucccugauuacgcaucguugaggucacucguggccagcagugguacucuggaguuuaacaaugaauccuucaacuggacagggguuacccagaauggaacgucuagcgcuugcaagcggcgcuccaacaauucauuuuucagucgacugaacuggcucacucauuuaaaguuuaaauauccagcacugaaugugaccaugcccaacaacgagaaguacgacaaacuuuauaucuggggcguccaccauccuggcacagauaaugaccagauuagcuuguacgcccaggcuucugggcguaucacuguguccaccaagagaucacaacagacaguaauuccaaacaucggaagcaggccccggguucgcgauauaccuaguagaauuucuaucuacuggaccauugugaaaccaggugacauccugcuaaucaauuccacgggcaaccucauugccccgaggggguauuucaagauacggagcggaaagucgucuaucaugcgcuccgacgcgcccauuggcaaauguaauucagagugcaucacuccuaacgguaguauaccaaaugauaagcccuuucagaacgucaaucgaauuacauacggggcauguccuagauaugugaaacagaacacccugaaacuugccacuggaaugaggaaugugccagaaaagcaaacacggggcaucuucggcgcuaucgccggguuuauugagaacggaugggaagguauggucgacggcugguacggguuccgucaccagaauagcgagggaaucggccaggcagcugaucugaaguccacccaagccgcgauuaaccagauaaaugguaaauugaaccgccucaucgggaagacgaacgagaaguuucaccagauugaaaaagaguucucugaaguugagggcagaauccaggaccuggaaaaguauguggaggauaccaaaaucgacuuauggagcuacaaugccgagcugcucguagcacuugaaaaccaacauacaauugaucugacugacucagagaugaauaaguuguucgaaaggaccaaaaagcagcuacgggagaacgcugaagauaugggaaauggcugcuuuaagauauaucacaaaugugacaacgccugcaucgggaguauucgaaauggaacauacgaucaugacguguaccgcgacgaggcucugaacaauagauuccagaucaagggugucgagcucaaauccggcuauaaggauuggauucuguggaucagcuuugccauaucuugcuuccuucuguguguggcauugcucggguuuaucaugugggccugccagaaaggaaacauuagguguaauaucugcauuuga

SEQ ID NO: 128468 - RNA, 1701 nt, Artificial Sequence; identical to SEQ ID NO: 128401
  derived and/or modified CDS sequence (opt3) from hemagglutinin__InfluenzaA__ABB46447

SEQ ID NO: 128469 - RNA, 1701 nt, Artificial Sequence
  derived and/or modified CDS sequence (opt3) from hemagglutinin__InfluenzaA__ABB46458
augaagaccaucauugcccugagcuacauacucugccuuguguucgcucagaaacugcccggcaacgacaauuccacagcaacuuuguguuuagggcaccaugccgucccuaacggaacgaucguuaagaccauuacaaaugaucaaaucgaggugacuaacgcgaccgaacugguacagucuucaaguacagguggcauuugcgacagcccacaccagauccuagauggggagaauuguacccucauagacgcucugcuuggagauccgcagugcgacggcuuucaaaacaaaaagugggaucuguucguggaaagauccaaagccuauucuaauuguuaccccuaugacgucccugauuacgcaucguugaggucacucguggccagcagugguacucuggaguuuaacaaugaauccuucaacuggacagggguuacccagaauggaacgucuagcgcuugcaagcggcgcuccaacaauucauuuuucagucgacugaacuggcucacucauuuaaaguuuaaauauccagcacugaaugugaccaugcccaacaacgagaaguucgacaaacuuuacaucuggggcguccaccauccuggcacagauaaugaccagauuagcuuguaugcccaggcuucugggcguaucacuguguccaccaagagaaaccaacagacaguaauuccaaauaucggaucaaggccccggguucgcgauauaccuagcagaauuaguaucuacuggaccauugugaaaccaggugacauccugcuaaucaacucuacgggcaaucucauugccccgaggggguacuuuaagauacgguccggaaagagcucgaucaugcgcucugacgcgcccauuggcaaauguaaguccgagugcaucacuccuaacgguucaauaccaaaugauaaacccuuccagaacgucaaucgaauuacauauggggcauguccuagauacgugaagcagaacacccugaaacuugccacuggaaugaggaaugugccagaaaagcaaacacggggcaucuuuggcgcuaucgccggguucauugagaacggaugggaagguauggucgacggcugguauggguuucgucaccagaauagugagggaaucggccaggcagcugaucugaaaagcacccaagccgcgauuaaccagauaaaugguaaguugaaccgccucaucgggaagacgaacgagaaauuccaccagauugaaaaggaguucuccgaaguugagggcagaauccaggaccuggaaaaauacguggaggauaccaagaucgacuuauggucuuauaaugccgagcugcucguagcacuugaaaaccaacauacaauugaucugacugacagcgagaugaauaaauuguuugaaaggaccaagaagcagcuacgggagaacgcugaagauaugggaaauggcugcuucaaaauauaccacaagugugacaacgccugcaucgggucaauucgaaauggaacauaugaucaugacguguaccgcgacgaggcucugaacaauagauuucagaucaaaggugucgagcucaagaguggcuacaaagauuggauucuguggaucuccuucgccauaagcugcuuucuucuguguguggcauugcucggguucaucauguggggaugccagaagggcaacauuagguguaauaucugcauuuga

SEQ ID NO: 128470 - RNA, 1701 nt, Artificial Sequence
  derived and/or modified CDS sequence (opt3) from hemagglutinin__InfluenzaA__ABB51961
augaagaccaucauugcccugagcuacauacucugccuuguguucgcucagaaacugcccggcaacgacaauuccacagcaacuuuguguuuagggcaccaugccgucccuaacggaacgaucguuaagaccauuacaaaugaucaaaucgaggugacuaacgcgaccgaacugguacagucuuuuucaacagguggcauuugcgacaguccacaccagauccuagauggggagaauuguacccucauagacgcucugcuuggagauccgcagugcgacggcuuccaaaacaaaaagugggaucuguuuguggaaagaagcaaagccuauuccaauuguuaccccuaugacgucccugauuacgcaugcgugaggucuuugguugccucgucagguacucucgaguucaacaaugagagcuuuaacugggcuggggugacacagaauggaaccaguuccgcauguaagcggcgcucuaacaagagcuucuuuucccgacugaauuggcugacgcaucucaaauauaaguacccagccuuaaacgucacuaugcccaauaacgaaaaauucgacaagcuguauaucuggggcgugcaccauccuggcaccgauucagaccagauuagucuuuacgcucaggccagcgggcguaucacaguaucuacucaaagaugcaaacaguugguuauuccaaacaucggauccaggccccgggugcgcgaugucucaagcagaauaaguauuuacuggaccaucgugaauccuggugacauucugcuaaucaacucuacaggcaaucucaucgcgccaaggggguauuuuaagauucgguccggaaagagcucgauaaugcgcucugacgcaccgaucggcaaauguaacuccgagugcauuacccccaaugguucaaucccuaacgauaagccauuccagaaugugaaccgaauaacguacggggccugucccagauaugucaaacagaauacucugaagcuggcuacaggaaugaggaacguuccugaaaaacaaacccggggcauuuuuggcgccaucgcaggguucaucgagaauggaugggaagguaugguggacggcugguacggguuucgucaccagaacagugagggaacuggccaggcugccgaucuuaagagcacacaagcggccauuaaucagaucaacgguaaauugaaucgccucauugggaagaccaacgagaaguuccaccagauagaaaaagaguucuccgaaguagagggcagaauccaggaccuggaaaaguauguggaggauacgaaaauugacuuauggucuuacaacgcagagcugcucgucgcucuugaaaaucaacauaccaucgaucugacagacagcgagaugaacaaguuguuugaaaggacuaaaaagcagcuacgggagaaugccgaagauaugggaaacggcugcuucaagaucuaucacaaaugcgacaaugcuuguauugagucaauacgaaacgggaccuacgaucaugacguguaccgcgacgaggcccugaauaacagauuucagaucaagggaguugaacucaaaagugguuauaaggauuggauucuguggaucuccuucgcaauuagcugcuuucuucuguguguggccuugcucggcuucaucaugugggcuugccagaaagggaauauaagguguaacaucugcauuuga

SEQ ID NO: 128471 - RNA, 1698 nt, Artificial Sequence
  derived and/or modified CDS sequence (opt3) from hemagglutinin__InfluenzaA__ABB51962
augaaggccaaacugcucgugcuucugugcaccuucacagcuacuuacgcagacacgaucuguauuggcuaucacgccaacaauagcaccgauacagucgacacuguuuuggagaagaacgugaccguaacacauuccgugaauuuacuggaagauucucacaacgggaaacuaugccuccugaagggaauagcgccccuucagcuggguaauuguucagucgcuggcuggaucuuggggaacccugagugcgaacuccugauuaguaaagagagcugguccuacaucguggaaaccccaaauccggagaacggaacuuguuaucccggcuacuuugccgacuaugaggaacugagagagcaacucucuucgguuagcucauucgaaagguuugagauuuucccuaaggguaguuccuggccaaaucauacagugaccggggucucugcaagcugcucccacaacggaaagucaaguuuuuaccggaauuuacuguggcuuacgggcaaaaacggcuuguaucccaaucugagcaugucuuacgugaacaauaaggagaaagaaguucuaguacucuggggagugcaucacccuccaaacaucgggaaccagcgcgcccuguaccacacugagaaugcuuaugucuccguggugucaagccauuacagucgacguuucacccccgaaauagcaaagagaccuaaagucagggaucaggagggucggaucaacuauuacuggacacuucuggaaccaggcgacacuauuaucuuugaggccaaugggaacuugauugcuccgugguaugccuucgcgaugucucgcggauuuggcuccgguaucagcaccucgaaugcacccaugggggagugugaugccaaguuccagacaccucaaggaggcauaaacauuucucucccauuucagaauguucaccccgugaccaucggcgaaugcccuaacuacguaagauccgcuaagcugaggauggugacgggguuacggaauauuccaucaauccagagucgcggacuguucggugccaucgcaggcuuuauugaagggggauggacuggcauggucgacgguugguauggguaccaucaccagaacgaacaaggcagcggauacgcugccgaucagaaauccacacagaaugcgauaaacggcaucaccaauaaggugaacucuguuauugagaaaaugaauacucaguucacagccguggggaaggaguucaacaaacucgagcgaagaauggagaaccuuaauaagaaagucgacgauggauuucuggacaucuggaccuauaacgcagaauugcuagugcugcucgagaaugaaaggacgcuggauuuccacgacagcaacguaaagaaucuuuacgagaagguuaaaucacaacugaagaacaaugcuaaagaaauagguaacggcuguagugaguuuuaucauaagugcaauaacgaguguauggaauccgugaaaaaugggaccuacgacuaucccaaguacagcgaggaaucuaaguugaaccgggagaaaauugauggagucaagcucgagucaaugggcguguaucagauccuggccaucuacaguacagucgcuagcuccuuagugcugcuaguuucucucggugccauuucguucuggaugugcagcaaugggucccugcagugccguaucuguauuuga

SEQ ID NO: 128472 - RNA, 1701 nt, Artificial Sequence
  derived and/or modified CDS sequence (opt3) from hemagglutinin__InfluenzaA__ABB51963
augaagaccaucauugcccugagcuacauacucugccuuguguucgcucagaaacugcccggcaacgacaauuccacagcaacuuuguguuuagggcaccaugccgucccuaacggaacgaucguuaagaccauuacaaaugauagaaucgaggugacuaacgcgaccgaacugguacaaucuucaaguacagguggcauuugcgacagcccacaccagauccuagauggggagaauuguacccucauagacgcucugcuuggagauccgcagugcgacggcuuucagaacaaaaagugggaucuguucguggaaagguccaaagccuauucuaauuguuaccccuaugacgucccugauuacgcaucguugcggucacucguggccagcagugguacucuggaguuuaacaaugaauccuucaacuggacagggguuacccaaaauggaacgucuagcgcuugcaagcgccgauccaacaauucauuuuucagucgucugaacuggcucacucauuuaaaguuuaaauauccagcacugaaugugaccaugcccaacaacgagaaguucgacaaacuuuacaucuggggcguccaccauccuggcacagauaaugaccagauuagcuuguaugcccaggcuucugggagaaucacuguguccaccaagaggucacagcaaacaguaauuccaaacaucggaagccggccccgcguuagacacauaccuaguaggauuucuaucuacuggaccauugugaauccaggugauauccugcuaaucaacuccacgggcaaucucauugccccgcggggguacuuuaaaauacgcagcggaaagucgucuaucaugcgauccgacgcgcccauuggcaaguguaacucagagugcaucacuccuaaugguaguauaccaaacgacaaacccuuccagaaugucaacagaauuacauauggggcauguccuagguacgugaagcagaauacccugaaacuugccacuggaaugcggaacgugccagaaaagcagaaucguggcaucuuuggcgcuaucgccggguucauugagaacggaugggaagguauggucgauggcugguauggguuucgccaccaaaauagcgagggaaucggccaggcagcugaccugaaauccacacaggccgcgauuaaccaaauaaacgagaaguugaauagacucaucgguaaaaccaacgaaaaguuccaucagauugagaaggaguucucugaaguugaagggaggauccaggaucuggagaaauacguggaggacacgaagaucgauuuauggagcuauaaugccgaacugcucguagcacuugagaaccagcacaccauugaccugacagauucagaaaugaauaaauuguuugagcggacuaagaaacaacuacgagaaaacgcugaggacaugggcaauggaugcuucaagguguaccauaagugugauaacgccugcauaggcaguauccgcaaugggaccuaugaccacaacgucuacagagaugaggcucugaauaacagguuucagauuaaaggaguggaacucaaguccgguuacaaagacuggauccuguggauuagcuucgccaucucuugcuuucuucuguguguugcauugcucggcuucauaaugugggccugccagaaggggaauauccgguguaacauuugcaucuga

SEQ ID NO: 128473 - RNA, 1701 nt, Artificial Sequence; identical to SEQ ID NO: 128330
  derived and/or modified CDS sequence (opt3) from Hemagglutinin__InfluenzaA__ABB51964

SEQ ID NO: 128474 - RNA, 1698 nt, Artificial Sequence
  derived and/or modified CDS sequence (opt3) from hemagglutinin__InfluenzaA__ABB53603
augaaggugaaacugcucauccuucugugcaccuucacagccacuuacgcugacacgauuuguauaggcuaucacgcaaacaauagcaccgauacagucgacacuguuuuggagaagaacgugaccguaacacauuccgugaauuuacuggaagauucucacaacgggaaacuaugccuccugaagggaaucgcgccccuucagcuggguaauuguucagucgccggcuggauuuuggggaacccugagugcgaacuccugaucaguaaagagagcugguccuacauuguggaaaccccaaauccggagaacggagcuuguuaucccggcuacuuugccgacuaugaggaacugagagagcaacucucuucgguuagcucauucgaaagguuugagaucuucccuaaggagaguuccuggccaaaucauacugugacaggugucucugcaagcugcucccacaacgggaagucaaguuuuuaccggaauuuacuguggcuuaccggaaagaacggcuuguaucccaaucugagcaagucuuacgccaacaauaaaaagaaagaagugcuaauacucuggggcguacaucacccuccaaacaucgggaaccagcgcacgcuguacuauacugagaaugcuuacguuuccguggucucaagccacuauagucgacguuucacccccgaaauuacaaagagaccuaaggugagggaucaggagggacggaucaacuacuauuggacucuucuggaaccaggugacaccauuaucuuugaggcaaauggcaacuugauagccccgugguacgcuuucgcccucucucgcggguuuggauccggcauuaucacaagcaaugcgcccauggaugagugugacgcaaaaugccagaccccucaaggugccauuaacucgucucugccauuccagaaugugcaucccgucacgaucggggaauguccuaaguauguuagauccgcuaaauuaaggauggugacuggacugcggaacaucccaucaauucagagucgcggccucuuuggcgccauagcaggguucaucgagggagguuggacaggcaugguagaugggugguacggauaccaccaucagaaugaacaaggcagcgguuaugcugccgaccagaaguccacccagaacgcgauuaaugggaucacuaacaaaguaaauucugucauagagaagaugaacacacaguuuaccgccgugggcaaagaguucaauaaacuugaacgaagaauggagaaccugaacaagaaaguugaugacggauucuuggauauuuggacguacaaugcagaacuacuggugcuccuggagaacgaaaggacccuugacuuucacgacagcaaugucaagaaccuguaugagaaagugaagucacaauugaaaaauaacgcuaaggaaaucggcaaugggugcuucgaguuuuaccacaaguguaacaaugagugcauggaaagugugaaaaacggaacauaugauuaccccaaguauuccgaggaaagcaaacucaaucgggagaagaucgacgguguuaaacuggauucuaugggcguguaccagauuuuagccaucuacucaacugucgcuaguagccuggugcuacucgucucccugggggccauuucuuucuggaugugcucgaacggaagccuucagugucguauaugcaucuga

SEQ ID NO: 128475 - RNA, 1701 nt, Artificial Sequence; identical to SEQ ID NO: 128303
  derived and/or modified CDS sequence (opt3) from hemagglutinin__InfluenzaA__ABB53614

SEQ ID NO: 128476 - RNA, 1701 nt, Artificial Sequence; identical to SEQ ID NO: 128303
  derived and/or modified CDS sequence (opt3) from hemagglutinin__InfluenzaA__ABB53625

SEQ ID NO: 128477 - RNA, 1701 nt, Artificial Sequence; identical to SEQ ID NO: 128330
  derived and/or modified CDS sequence (opt3) from hemagglutinin__InfluenzaA__ABB53652

SEQ ID NO: 128478 - RNA, 1701 nt, Artificial Sequence
  derived and/or modified CDS sequence (opt3) from hemagglutinin__InfluenzaA__ABB53663
augaagaccaucuucgcccugagcuacauucucugccuuguguuugcucagaaacugcccggcaacgacaauuccacagcaacuuuguguuuagggcaccaugccgucccuaacggaacgauaguuaagaccaucacaaaugaucaaauugaggugacuaacgcgaccgaacugguacagucuucaaguacagguggcaucugcgacagcccacaccagauucuagauggggagaauuguacccucaucgacgcucugcuuggagauccgcagugcgacggcuuccaaaacaaaaagugggaucuguuuguggaaagauccaaagcccauucuaauuguuaucccuacgacgucccugauuaugcaucguugaggucacucguggccagcagugguacucuggaguucaacaaugaauccuuuaacuggacagggguuacccagaauggaacgucuagcgcuugcaagcggcgcuccaacaauucauucuuuagucgacugaacuggcucacucacuuaaaguucaaauacccagcacugaaugugaccaugcccaacaacgagaauuuugacaaacuuuauauauggggcguccaucacccuggcacagauaacgaccagaucagcuuguacgcccaggcuucugggcguauuacuguguccaccaagagaucacaacagacaguaaucccaaauauuggaagcaggccccggguucgcgauaucccuaguagaauaucuauuuauuggaccaucgugaagccaggugacauucugcuaaucaacuccacgggcaaucucaucgccccgaggggguacuucaaaauucggagcggaaagucgucuauaaugcgcuccgacgcgcccaucggcaaguguaacucagagugcauuacuccuaaugguaguaucccaaacgauaaacccuuucagaaugucaaccgaauaacauacggggcauguccuagauaugugaagcagaauacccugaaacuugccacuggaaugaggaacgugccagaaaagcaaacacggggcauuuucggcgcuaucgccggguuuaucgagaauggaugggaagguauggucgacggcugguacggguuccgucaccagaacagcgagggaauuggccaggcagcugaucugaaauccacccaagccgcgaucaaucagauuaacgguaaguugaaccgccucauagggaaaacgaaugagaaguuccaucagaucgaaaaggaguuuucugaaguugagggcaggauucaggaccuggaaaaauauguggaggauaccaagaucgacuuauggagcuacaacgccgagcugcucguagcacuugaaaaucaacacacaaucgaucugacugacucagagaugaacaaauuguucgaaagaaccaagaaacagcuacgggagaaugcugaagauaugggaaacggcugcuuuaagauuuaucauaagugugacaaugccugcauagggaguauccgaaacggaacauacgaucacgacguguaucgcgacgaggcucugaauaacagauuccagauuaaaggugucgagcucaaguccggcuacaaagauuggauccuguggauuagcuuugccaucucuugcuuccuucuguguguggcauugcucggguuuauaaugugggccugccagaagggaaauaucagguguaacauuugcaucuga

SEQ ID NO: 128479 - RNA, 1701 nt, Artificial Sequence; identical to SEQ ID NO: 128303
  derived and/or modified CDS sequence (opt3) from hemagglutinin__InfluenzaA__ABB53685

SEQ ID NO: 128480 - RNA, 1701 nt, Artificial Sequence
  derived and/or modified CDS sequence (opt3) from hemagglutinin__InfluenzaA__ABB53696
augaagaccaucauugcccugagcuacauacucugccuuguguucgcucagaaacugcccggcaacgacaauuccacagcaacuuuguguuuagggcaccaugccgucccuaacggaacgcugguuaagaccaucacaaaugaucaaauugaggugacuaacgcgaccgaacuuguacagucuucaaguacagguagaaucugcgacagcccacaccagauucucgauggcgagaauuguacccugaucgacgcucuacugggggauccgcauugcgacggauuucagaacaaagaaugggauuuguucguggagagguccaaggccuauucuaauuguuaccccuaugacgucccugauuacgcaucgcuccggucacugguggccagcaguggcacucuggaauuuaacaaugaguccuucaacuggacagguguugcucaaaaugggaccucuagcgcaugcaaacgccgauccaacaagucauuuuucagucgucucaauugguuacaccagcugaaguauaaauacccagcccuuaacgugacgaugcccaauaacgagaaguuugacaaauuguauauauggggaguccaucacccuagcacugauucugaccagaucucccuguacgcucaggccucaggcagagugaccguaagcacaaagaggagucaacagacuguuauuccaaacaucggcucucggcccugggugcgcggggucuccagcagaauuucgaucuacuggaccauagugaaaccuggagauauucuacucaucaauucuacagguaaccugauugcgccaaggggcuauuucaagauccgguccgggaagucaaguaucaugcgcagcgacgcaccgauuggaaaauguaauuccgaaugcauaacccccaacggcucuaucccuaaugacaagccauuucagaacgugaaucgaauuacguacggugccugucccagauaugucaaacagaacacucuuaagcuggcuacagggaugaggaauguuccugagaaacaaacccggggaaucuucggcgccauagcaggcuuuauugaaaacgggugggagggaaugguggaugguugguacggcuuccgucaccagaauagcgaggggacuggacaggcugccgacuugaagucaacacaagcggccaucaaccagaucaauggcaaacucaaccgccugauugaaaagaccaaugagaaguuucaucagaucgaaaaagaguucagugaaguagaggguaggauucaggauuuagagaaguauguggaagacacgaaaauagaucugugguccuacaacgcagagcuccuugucgcucuggaaaaccaacacaccaucgacuugacagauagcgagaugaauaagcuauucgaaagaacuaaaaagcagcugcgggagaacgccgaggacauggggaauggcugcuuuaagauuuaucauaaaugugauaacgcuugcaucggaucuauccgaaauggcaccuacgaccacgauguguaccgcgacgaagcccucaacaauagauuccagauuaaggggguugagcugaaaucaggauauaaggacuggauacuuuggaucaguuuugcaauuagcugcuuccuguuguguaucgcccuccuggguuuuauuaugugggcuugccagaaaggcaacaucagguguaaugugugcauauga

SEQ ID NO: 128481 - RNA, 1698 nt, Artificial Sequence; identical to SEQ ID NO: 128344
  derived and/or modified CDS sequence (opt3) from hemagglutinin__InfluenzaA__ABB53707

SEQ ID NO: 128482 - RNA, 1701 nt, Artificial Sequence; identical to SEQ ID NO: 128291
  derived and/or modified CDS sequence (opt3) from hemagglutinin__InfluenzaA__ABB53718

SEQ ID NO: 128483 - RNA, 1698 nt, Artificial Sequence
  derived and/or modified CDS sequence (opt3) from hemagglutinin__InfluenzaA__ABB53740
augaaggugaaacugcucguccuucugugcaccuucacagccacuuacgcugacacgaucuguauuggcuaucacgcaaacaauagcaccgauacaguugacacuguguuggagaagaacguaaccgugacacauuccgucaauuuacuggaagauucucacaacgggaaacuaugccuccugaagggaauagcgccccuucagcuggguaauuguucaguggccggcuggaucuuggggaacccugagugcgaacuccugauuaguaaagagagcugguccuacaucguugaaaccccaaauccggagaacggaacuuguuaucccggcuacuuugcugacuaugaggaacugagagagcaacucucuucggugagcucauucgaaagguuugagauuuucccuaaggagaguuccuggccaaaucauacagucaccggugugucugccagcugcucccacaacgggaagucaaguuuuuaccggaauuuacuguggcuuacgggcaaaaacggauuguaucccaaucugagcaagucuuacgcaaacaauaaagaaaaggagguucuaguacucuggggcgugcaucacccuccaaacaugggggaucagcgcgcccuguaccacacugaaaacgcuuaugucuccguggugucaagccauuacagucgacguuucacccccgagaucgcaaaaagaccuaaggucagggaccaggaaggacggauaaauuauuacuggacacuucuggagccaggugagacuaucauuuuugaagccaacggcaauuugaucgcuccgcgcuaugccuucgcgcucucuagaggguuuggauccggcauuaucaccagcaacgcacccauggaugagugugacgccaagugccagacaccucaaggugcuauaaauucgucucugccauuccagaacguucaccccgugaccauuggggaauguccuaaauacguaagguccacgaaguuacggauggugacuggacugcgcaauaucccaucaauucagagucgaggccucuuuggcgccaucgcaggguucaucgagggagguuggacaggcauggucgaugggugguauggauaccaucaccagaacgaacaaggcagcgguuacgcugccgaccagaaauccacccagaaugcgauuaacgggauaacuaauaaggugaacucuguuaucgagaaaaugaauacacaguuuaccgccgugggcaaggaguucaacaaacuugaaagaaggauggagaaucugaacaagaaggucgaugacggauucuuggauauuuggacguauaacgcagaacuacuggugcuccuggagaaugaacggacccuugacuuucacgacagcaacguuaaaaaucuguacgagaagguaaaaucacaauugaagaacaaugcuaaagagaucggcaacgggugcuucgaauuuuaucauaaguguaaugaugagugcauggaaagugugaagaacggaacauacgacuaucccaaauacuccgaggagagcaagcucaaucgugagaaaauagauggugucaagcuggaaucuaugggcguguaucagauuuuagccaucuacucaacugucgcuaguagccuggugcuacucguuucccugggggccaucucuuucuggaugugcucgaacggaagccuucagugucgcauuugcaucuga

SEQ ID NO: 128484 - RNA, 1701 nt, Artificial Sequence
  derived and/or modified CDS sequence (opt3) from hemagglutinin__InfluenzaA__ABB53751
augaagaccaucauugcccugagcuacauauccugccucguguucgcucagaaccuucccggcaaugacaacucuacagcaacucuguguuuggggcaccaugccgucccuaauggaacguuaguuaaaaccaucacaaacgaucaaauugaggugacuaaugcgaccgaacugguacagucaaguagcacagguagaaucugcgacuccccacacaggauucuagauggcaagaacuguacccucaucgacgcucugcuuggggauccgcauugcgacggauuucagaaugagaaaugggaucuguucguggaacggucuaaggccuuuucgaacuguuaucccuacgacgucccugauuaugcaucauugcgcagccucguggccaguuccggcacucuggaguucauaaaugaagguuuuaacuggacagggguuacccagucuggaggcagcuacgcuugcaaacgaggcuccgacaauucauucuuuagucgucugaacuggcucuauaagagcgagucuaaguacccaguguuaaaugucacgaugcccaacaaugggaacuucgauaaacuguauaucuggggagugcaccauccuuccacugacaaggagcaaaccaaccuuuacguaagagcaucagguaggguuacagugagcacuaaacggagucagcagaccauuaucccaaauauuggcucucgccccugggucagaggguuguccagcggaaucucgauauacuggacaauugugaagccuggcgauauccugcuaauuaacucuaaugguaaccucaucgccccaaggggguauuuuaaaauccggaccggaaaguccucaauucugcgcagugacgcuccgauaggcacguguagcuccgaaugcaucacucccaauggcucuauuccuaacgacaagccauuccagaaugugaacaaaaucacauacggggccugucccaaguaugucaaacaaaauacccuuaagcuggcgacuggaaugcgaaacguuccugagaaacagacaagagguauauuuggcgcaauugccggguucaucgaaaauggaugggagggcaugguggaugguugguacggguuuaggcaccagaacagcgagggcaccggacaggcugccgacuugaagucaacgcaagcagcuaucgaucagauuaauggcaaacucaaccggguaaucgaaaagaccaaugagaaguuccaccagauugaaaaagaguucagugaaguggaggggcguauacaagaccuggagaaguaugucgaagauacaaaaaucgacuuaugguccuacaacgccgagcugcucguggcgcuugaaaaccagcauacuauugaucugaccgacagcgagaugaauaaguuguuugagaaaacacgcagacagcuaagggaaaacgccgaggauaugggaaaugguugcuucaagaucuaucacaagugugacaacgcaugcaucggcucuauucggaaugggacuuacgaucaugacguuuaccgagacgaagcucugaacaaucgcuuucagauaaaaggaguggagcucaagucaggcuauaaagauuggauccuguggauuaguuucgccaucagcugcuuucuucugugugucguguugcucgguuucauuaugugggcuugccaaaaggggaacaucagauguaauauaugcaucuga

SEQ ID NO: 128485 - RNA, 1701 nt, Artificial Sequence
  derived and/or modified CDS sequence (opt3) from hemagglutinin__InfluenzaA__ABB60007
augaagaccaucauugcccugagcuacauacucugccuuguguucgcucagaaacugcccggcaacgacaauuccacagcaacuuuguguuuagggcaccaugccgucccuaacggaacgcugguuaagaccaucacaaaugaucaaauugaggugacuaacgcgaccgaauugguacagucuucaaguacagacagaaucugcgauagcccacacaggauucucgacggugagaauuguacccugaucgaugcccuucugggcgacccgcauugcgauggguuucagaacaaagaaugggacuuguucguggagcgguccaaggcuuauucuaauuguuaccccuaugaugucccugacuacgcaucgcuccgcucacugguggccagcaguggaacucuggaauuuaacaaugaguccuucaacuggacaggcguugcucagaaugguaccucuuaugcaugcaaacgacguagcauaaaguccuuuuucucaagacucaacugguuacaccaacugaaguacaaauauccagcccuuaaugugacgaugcccaacaaugauaaguuugacaaauuguacaucuggggaguccaucacccuaguacugauagcgaccagaccucucuguacgcucaggccuccgggagggugacaguaucaacuaagcggagccagcaaaccguuauuccaaacaucggcagucgccccugggugagaggcgucucuuccaggauuagcaucuauuggacaauagugaaaccuggggacauucuacucaucaacucgaccggaaaucugauugcgccacgggguuacuucaagauccgcucuggcaaguccucaaucaugcgaagugaugcaccgauugggaaauguaacagcgagugcauaacgcccaauggauccaucccuaacgacaagccauuucagaaugugaacagaauuacuuauggcgccugucccagguacgucaaacagaauacacuuaagcuggcuaccgguaugcggaacguuccugaaaaacagacucgugggaucuucggagccauagcaggcuuuauugagaauggcugggaagggaugguggauggaugguaugguuuccgccaccaaaacucugagggcacagggcaggcugccgaccuaaagagcacccaggcggccaucaaucaaaucaacggaaaacucaauagacugauugagaagacgaacgaaaaguuucaucagaucgagaaagaguucucagaaguagaaggcaggauucaggauuuagagaaguacguggaggacaccaaaauagaucuguggaguuauaaugcagaacuccuugucgcucuggagaaccagcacacaaucgacuugacugauuccgaaaugaacaagcuauucgagcggacccgaaaacaacugcgcgaaaaugccgaggacauggguaacgggugcuuuaagauuuaccauaagugugauaaugcuugcaucggcagcaucagaaacggaacauacgaccacgacguguauagggaugaggcccucaauaaccgguuccagauuaaaggcguugaacugaagucuggguacaaagacuggauacuuuggaucucauuugcaauuaguugcuuccuguugugugugguccuccugggauuuaucaugugggccugccagaaggguaauauucgcuguaacaucugcauauga

SEQ ID NO: 128486 - RNA, 1701 nt, Artificial Sequence
  derived and/or modified CDS sequence (opt3) from hemagglutinin__InfluenzaA__ABB77853
augaagaccaucauugcccugagcuacauauccugccucguguucgcucagaaacuucccggcaacgacaauucuacagcaacucuguguuuggggcaccaugccgucccuaacggaacguuaguuaagaccaucacaaaugaucaaauugaggugacuaacgcgaccgaacugguacagucaaguagcacagguagaaucugcgacuccccacacaggauucuagauggcgagaauuguacccucaucgacgcucugcuuggggauccgcauugcgacggauuucagaacaaagaaugggaucuguucguggagcggucuaaggccuauucgaauuguuaccccuaugacgucccugauuacgcaucauugcgcagccucguggccaguuccggcacucuggaauuuaacaaugagucuuucaacuggacagguguugcucagaaugggaccagcuaugcaugcaaacgacguuccauaaagucauuuuucaguagacugaacuggcuccaccaauuaaaguacaaauauccagcccugaaugugacgaugcccaacaaugacaaguuugauaaacuuuacaucuggggaguccaucacccuagcacugacucugaucagaccuccuuguacgcucaggccucaggcagggugacaguaagcacuaagcggagucagcaaaccguuauuccaaacaucggcucucgccccugggugagaggggucuccagcaggauuucgaucuauuggacaauagugaaaccuggagacauucugcuaaucaacucuaccgguaaucucauugcgccacggggcuacuucaagauccgcuccgggaagucaaguaucaugcgaagcgacgcaccgauuggaaaauguaacuccgagugcauaacgcccgauggcucuaucccuaaugacaagccauuucagaacgugaauagaauuacuuauggugccugucccagguacgucaaacagaacacacugaaacuugcuaccgggaugcggaauguuccugaaaagcagacucguggaaucuucggcgccauagcaggcuuuauugagaacgggugggaaggaaugguggaugguugguauggcuuccgccaccaaaauagcgaggggacaggacaggcugccgaccugaagucaacccaggcggccaucaaccaaaucaauggcaaauugaacagacucauugagaagacgaaugaaaaguuucaucagaucgagaaagaguucagugaaguagaagguaggauucaggaucuggagaaguacguggaggacaccaaaauagauuuaugguccuauaacgcagaacugcucgucgcucuugagaaucagcacacaaucgaccugacugauagcgaaaugaacaaguuguucgagcggacccgaaaacaacuacgcgaaaacgccgaggacauggggaauggcugcuuuaagauuuaccauaagugugauaacgcuugcaucggaucuaucagaaauggcacauacgaccacgacguguauagggaugaggcccugaacaaucgguuccagauuaaagggguugaacucaagucaggauacaaagacuggauacuguggaucaguuuugcaauuagcugcuuccuucuguguguggucuugcucgguuuuaucaugugggccugccagaagggcaacauucgcuguaauaucugcauauga

SEQ ID NO: 128487 - RNA, 1701 nt, Artificial Sequence
  derived and/or modified CDS sequence (opt3) from hemagglutinin__InfluenzaA__ABB79731
augaagaccaucauugcccugagcuacauacucugccuuguguucgcucaggagcugcccggcaacgacaauuccacagcaacuuuguguuuagggcaccaugccgucccuaacggaacgaucguuaaaaccauuacaaaugaucaaaucgaagugacuaacgcgaccgagcugguacagaauaguucaacagguggcauuugcgacaguccacaccagauccuagauggggaaaacuguacccucauagacgcucugcuuggagauccgcagugcgacggcuuucaaaauaagaaaugggaucuguucguggagagaagcaaggccuauuccaacuguuaccccuaugacgucccugauuacgcaucuuugaggucgcucguggccucaagcgguacucuggaauuuaauaacgagaguuucaauuggacagggguuacccagaacggaacguccucugcuugcaaacggcgcagcaauaacuccuuuuucucacgacugaauuggcucacucauuuaaaguuuaaguauccagcacugaacgugaccaugcccaacaaugagaaauucgacaaacuuuacaucuggggcguccaccauccuggcacagauaacgaccagacuucuuuguaugcccaggcuagcgggcguauuaccgugucuacaaagagaucccaacagaccguaaucccaaauauuggaucaaggccccggguucgcgauaucccuagcagaauaaguauuuacuggacgaucgugaagccaggugacauucugcuaaucaacucuacuggcaaucucaucgccccgaggggguacuuuaaaauucgguccggaaagagcucgauaaugcgcucugacgcgcccaucggcaaguguaacuccgaaugcauuacaccuaaugguucaaucccaaacgauaaacccuuccagaaugucaaccgaauaaccuauggggcauguccuagauacgugaagcagaauacucugaaacuugccacaggaaugaggaacgugccagagaagcaaacccggggcauuuuuggcgcuaucgccggguucaucgaaaauggaugggaggguauggucgacggcugguauggguuucgucaccagaacagugagggaauuggccaggcagcugaucugaaaagcacgcaagccgcgaucaaucagauuaacgguaaguugaaccgccucauagggaaaaccaaugaaaaguuccaccagaucgagaaggaguucuccgaaguugaaggcaggauucaggaccuggagaaauacguggaggauacaaagaucgacuuauggucuuauaacgccgaacugcucguagcacuugagaaucaacauacuaucgaucugaccgacagcgaaaugaacaaauuguuugagagaacaaagaaacagcuacgggaaaaugcugaggauaugggaaacggcugcuucaagauuuaccacaagugugacaaugccugcauagggucaauccgaaacggaacuuaugaucaugacguguaccgcgacgaggcucugaauaacagauuucagauuaaaggugucgaacucaagaguggcuacaaagauuggauccuguggauuuccuucgccaucagcugcuuucuucuguguguggcauugcucggguucauaaugugggccugccagaagggaaauaucagguguaacauuugcaucuga

SEQ ID NO: 128488 - RNA, 1701 nt, Artificial Sequence
  derived and/or modified CDS sequence (opt3) from hemagglutinin__InfluenzaA__ABB79788
augaagaccaucauugcccugagcuacauauucugccucguguuugcucagaaacuucccggcaacgacaauuccacagcaacucuguguuuggggcaccaugccgucccuaacggaacguuaguuaagaccaucacaaaugaucaaauugaggugacuaacgcgaccgaacugguacagucuucaaguacagguagaaucugcgacagcccacacaggauucuagauggcaaaaauuguacccucaucgacgcucugcuuggggauccgcauugcgacggauuccagaacgagaagugggaucuguuuguggaacgguccaaagccuucucuaauuguuaucccuacgacgucccugauuaugcaucguugcgcucacucguggccagcaguggcacucuggaguuuauaaacgaagguuucaauuggacagggguuacccaguccggaggcucuuacgcuugcaagcgaggcagcgugaacuccuuuuucucacgucugaauuggcucuaugagagugagagcaaguacccagucuuaaacgugacgaugcccaauaacgggaaauuugacaagcuguauaucuggggaguacaccauccuauuacugauaaagaacaaaccaaucuuuacguuagagcaucugguagggugacagucuccacuaagcggucacagcagaccgugaucccaaacauuggcagccgccccugggugagaggguugaguucuaggaucuccauauacuggacaauugucaaaccuggagacauccugcuaauuaacagcaccggcaaucucaucgccccacgggguuauuucaagauccgcacggggaagucgucuauuaugcgauccgaugcuccgauaggaacuuguucaagugagugcaucacacccaacggcagcauuccuaaugacaaaccauuucagaacguuaauaagaucaccuacggcgccugucccagauaugugaaacaaaacacucugaaacuugcgacagggaugaggaauguaccugaaaagcagacccggggaauauucggugcaauugccggcuuuaucgagaacgggugggagggaaugguggacggcugguacgguuuccgucaccaaaauuccgaagggacgggccaggcugccgaucugaagucuacccaggcagcuaucgaccagauuaacggaaaauugaaucgccucaucgagaagacaaacgaaaaguuccaccagauugagaaagaauuuagcgaggucgagggcagaauacaagaucuggaaaaguauguggaggacacuaaaaucgauuuauggucauacaaugccgaacugcucguugcgcuugagaaccagcauaccauugaccugacagauagugaaaugaauaaguuguucgagaaaacuaggaagcagcuacgggagaacgccgaagacauggggaacggaugcuuuaagaucuaucacaaaugugauaaugcaugcaucgguuccauucgaaacggcaccuacgaccaugauguguaccgcgacgaggcucugaauaacagauuccagauaaagggggucgaacucaaaagcggauauaaggacuggauccuguggauuucuuuugccaucucaugcuuccuucugugugugguauugcucggcuuuauuaugugggcuugccaaaaagguaauaucagguguaacauaugcaucuga

SEQ ID NO: 128489 - RNA, 1701 nt, Artificial Sequence
  derived and/or modified CDS sequence (opt3) from hemagglutinin__InfluenzaA__ABB79799
augaagaccaucauugcccugagcuacauauucugccucguguuugcucagaaacuucccggcaacgacaauuccacagcaacucuguguuuggggcaccaugccgucccuaacggaacguuaguuaagaccaucacaaaugaucaaauugaggugacuaacgcgaccgaacugguacagucuucaaguacagguagaaucugcgacagcccacacaggauucuagauggcaaaaauuguacccucaucgacgcucugcuuggggauccgcauugcgacggauuccagaacgagaagugggaucuguuuguggaacgguccaaagccuucucuaauuguuaucccuacgacgucccugauuaugcaucguugcgcucacucguggccagcaguggcacucuggaguuuauaaacgaagguuucaauuggacagggguuacccaguccggaggcucuuacgcuugcaagcgaggcagcgugaacuccuuuuucucacgucugaauuggcucuaugagagugagagcaaguacccagucuuaaacgugacgaugcccaauaacgggaaauuugacaagcuguauaucuggggaguacaccauccuucuacugauaaagaacaaaccaaucuuuacguuagagcauccgguaaggugacagucucaacuaaaaggagccagcagaccgugauuccaaacaucggcagucggcccugggugcgcggguugucuuccagaauuagcaucuacuggacaauagucaagccuggagacauucugcuaaucaacucgaccggcaaucucauugccccaagggguuauuucaagauccggacggggaaaucuuccaucaugcgcucagaugcuccgauuggaacuuguaguagcgagugcauaacacccaacggcuccaucccuaaugacaagccauuucagaacguuaauaaaauuaccuacggcgccuguccccgauaugugaagcaaaacacucugaaacuugcgacagggaugagaaauguaccugaaaagcagaccaggggaaucuucggugcaauagccggcuuuauugagaacgggugggagggaaugguggacggcugguacgguuuccggcaccaaaauucugaagggacgggccaggcugccgaucugaaaagcacccaggcagcuaucgaccagaucaacggaaaguugaaucgucucauugagaagacaaacgaaaaauuccaccagaucgagaaggaauuuucagaggucgagggccgcauucaagaucuggaaaaauauguggaggacacuaagauagauuuauggaguuacaaugccgaacugcucguugcgcuugagaaccagcauaccaucgaccugacagauuccgaaaugaauaaauuguucgagaagacuagaaagcagcuaagggagaacgccgaagacauggggaacggaugcuuuaaaauuuaucacaagugugauaaugcaugcaucgguagcauccggaacggcaccuacgaccaugauguguaccgagacgaggcucugaauaaccgcuuccagauuaaaggggucgaacucaagucuggauauaaagacuggauacuguggaucucauuugccauuaguugcuuccuucugugugugguauugcucggcuuuaucaugugggcuugccaaaaggguaauauuagauguaacaucugcauauga

SEQ ID NO: 128490 - RNA, 1701 nt, Artificial Sequence
  derived and/or modified CDS sequence (opt3) from hemagglutinin__InfluenzaA__ABB79810
augaagaccaucauugcccugagcuacauacucugccuuguguucgcucagaaacugcccggcaacgacaauuccacagcaacuuuguguuuagggcaccaugccgucccuaacggaacgcugguuaagaccaucacaaaugaucaaauugaggugacuaacgcgaccgaacuuguacagucuucaaguacagguagacucugcgacagcccacacaggauccuggauggcaaaaauuguacccuuauugacgcucuguugggggauccgcauugcgacggauuucagaacaaggagugggaucucuucguggaacgguccaaagccuauucuaauuguuaccccuaugacgucccugauuacgcaucgcugcgcucacugguggccagcaguggcacucucgaguuuaucaacgaagacuucaauuggacagguguugcucaggaugggggauccuaugcaugccgacguggcucugugaacagcuuuuucuccagauuaaauuggcugcacaagcuagaguacaaguauccagccuugaacgucaccaugcccaauaacggcaaauuugacaagcuguacauauggggagugcaucacccuucaacggauagugaccaaacuagccuauacguaagggcuucugggcggguuaccguguccacaaaacgcucacagcagacugucaucccaaauauugguagcagacccugggugaggggccagaguucucggaucuccauuuauuggaccaucgugaagccuggggacauacuccugauugauagcacaggaaaccuuaucgccccacgcggcuacuucaaaauucgaaacgguaagucgucuaucaugagauccgacgcgccgaucgggaauuguucaagugagugcauuacccccaacggaagcauaccuaaugauaagccauuucaaaacgucaauaggaucacguauggcgcauguccccgguacguuaaacagcacacucugaaguuggccacaggcaugcguaacgugccugaaaaacagacccgcgggauuuucggagcuaucgccgguuuuauagagaauggcugggaagggaugguagacggaugguauggcuucagacaucagaacuccgaggguacugggcaagcagcugaucucaagucuacacaggccgcgauugaccagaucaauggcaaacugaacagguuaaucgagaagaccaaugaaaaauuucaccaaauugagaaggaguucagcgaaguggaaggacggauccaggaucuggagaaguacgucgaggacacgaaaauugaucucuggucauauaacgccgaacuucugguggcauuggagaaucagcauaccauagaccuaacagauagugaaaugaacaagcuguucgagcgaacucgcaaacagcucagagaaaaugcugaggacaugggcaacgggugcuuuaagaucuaccacaaaugugacaacgccugcauuggauccaucaggaaugguaccuacgaucacgacguuuaucgggaugaggcucugaacaaucgcuuccaaaucaagggcguggaacuuaagagcggguacaaagacuggauucuguggauaucuuuugccaucucaugcuucuugcucugugucgugcuguuaggauuuauuaugugggcaugccagaagggcaacaucagauguaauauuugcaucuga

SEQ ID NO: 128491 - RNA, 1701 nt, Artificial Sequence
  derived and/or modified CDS sequence (opt3) from hemagglutinin__InfluenzaA__ABB79957
augaagaccaucauugcccugagcuacauacucugccuuguguucgcucagaaacugcccggcaacgacaauuccacagcaacuuuguguuuagggcaccaugccgucccuaacggaacgcugguuaagaccaucacaaaugaucaaauugaggugacuaacgcgaccgaacuuguacagucuucaaguacagguagacucugcgacagcccacacaggauccuggauggcaaaaauuguacccuuauugacgcucuguugggggauccgcauugcgacggauuucagaacaaggagugggaucucuucguggaacgguccaaagccuauucuaauuguuaccccuaugacgucccugauuacgcaucgcugcgcucacugguggccagcaguggcacucucgaguuuaucaacgaagacuucaauuggacagguguugcucaggaugggggauccuaugcaugccgacguggcucugugaacagcuuuuucuccagauuaaauuggcugcacaagcuagaguacaaguauccagccuugaacgucaccaugcccaauaacggcaaauuugacaagcuguacauauggggagugcaucacccuucaacggauagugaccaaacuagccuauacguaagggcuucugggcggguuaccguguccacaaaacgcucacagcagacugucaucccaaauauugguagcagacccugggugaggggccagaguucucggaucgggauuuauuggaccaucgugaagccuggagacauacuccugauuaacuccacaggcaaccuuaucgccccacgcgguuacuucaaaauucgaaauggaaagagcucgaucaugagaucugaugcgccgaucgggaacuguuccucagagugcauuacccccaauggcaguauaccuaacgacaagccauuucaaaaugucaacaggaucacguauggcgcauguccccgguacguuaaacagcacacucugaaguuggccacagggaugcguaaugugccugaaaaacagacccgcggaauuuucggugcuaucgccggcuuuauagagaacgggugggaaggaaugguagauggcugguaugguuucagacaucagaauagcgaggggacuggccaagcagcugaccucaaguccacacaggccgcgauugaucagaucaacggaaaacugaauagguuaaucgagaagaccaacgaaaaauuucaccaaauugagaaggaguucucugaaguggaaggccggauccaggaccuggagaaguacgucgaggauacgaaaauugaccucuggagcuauaaugccgaacuucugguggcauuggagaaccagcauaccauagaucuaacagacucagaaaugaauaagcuguucgagcgaacucgcaaacagcucagagaaaacgcugaggauauggggaacggaugcuuuaagaucuaccacaaaugugacaaugccugcauugguaguaucaggaacggcaccuacgaccacgauguuuaucgggacgaggcucugaauaaccgcuuccaaaucaaggggguggaacuuaaguccggauacaaagauuggauucuguggaucagcuuugccauaucuugcuucuugcucugugucgugcuguuaggcuuuauuaugugggcaugccagaaggguaauaucagauguaacauuugcaucuga

SEQ ID NO: 128492 - RNA, 1701 nt, Artificial Sequence
  derived and/or modified CDS sequence (opt3) from hemagglutinin__InfluenzaA__ABB79968
augaagaccaucauugcccugagcuacauacucugccuuguguucgcucagaaacugcccggcaacgacaauuccacagcaacuuuguguuuagggcaccaugccgucccuaacggaacgcugguuaagaccaucacaaaugaucaaauugaggugacuaacgcgaccgaacuuguacagucuucaaguacagguagacucugcgacagcccacacaggauccuggauggcaaaaauuguacccuuauugacgcucuguugggggauccgcauugcgacggauuucagaacaaggagugggaucucuucguggaacgguccaaagccuauucuaauuguuaccccuaugacgucccugauuacgcaucgcugcgcucacugguggccagcaguggcacucucgaguuuaucaacgaagacuucaauuggacagguguugcucaggaugggggauccuaugcaugccgacguggcucugugaacagcuuuuucuccagauuaaauuggcugcacaagcuagaguacaaguauccagccuugaacgucaccaugcccaauaacggcaaauuugacaagcuguacauauggggagugcaucacccuucaacggauagugaccaaacuagccuauacguaagggcuucugggcggguuaccguguccacaaaacgcucacagcagacugucaucccaaauauugguagcagacccugggugaggggccagaguucucggaucuccauuuauuggaccaucgugaagccuggggacauacuccugauuaacagcacaggaaaccuuaucgccccacgcggcuacuucaaaauucgaaaugguaagucgucuaucaugagauccgaugcgccgaucgggaacuguucaagugagugcauuacccccaauggaagcauaccuaacgacaagccauuucaaaaugucaacaggaucacguauggcgcauguccccgguacguuaaacagcacacucugaaguuggccacaggcaugcguaaugugccugaaaaacagacccgcgggauuuucggagcuaucgccgguuuuauagagaacggcugggaagggaugguagauggaugguauggcuucagacaucaaaauuccgaggguacugggcaggcagcugaccucaagucuacacaggccgcgauugaucagaucaacggcaaacugaauagguuaaucgagaagaccaacgaaaaauuucaccaaauugagaaggaguucagcgaaguggaaggacggauccaggaccuggagaaguacgucgaggauacgaaaauugaccucuggucauauaaugccgaacuucugguggcauuggagaaccagcauaccauagaucuaacagacagugaaaugaauaagcuguucgagcgaacucgcaaacagcucagagaaaacgcugaggauaugggcaacgggugcuuuaagaucuaccacaaaugugacaaugccugcauuggauccaucaggaacgguaccuacgaccacgauguuuaucgggacgaggcucugaauaaccgcuuccaaaucaagggcguggaacuuaagagcggguacaaagauuggauucuguggauaucuuuugccaucucaugcuucuugcucugugucgugcuguuaggauuuauuaugugggcaugccagaagggcaauaucagauguaacauuugcaucuga

SEQ ID NO: 128493 - RNA, 1698 nt, Artificial Sequence
  derived and/or modified CDS sequence (opt3) from hemagglutinin__InfluenzaA__ABB79979
augaaggccaaacugcucgugcuucugugcaccuucacagcuacuuacgcagacacgaucuguauuggcuaucacgccaacaauagcaccgauacagucgacacuguuuuggagaagaacgugaccguaacacauuccgugaauuuacuggaagauucucacaacgggaaacuaugccuccugaagggaauagcgccccuucagcuggguaauuguucagucgcuggcuggaucuuggggaacccugagugcgaacuccugauuaguaaagagagcugguccuacaucguggaaaccccaaauccggagaacggaacuuguuaucccggcuacuuugccgacuaugaggaacugagagagcaacucucuucgguuagcucauucgaaagguuugagauuuucccuaaggguaguuccuggccaaaucauacagugaccggggucucugcaagcugcucccacaacggaaagucaaguuuuuaccggaauuuacuguggcuuacgggcaaaaacggcuuguaucccaaucugagcaugucuuacgugaacaauaaggagaaagaaguacuuguucucuggggagugcaucacccuccaaacaucggggaucagcgcgcccuguaccacacugagaacgcuuaugucuccguggugucaagccauuacagucgacguuucacccccgaaauagcaaagagaccuaaagucagggaccaggagggucggaucaauuaucacuggacacuucuggaaccaggcgauacuauuaucuuugaggccaacgggaauuugauugcuccgugguacgccuucgcgcucucucgcggauuuggcuccgguaucauaaccagcaacgcacccauggacgagugugaugccaagugccagacaccucaaggggcuauuaauucgucucugccauuccagaacguucaucccgugaccaucggagaauguccuaaguauguaagauccgccaaauuaaggauggugacgggccugcggaauauuccaucaauccagagucgcggccucuuuggggcaaucgcuggauucauugaggguggcuggacugggauggucgacggaugguacggcuaucaccaccagaacgaacaagguagcggguacgccgcggaucagaaguccacacagaaugccauaaacggcaucaccaauaaagugaacucuguuauugagaagaugaauacucaguuuacagcagugggaaaagaguucaacaagcuagaacgaagaauggagaaucugaacaaaaaggucgacgauggcuucuuggacaucuggaccuacaacgcugaacuacuggugcuccuggagaaugaaaggacgcuugacuuucaugauagcaacguaaagaaucuguaugagaaaguuaagucacaauugaaaaacaaugccaaggaaauagggaacggaugcuucgaguuuuaccacaaauguaauaacgagugcauggaaagugugaagaaugguaccuaugacuaccccaaguauuccgaggaaagcaaacucaaccgggagaagauugauggcgucaaacuggagucuauggggguguaccagaucuuagcuaucuauucaacagucgccaguagccuggugcuacucguuucccugggagcaauuucuuucuggaugugcucgaauggcagccuucagugucguaucugcauuuga

SEQ ID NO: 128494 - RNA, 1698 nt, Artificial Sequence
  derived and/or modified CDS sequence (opt3) from hemagglutinin__InfluenzaA__ABB79990
augaaggccaaacugcucgugcuucugugcaccuucacagcuacuuacgcagacacgaucuguauuggcuaucacgccaacaauagcaccgauacagucgacacuguuuuggagaagaacgugaccguaacacauuccgugaauuuacuggaagauucucacaacgggaaacuaugccuccugaagggaauagcgccccuucagcuggguaauuguucagucgcuggcuggaucuuggggaacccugagugcgaacuccugauuaguaaagagagcugguccuacaucguggaaaccccaaauccggagaacggaacuuguuaucccggcuacuuugccgacuaugaggaacugagagagcaacucucuucgguuagcucauucgaaagguuugagauuuucccuaaggguaguuccuggccaaaucauacagugaccggggucucugcaagcugcucccacaacggaaagucaaguuuuuaccggaauuuacuguggcuuacgggcaaaaacggcuuguaucccaaucugagcaugucuuacgugaacaauaaggagaaagaaguucuaguacucuggggagugcaucacccuccaaacaucggggaucagaaggcccuguaccacacugagaacgcuuaugucuccguggugucaagccauuacagucgccgauucacccccgaaauagcaaaacguccuaaggucagagaccaggaggguaggaucaauuauuacuggacacuucuggaaccaggcgauacuauuaucuuugaggccaacgggaauuugauugcuccgugguaugccuucgcgcucucucggggauuuggcuccgguaucauaaccagcaacgcacccauggacgagugugaugccaagugccagacaccucaaggggcuauuaauucgucucugccauuccagaacguucaccccgugaccaucggagaauguccuaaauacguacgcuccgccaaguuaagaauggugacgggccugaggaauauuccaucaauccagagucggggccucuuuggggcaaucgcuggauucauugaggguggcuggacugggauggucgacggaugguauggcuaccaucaccagaacgaacaagguagcggguacgccgcggaucagaaauccacacagaaugccauaaacggcaucaccaauaaggugaacucuguuauugagaaaaugaauacucaguuuacagcagugggaaaggaguucaacaaacuugaacgccgaauggagaaucugaacaagaaggucgacgauggcuucuuggacaucuggaccuauaacgcugaacuacuggugcuccuggagaaugaaagaacgcuugacuuucacgauagcaacguuaaaaaucuguacgagaagguaaaaucacaauugaagaacaaugccaaagaaauagggaacggaugcuucgaguuuuaucauaaguguaauaacgagugcauggaaagugugaagaaugguaccuacgacuaucccaaauacuccgaggaaagcaagcucaacagggagaaaauugauggcgucaagcuggagucuauggggguguaucagaucuuagcuaucuacucaacagucgccaguagccuggugcuacucguuucccugggagcaauuucuuucuggaugugcucgaauggcagccuucagugucggaucugcauuuga

SEQ ID NO: 128495 - RNA, 1701 nt, Artificial Sequence
  derived and/or modified CDS sequence (opt3) from hemagglutinin__InfluenzaA__ABB80001
augaagaccaucauugcccugagcuacacacucugccuuguguucgcucagaaacugcccggcaacgacaauuccacugcaacguuguguuuagggcaccaugccgucccuaacggaaccauaguuaagacaaucacuaaugaucaaauugaggugaccaacgcgacagaacugguacagucuucaaguaccgguggcaucugcgacagcccacaccagauucuagauggggagaauuguacucucaucgacgcucugcuuggagauccgcagugcgacggcuuucaaaacaaaaagugggaucuguucguggaaagauccaaagccuauucuaauuguuaccccuaugacgucccugauuacgcaucguugaggucacucguggccagcagugguacacuggaguuuaacaaugaauccuucaacuggaccgggguuacgcagaauggaacuucuagcgcuugcaagcggcgcuccaacaauucauuuuucagucgacugaacuggcucacccauuuaaaguuuaaauauccagcacugaaugugacaaugcccaacaacgagaaguucgacaaacuuuacauauggggcguccaccauccuggcacugauaaugaccagaucagcuuguaugcccaggcuucugggcguauuaccguguccacaaagagaucacaacagaccguaaucccaaacauuggaagcaggccccggguucgcgauaucccuaguagaauaucuauuuacuggacgaucgugaaaccaggugacauucugcuaaucaauuccacuggcaaccucaucgccccgaggggguacuuuaagauucggagcggaaagucgucuauaaugcgcuccgacgcgcccaucggcaaauguaauucagagugcauuacaccuaacgguaguaucccaaaugauaagcccuuccagaacgucaaucgaauaaccuauggggcauguccuagauacgugaaacagagcacucugaaacuugccacaggaaugaggaacgugccagaaaaacaaacccggggcauuuuuggcgcuaucgccggguucaucgagaauggaugggaagguauggucgacggcugguauggguuucgucaccagaacuccgagggaauuggccaggcagcugaucugaagucuacgcaagccgcgaucaaucagauuaacgguaaauugaaucgccucauagggaagaccaacgagaaguuccaccagaucgaaaaagaguucagcgaaguugagggcaggauucaggaccuggaaaaguacguggaggauacaaaaaucgacuuauggucauauaacgccgagcugcucguagcacuugaaaaucaacauacuaucgaucugaccgacagugagaugaacaaguuguuugaaagaacaaagaagcagcuacgggagaaugcugaagauaugggaaacggcugcuucaagauuuaccacaaaugugacaaugccugcauaggguccauccgaaacggaacuuaugaucaugacguguaccgcgacgaggcucugaauaacagauuucagauuaagggugucgagcucaaaagcggcuacaaggauuggauccuguggauuucuuucgccaucucaugcuuucuucuguguguggcauugcucggguucauaaugugggccugccagaaaggaaauaucagguguaacauuugcaucuga

SEQ ID NO: 128496 - RNA, 1701 nt, Artificial Sequence; identical to SEQ ID NO: 128291
  derived and/or modified CDS sequence (opt3) from hemagglutinin__InfluenzaA__ABB80012

SEQ ID NO: 128497 - RNA, 1701 nt, Artificial Sequence
  derived and/or modified CDS sequence (opt3) from hemagglutinin__InfluenzaA__ABB80023
augaagaccaucauugcccugagcuacauauucuaucucgcucuuggccaggaccugcccgggaacgauaauuccaaagcaacauugugcuuaggacaccaugccgugccuaacgguacucuggucaagacgaucaccaaugaccaaacagagguuacuaacgcgaccgaacuugugcagucuucaaguacaggcaaaauuuguaauaacccacacagaauccucgaugggauggacugcacccugauugaugcucuacugggagacccgcauugugauguauuucagaaugagacuugggacuuguucguggaaaggagcaaggccuuuuccaacugcuaccccuaugaugucccugacuacgcaucucuccggucgcugguggccucaagcggcacacuggaguucaucaccgaagguuuuacguggacugagguuacccagaaugggggaaguaacgcuuguaaacgcggcccagauuccggcuucuuuucucgacucaauugguuaacaaagagcgggcguacuuaucccgugcugaacgucaccaugccuaauaacgacaauuucgauaaacuuuacauauggggagugcaccauccauccacagaccaagagcagaccaacuuguauguacagacgucagguagaguuacugugaguacaaggcggagccagcaaaccaucauucccaacaucggcucucgcccuugggucagagggcuguccucaaggauuagcaucuacuggacuauagugaaaccaggagacgugcuagucauuaauaguaacggcaaucucaucgcaccgcgggguuacuuuaagaugcgcacagggaaaucuuccauuaugcgaagcgaugcccccaucgauaccugcaucucggaauguauuacgccuaacggaucuauaccaaaugacaagcccuuccagaacguuaauaaaaucaccuauggcgcuugcccuaaguacgugaagcaggacacacugaaacuugccacuggcaugagaaacguaccagagaagcagaccagggggcuguuuggagcgauugcagguuucaucgaaaauggcugggaggggaugauagauggaugguauggcuuucggcaccaaaacuccgaggguacagggcaggccgcugacuugaaaucaacucaggccgcaauugaucaaaucaauggcaagcucaaccguaucauugaaaagaccaaugagaaguuccaccagaucgaaaaagaguucagugaaguggagggacgcauucaggaccuggagaaguacgucgaagauacaaagauagacuuauggagcuauaacgcugagcugcucguggcccuugaaaaucagcauaccaucgaucugacugacuccgagaugaacaaauuguuugaaaagacgagaaggcaacuacgggagaacgcggaggacaugggcaauggguguuucaaaauuuaccacaagugcgauaacgccuguaucgaaucuauccgaaauggaacauaugaccaugauguuuaccgcgacgaggcacugaacaauagauuucagauuaaagguguggaacucaagagcggcuacaaggauuggauacuguggaucucauucgcuauuaguugcuuucuucugugcgucguguugcucggguucaucaugugggccugucagaggggaaacauucggugcaauaucuguauauga

SEQ ID NO: 128498 - RNA, 1701 nt, Artificial Sequence
  derived and/or modified CDS sequence (opt3) from hemagglutinin__InfluenzaA__ABB80034
augaagaccaucauugcccugagcuacauauucugccucgugcuuggccaggaccugcccgggaacgauaauuccacagcuacuuuguguuuaggacaccaugcagucccuaacgguacgcugguuaaaaccaucacagacgaucaaauugaggugacuaaugccaccgagcuaguacagucuucaaguacaggcaagaucugcaacaauccacacaggauucucgacgggcuggauuguacccuuaucgacgcgcuguugggagauccgcauugcgacguguuucagaacgaaacuugggaucucuucgucgaaagaagcaaggcuuuuuccaauuguuaucccuacgacgugccugauuaugccucucugcggucgcugguugcaucaagcggcacacucgaguucauaaccgaagguuuuacguggacuggggugacccagaacggaggcaguaaugccugcaaacgcggcccaggguccggauucuuuucucgauuaaacuggcugacaaaaagcgguuccacuuaccccguccuuaaugugaccaugccuaacaaugacaacuucgauaaguuguauaucuggggcguacaccauccaucaacaaaucaagagcagaccagucuguacguucaggcuagcgggcgugugacggucucuacuagaaggucccagcaaacaauuauccccaacauuggaucacggccuugggugcgcggccuaagcaguagaaucucuauauauuggaccauugugaagccaggugacguccucguuaucaacuccaaugggaaccugauugcaccgaggggauacuuuaaaaugcggacuggcaagagcucgaucaugcgcucugacgccacaaucgauaccuguauuuccgagugcauaacgcccaauggcucaaucccuaacgacaaaccauuccagaaugugaacaagauuaccuacggggcuugucccaaauauguaaagcagaauacacuuaagcuggccacuggaaugcgaaacgugccugaaaaacagaccagagguuuguuuggcgcgaucgcaggguucauagagaauggaugggaaggcaugauugaugguugguacggguuuaggcaccaaaacagugagggcacaggacaggccgcugaccucaagagcacucaggccgcaaucgaucaaaucaauggcaaacugaaccgggucauugagaagaccaaugaaaaauuccaccagaucgagaaggaguucuccgaaguggaagggcguauucaggacuuagagaaauauguugaggauacaaagauagaccuguggucuuacaacgcugaacuccuuguggcccuggagaaucagcauaccaucgauuugacugacagcgaaaugaacaagcuauuugagaaaacgcgcagacaacugagggaaaacgcggaggauaugggaaaugguugcuucaagauuuaucacaaaugugacaacgccugcaucgagucaauccggaauggcacauacgaccaugaugucuaucgagacgaagcacucaacaaucgcuuucagauuaaggggguggagcugaaaaguggauacaaggauuggauacuuuggaucuccuucgcuauuagcugcuuucuguuguguguaguucuccugggcuucaucaugugggccugccagagagguaacauuagguguaauaucugcauauga

SEQ ID NO: 128499 - RNA, 1698 nt, Artificial Sequence; identical to SEQ ID NO: 128412
  derived and/or modified CDS sequence (opt3) from hemagglutinin__InfluenzaA__ABB80045

SEQ ID NO: 128500 - RNA, 1701 nt, Artificial Sequence
  derived and/or modified CDS sequence (opt3) from hemagglutinin__InfluenzaA__ABB80081
augaagaccaucauugcccugagcuacauauccugccucguguucgcucagaaacuucccggcaacgacaauucuacagcaacucuguguuuggggcaccaugccgucccuaacggaacguuaguuaagaccaucacaaaugaucaaauugaggugacuaacgcgaccgaacugguacagucaaguagcacagguagaaucugcgacuccccacacaggauucuagauggcgagaauuguacccucaucgacgcucugcuuggggauccgcauugcgacggauuucagaacaaagaaugggaucuguucguggagcggucuaaggccuauucgaauuguuaccccuaugacgucccugauuacgcaucauugcgcagccucguggccaguuccggcacucuggaauuuaacaaugagucuuucaacuggacagguguugcucagaaugggaccagcuaugcaugcaaacgacguuccauaaagucauuuuucaguagacugaacuggcuccaccaauuaaaguacaaauauccagcccugaaugugacgaugcccaacaaugacaaguuugauaaacuuuacaucuggggaguccaucacccuagcacugacucugaucagaccuccuuguacgcucaggccucaggcagggugacaguaagcacuaagcggagucagcaaaccguuauuccaaacaucggcucucgccccugggugagaggggucuccagcaggauuucgaucuauuggacaauagugaaaccuggagacauucugcuaaucaacucuaccgguaaucucauugcgccacggggcuacuucaagauccgcuccgggaagucaaguaucaugcgaagcgacgcaccgauuggaaaauguaacuccgagugcauaacgcccaauggcucuaucccuaacgauaagccauuucagaaugugaacagaauuacuuauggugccugucccagguacgucaaacagaauacacugaaacuugcuaccgggaugcggaacguuccugaaaagcagacucguggaaucuucggcgccauagcaggcuuuauugagaaugggugggaaggaaugguggacgguugguauggcuuccgccaccaaaacagcgaggggacaggacaggcugccgaucugaagucaacccaggcggccaucaaucaaaucaacggcaaauugaauagacucauugagaagacgaacgaaaaguuucaucagaucgagaaagaguucagugaaguagaagguaggauucaggaccuggagaaguacguggaggauaccaaaauagacuuaugguccuauaaugcagaacugcucgucgcucuugagaaccagcacacaaucgaucugacugacagcgaaaugaacaaguuguucgagcggacccgaaaacaacuacgcgaaaaugccgaggauauggggaacggcugcuuuaagauuuaccauaagugugacaaugcuugcaucggaucuaucagaaacggcacauacgaucacgacguguauagggacgaggcccugaauaaccgguuccagauuaaagggguugaacucaagucaggauacaaagauuggauacuguggaucaguuuugcaauuagcugcuuccuucuguguguggucuugcucgguuuuaucaugugggccugccagaagggcaauauucgcuguaacaucugcauauga

SEQ ID NO: 128501 - RNA, 1701 nt, Artificial Sequence
  derived and/or modified CDS sequence (opt3) from hemagglutinin__InfluenzaA__ABB80092
augaagaccaucauugcccugagcuacauauccugccucguguucgcucagaaacuucccggcaacgacaauucuacagcaacucuguguuuggggcaccaugccgucccuaacggaacguuaguuaagaccaucacaaaugaucaaauugaggugacuaacgcgaccgaacugguacagucaaguagcacagguagaaucugcgacuccccacacaggauucuagauggcgagaauuguacccucaucgacgcucugcuuggggauccgcauugcgacggauuucagaacaaagaaugggaucuguucguggagcggucuaaggccuauucgaauuguuaccccuaugacgucccugauuacgcaucauugcgcagccucguggccaguuccggcacucuggaauuuaacaaugagucuuucaacuggacagguguugcucagaaugggaccagcuaugcaugcaaacgacguuccauaaagucauuuuucaguagacugaacuggcuccaccaauuaaaguacaaauauccagcccugaaugugacgaugcccaacaaugacaaguuugauaaacuuuacaucuggggaguccaucacccuagcacugacucugaucagaccuccuuguacgcucaggccucaggcagggugacaguaagcacuaagcggagucagcaaaccguuauuccaaacaucggcucucgccccugggugagaggggucuccagcaggauuucgaucuauuggacacuggugaaaccuggagacauacuacucauuaacucuaccgguaaucugaucgcgccacggggcuacuucaagauucgcuccgggaagucaaguaucaugcgaagcgacgcaccgaucggaaaauguaacuccgagugcauuacgcccaauggcucuauaccuaacgauaagccauuucagaaugugaacagaaucacuuauggugccugucccagguacgucaaacagaauacacuuaagcuggcuaccgggaugcggaacguuccugaaaaacagacucguggaauuuucggcgccaucgcaggcuuuauagagaaugggugggaaggaaugguggacgguugguauggcuuccgccaccaaaacagcgaggggacaggacaggcugccgauuugaagucaacccaggcggccauuaaucaaaucaacggcaaacucaauagacugaucgagaagacgaacgaaaaguuucaucagauugagaaagaguucagugaaguagaagguaggauccaggacuuagagaaguacguggaggauaccaaaauugaccugugguccuauaaugcagaacuccuugucgcucuggagaaccagcacacaauagauuugacugacagcgaaaugaacaagcuauucgagcggacccgaaaacaacugcgcgaaaaugccgaggauauggggaacggcugcuuuaagaucuaccauaagugugacaaugcuugcauuggaucuaucagaaacggcacauacgaucacgacguguauagggacgaggcccucaauaaccgguuccagaucaaagggguugaacugaagucaggauacaaagauuggauucuuuggauaaguuuugcaaucagcugcuuccuguugugugugguccuccuggguuuuauuaugugggccugccagaagggcaauauccgcuguaacauuugcaucuga

SEQ ID NO: 128502 - RNA, 1701 nt, Artificial Sequence; identical to SEQ ID NO: 128303
  derived and/or modified CDS sequence (opt3) from hemagglutinin__InfluenzaA__ABB80137

SEQ ID NO: 128503 - RNA, 1701 nt, Artificial Sequence; identical to SEQ ID NO: 128500
  derived and/or modified CDS sequence (opt3) from hemagglutinin__InfluenzaA__ABB80159

SEQ ID NO: 128504 - RNA, 1701 nt, Artificial Sequence; identical to SEQ ID NO: 128071
  derived and/or modified CDS sequence (opt3) from hemagglutinin__InfluenzaA__ABB80185

SEQ ID NO: 128505 - RNA, 1701 nt, Artificial Sequence
  derived and/or modified CDS sequence (opt3) from hemagglutinin__InfluenzaA__ABB80207
augaagaccaucauugcccugagcuacauacucugccuuguguucgcucagaaacugcccggcaacgacaauuccacagcaacuuuguguuuagggcaccaugccgucccuaacggaacgcugguuaagaccaucacaaaugaucaaauugaggugacuaacgcgaccgaauugguacagucuucaaguacagguagaaucugcgacagcccacacaggauucucgauggcgagaauuguacccugaucgacgcccuucugggggauccgcauugcgacgauuuucagaacaaagaaugggacuuguucguggagcgguccaaggcuuauucuaauuguuaccccuaugaugucccugacuacgcaucgcuccgcucacugguggccagcaguggaacucuggaauuuaacaaugaguccuucaacuggacaggcguugcucagaaugguaccucuuaugcaugcaaacgacguagcauaaaguccuuuuucucaagacucaacugguuacaccaacugaaguacaaauauccagcccuuaaugugacgaugcccaacaaugauaaguuugacaaauuguacaucuggggaguccaucacccuaguacugauagcgaccagaccucucuguacgcucaggccuccgggagggugacaguaucaacuaagcggagccagcaaaccguuauuccaaacaucggcagucgccccugggugagaggcgucucuuccaggauuagcaucuauuggacaauagugaaaccuggggacauucuacucaucaacucgaccggaaaucugauugcgccacgggguuacuucaagauccgcucuggcaaguccucaaucaugcgaagugaugcaccgauugggaaauguaacagcgagugcauaacgcccaauggauccaucccuaacgacaagccauuucagaaugugaacagaauuacuuauggcgccugucccagguacgucaaacagaauacacuuaagcuggcuaccgguaugcggaacguuccugaaaaacagacucgugggaucuucggagccauagcaggcuuuauugagaauggcugggaagggaugguggauggaugguaugguuuccgccaccaaaacucugagggcacagggcaggcugccgaccuaaagagcacccaggcggccaucaaucaaaucaacggaaaacucaauagacugauugagaagacgaacgaaaaguuucaucagaucgagaaagaguucucagaaguagaaggcaggauucaggauuuagagaaguacguggaggacaccaaaauagaucuguggaguuauaaugcagaacuccuugucgcucuggagaaccagcacacaaucgacuugacugauuccgaaaugaacaagcuauucgagcggacccgaaaacaacugcgcgaaaaugccgaggacauggguaacgggugcuuuaagauuuaccauaagugugauaaugcuugcaucggcagcaucagaaacggaacauacgaccacgacguguauagggaugaggcccucaauaaccgguuccagauuaaaggcguugaacugaagucuggguacaaagacuggauacuuuggaucucauuugcaaugaguugcuuccuguugugugugguccuccugggauuuauuaugugggccugccagaaggguaauauccgcuguaacauuugcaucuga

SEQ ID NO: 128506 - RNA, 1701 nt, Artificial Sequence
  derived and/or modified CDS sequence (opt3) from hemagglutinin__InfluenzaA__ABB80229
augaagaccaucauugcccugagcuacauacucugccuuguguucgcucagaaacugcccggcaacgacaauuccacagcaacuuuguguuuagggcaccaugccgucccuaacggaacgcugguuaagaccaucacaaaugaucaaauugaggugacuaacgcgaccgaauugguacagucuucaaguacagguagaaucugcgacagcccacacaggauucucgauggcgagaauuguacccugaucgacgcccuucugggggauccgcauugcgacggauuucagaacaaagaaugggauuuguucguggagcgguccaaggcuuauucuaauuguuaccccuaugacgucccugauuacgcaucgcuccgcucacugguggccagcaguggcacucuggaauuuaacaaugaguccuucaacuggacagguguugcucagaaugggaccucuuaugcaugcaaacgacguagcauaaaguccuuuuucucaagacucaacugguuacaccaacugaaguacaaauauccagcccuuaaugugacgaugcccaacaaugacaaguuugauaaauuguacaucuggggaguccaucacccuaguacugacagcgaucagaccucucuguacgcucaggccuccggcagggugacaguaucaacuaagcggagccagcaaaccguuauuccaaacaucggcagucgccccugggugagaggggucucuuccaggauuagcaucuauuggacaauagugaaaccuggagacauucuacucaucaacucgaccgguaaucugauugcgccacggggcuacuucaagauccgcucugggaaguccucaaucaugcgaagugacgcaccgauuggaaaauguaacagcgagugcauaacgcccaauggcuccaucccuaacgauaagccauuucagaaugugaacagaauuacuuauggugccugucccagguacgucaaacagaauacacuuaagcuggcuaccgggaugcggaacguuccugaaaaacagacucguggaaucuucggcgccauagcaggcuuuauugagaaugggugggaaggaaugguggacgguugguauggcuuccgccaccaaaacucugaggggacaggacaggcugccgaucuaaagagcacccaggcggccaucaaucaaaucaacggcaaacucaauagacugauugagaagacgaacgaaaaguuucaucagaucgagaaagaguucucagaaguagaagguaggauucaggacuuagagaaguacguggaggauaccaaaauagaccuguggaguuauaaugcagaacuccuugucgcucuggagaaccagcacacaaucgauuugacugacuccgaaaugaacaagcuauucgagcggacccgaaaacaacugcgcgaaaaugccgaggauauggggaacggcugcuuuaagauuuaccauaagugugacaaugcuugcaucggaagcaucagaaacggcacauacgaucacgacguguauagggacgaggcccucaauaaccgguuccagauuaaagggguugaacugaagucuggauacaaagauuggauacuuuggaucucauuugcaaugaguugcuuccuguugugugugguccuccuggguuuuauuaugugggccugccagaagggcaauauccgcuguaacauuugcaucuga

SEQ ID NO: 128507 - RNA, 1701 nt, Artificial Sequence; identical to SEQ ID NO: 128500
  derived and/or modified CDS sequence (opt3) from hemagglutinin__InfluenzaA__ABB80240

SEQ ID NO: 128508 - RNA, 1701 nt, Artificial Sequence
  derived and/or modified CDS sequence (opt3) from hemagglutinin__InfluenzaA__ABB80251
augaagaccaucauugcccugagcuacauacucugccuuguguucgcucagaaacugcccggcaacgacaauuccacagcaacuuuguguuuagggcaccaugccgucccuaacggaacgcugguuaagaccaucacaaaugaucaaauugaggugacuaacgcgaccgaacuuguacagucuucaaguacagguagaaucugcgacagcccacacaggauucucgauggcgagaauuguacccugaucgacgcucuacugggggauccgcauugcgacggauuucagaacaaagaaugggauuuguucguggagcgguccaaggccuauucuaauuguuaccccuaugacgucccugauuacgcaucgcuccgcucacugguggccagcaguggcacucuggaauuuaacaaugaguccuucaacuggacagguguugcucagaaugggaccucuagcgcaugcaaacgacguuccauaaagucauuuuucaguagacucaacugguuacaccaacugaaguauaaauacccagcccuuaaugugacgaugcccaacaaugacaaguuugauaaauuguauaucuggggaguccaucacccuagcacugacucugaucagaccucccuguacgcucaggccucaggcagggugacaguaagcacuaagcggagucagcaaaccguuauuccaaacaucggcucucgccccugggugagaggggucuccagcaggauuucgaucuacuggacaauagugaaaccuggagacauucuacucaucaacucuaccgguaaucugauugcgccacggggcuauuucaagauccgcuccgggaagucaaguaucaugcgaagcgacgcaccgauuggaaaauguaacuccgagugcauaacgcccaauggcucuaucccuaacgauaagccauuucagaaugugaacagaauuacuuacggugccugucccagguaugucaaacagaauacacuuaagcuggcuaccgggaugcggaacguuccugaaaaacagacucguggaaucuucggcgccauagcaggcuuuauugagaaugggugggaaggaaugguggacgguugguacggcuuccgccaccaaaacagcgaggggacaggacaggcugccgauuugaagucaacccaggcggccaucaaucaaaucaacggcaaacucaauagacugauugagaagacgaacgaaaaguuucaucagaucgagaaagaguucagugaaguagaagguaggauucaggacuuagagaaguauguggaggauaccaaaauagaccugugguccuacaaugcagaacuccuugucgcucuggagaaccagcacacaaucgauuugacugacagcgaaaugaacaagcuauucgagcggacccgaaaacaacugcgcgaaaaugccgaggauauggggaacggcugcuuuaagauuuaucauaagugugacaaugcuugcaucggaucuaucagaaacggcacauacgaucacgacguguacagggacgaggcccucaauaaccgguuccagauuaaagggguugaacugaagucaggauauaaagauuggauacuuuggaucaguuuugcaauuagcugcuuccuguugugugugguccuccuggguuuaaucaugugggccugccagaagggcaauauucgcuguaacaucugcauauga

SEQ ID NO: 128509 - RNA, 1701 nt, Artificial Sequence
  derived and/or modified CDS sequence (opt3) from hemagglutinin__InfluenzaA__ABB80492
augaagaccaucauugcccugagcuacauacucugccuuguguucgcucagaaacugcccggcaacgacaauuccacagcaacuuuguguuuagggcaccaugccgucccuaacggaacgcugguuaagaccaucacaaaugaucaaauugaggugacuaacgcgaccgaacuuguacagaauagcucaacagguagaaucugcgacaguccacacaggauucucgauggcgagaacuguacccugaucgacgcucuacugggggauccgcauugcgacggauuucagaauaaagaaugggauuuguucguggagcggagcaaggccuauuccaacuguuaccccuaugacgucccugauuacgcaucucuccgcucgcugguggccucaagcggcacucuggaauuuaauaacgagaguuucaauuggacagguguugcucagaacgggaccuccuaugcaugcaaacgacguucuauaaagagcuuuuucuccagacucaauugguuacaccaacugaaguacaaauauccagcccuuaacgugacgaugcccaauaacgacaaguuugauaaauuguacaucuggggaguccaucacccuucaacugacagugaucagaccagccuguacgcucaggccucuggcagggugacaguauccacuaagcggucacagcaaaccguuauuccaaacaucggcagccgccccugggugagaggggucaguucuaggauuuccaucuauuggacaauagugaaaccuggagacauucuacucaucaauagcaccgguaaccugauugcgccacggggcuacuucaagauccgcucggggaagucuuccaucaugcgaucagacgcaccgauuggaaaauguaauagugagugcauaacgcccaacggcagcaucccuaaugauaagccauuucagaacgugaauagaauuacuuauggugccugucccagguacgucaaacagaacacacuuaagcuggcuaccgggaugcggaauguuccugaaaaacagacucguggaaucuucggcgccauagcaggcuuuauugagaacgggugggaaggaaugguggacgguugguauggcuuccgccaccaaaauuccgaggggacaggacaggcugccgauuugaagucuacccaggcggccaucaaccaaaucaauggcaaacucaacagacugauugagaagacgaaugaaaaguuucaucagaucgagaaagaguucagcgaaguagaagguaggauucaggacuuagagaaguacguggaggauaccaaaauagaccuguggucauauaacgcagaacuccuugucgcucuggagaaccagcacacaaucgauuugacugacagugaaaugaauaagcuauucgagcggacccgaaaacaacugcgcgaaaacgccgaggauauggggaauggcugcuuuaagauuuaccauaagugugacaacgcuugcaucggauccaucagaaauggcacauacgaucacgacguguauagggacgaggcccucaacaaucgguuccagauuaaagggguugaacugaagucuggauacaaagauuggauacuuuggaucucuuuugcaaugucaugcuuccuguugugugugguccuccuggguuuuauuaugugggccugccagaagggcaacauccgcuguaauauuugcaucuga

SEQ ID NO: 128510 - RNA, 1701 nt, Artificial Sequence
  derived and/or modified CDS sequence (opt3) from hemagglutinin__InfluenzaA__ABB80503
augaagaccaucauugcccugagcuacauauccugccucguguucgcucagaaacuucccggcaacgacaauaacacagcaacucuguguuuggggcaccaugccgucccuaauggaacguuaguuaagaccaucacaaacgaucaaauugaggugacuaaugcgaccgaacugguacagucuucaaguacagguagaaucugcgacagcccacacaggauucuagauggcgagaacuguacccucaucgacgcucugcuuggggauccgcauugcgacggauuucagaauaaagaaugggaucuguucguggagcgguccaaggccuauucuaacuguuaccccuaugacgucccugauuacgcaucguugcgcucacucguggccagcaguggcacucuggaauuuaauaacgaguccuucaauuggacagguguugcucagaacgggaccucuuaugcaugcaaacgacguagcauaaaguccuuuuucucaagacugaauuggcuccaccaauuaaaguacaaauauccagcccugaacgugacgaugcccaauaacgacaaguuugauaaacuuuacaucuggggaguccaucacccuaguacugacagcgaucagaccucuuuguacgcucaggccuccggcagggugacaguaucaacuaagcggagccagcaaaccguuauuccaaacaucggcagucgccccugggugagaggggucucuuccaggauuagcaucuauuggacaauagugaaaccuggagacauucugcuaaucaauucgaccgguaaccucauugcgccacggggcuacuucaagauccgcucugggaaguccucaaucaugcgaagugacgcaccgauuggaaaauguaauagcgagugcauaacgcccaacggcuccaucccuaaugauaagccauuucagaacgugaauagaauuacuuauggugccugucccagguacgucaaacagaacacacugaagcuggcuaccgggaugcggaauguuccugaaaaacagacucguggaaucuucggcgccauagcaggcuuuauugagaacgggugggaaggaaugguggacgguugguauggcuuccgccaccaaaauucugaggggacaggacaggcugccgaucuuaagagcacccaggcggccaucaaccaaaucaauggcaaauugaacagacucauugagaagacgaaugaaaaguuucaucagaucgagaaagaguucucagaaguagaagguaggauucaggaccuggagaaguacguggaggauaccaaaauagacuuauggaguuauaacgcagaacugcucgucgcucuugagaaccagcacacaaucgaucugacugacuccgaaaugaauaaguuguucgagcggacccgaaaacaacuacgcgaaaacgccgaggauauggggaauggcugcuuuaagauuuaccauaagugugacaacgcuugcaucggaagcaucagaaauggcacauacgaucacgacguguauagggacgaggcccugaacaaucgguuccagauuaaagggguugaacuccgcucuggauacaaggauuggauacuguggaucucauuugcaauuaguugcuuccuucuguguguggucuugcucgguuuuaucaugugggccugccagaaaggcaacauuagauguaauaucugcauauga

SEQ ID NO: 128511 - RNA, 1701 nt, Artificial Sequence; identical to SEQ ID NO: 128500
  derived and/or modified CDS sequence (opt3) from hemagglutinin__InfluenzaA__ABB80514

SEQ ID NO: 128512 - RNA, 1701 nt, Artificial Sequence
  derived and/or modified CDS sequence (opt3) from hemagglutinin__InfluenzaA__ABB80529
augaagaccaucauugcccugagcuacauauccugccucguguucgcucagaaacuucccggcaacgacaauucuacagcaacucuguguuuggggcaccaugccgucccuaacggaacguuaguuaagaccaucacaaaugaucaaauugaggugacuaacgcgaccgaacugguacagucaaguagcacagguagaaucugcgacuccccacacaggauucuagauggcgagaauuguacccucaucgacgcucugcuuggggauccgcauugcgacggauuucagaacaaagaaugggaucuguucguggagcggucuaaggccuauucgaauuguuaccccuaugacgucccugauuacgcaucauugcgcagccucguggccaguuccggcacucuggaauuuaacaaugagucuuucaacuggacagguguugcucagaaugggaccagcuaugcaugcaaacgacguuccauaaagucauuuuucaguagacugaacuggcuccaccaauuaaaguacaaauauccagcccugaaugugacgaugcccaacaaugacaaguuugauaaacuuuacaucuggggaguccaucacccuagcacugacucugaucagaccuccuuguacgcucaggccucaggcagggugacaguaagcacuaagcggagucagcaaaccguuauuccaaacaucggcucucgccccugggugagaggggucuccagcaggauuucgaucuauuggacaauagugaaaccuggagacauucugcuaaucaacucuaccgguaaucucauugcgccacggggcuacuucaagauccgcuccgggaagucaaguaucaugcgaagcgacgcaccgauuggaaaauguaacuccgagugcauaacgcccaauggcucuaucccuaacgauaagccauuucagaaugugaacagaauuacuuauggugccugucccagguacgucaaacagaauacacugaaacuugcuaccgggaugcggaacguuccugacaagcagacucguggaaucuucggcgccauagcaggcuuuauugaaaaugggugggagggaaugguggaugguugguauggcuuccgccaccaaaacagcgaagggacaggacaggcugccgaccugaagucaacccaggcggccaucaaucaaaucaacggcaaauugaauagacucauugagaagacgaacgagaaguuucaucagaucgaaaaagaguucagugaaguagaggguaggauucaggaucuggaaaaguacguggaggacaccaaaauagauuuaugguccuauaaugcagagcugcucgucgcucuugaaaaccagcacacaaucgaccugacugauagcgagaugaacaaguuguucgaacggacccgaaaacaacuacgcgagaaugccgaagacauggggaacggcugcuuuaagauuuaccauaagugugauaaugcuugcaucggaucuaucagaaacggcacauacgaccacgacguguauagggaugaggcccugaauaaccgguuccagauuaaagggguugagcucaagucaggauacaaagacuggauacuguggaucaguuuugcaauuagcugcuuccuucuguguguggucuugcucgguuuuaucaugugggccugccagaagggcaauauucgcuguaacaucugcauauga

SEQ ID NO: 128513 - RNA, 1701 nt, Artificial Sequence
  derived and/or modified CDS sequence (opt3) from hemagglutinin__InfluenzaA__ABB80641
augaagaccaucauugcccugagcuacauacucugccuuguguucgcucagaaaauccccggcaacgacaauuccacagcaacucuguguuuggggcaccaugccgucccuaacggaacguuaguuaagaccauuacaaaugaucaaaucgaggugacuaacgcgaccgaacugguacagucuucaaguacagguagaauuugcgacagcccacacaggauccuagauggcgagaauuguacccucauagacgcucugcuuggggauccgcauugcgacggauuucagaacaaagaaugggaucuguucguggagcgguccaaggccuauucuaauuguuaccccuaugacgucucggauuacgcaucauugcgcagccucguggccaguuccggcacucuggaauuuaacaaugagucuuucaacuggacagguguugcucagaaugggaccagcuaugcaugcaaacgacguuccaucaagucauuuuucaguagacugaacuggcuccaccaauuaaaguacaaauauccugcccugaaugugacgaugccaaacaaugacaaguuugauaaacuuuacauuuggggaguccaucaccccagcacugacucugaucagaccuccuuguacgcucaggccucaggcagggugacaguaagcacuaagcggagucagcaaaccguuaucccuaacauuggcucucgcccaugggugagaggggucuccagcaggaucucgauauauuggacaauugugaaacccggagacauccugcuaauuaacucuaccgguaaucucaucgcgccucggggcuacuucaagauccgcuccgggaagucaaguauuaugcgaagcgacgcaccaauaggaaaauguaacuccgagugcaucacgccgaauggcucuauucccaacgauaagccuuuucagaaugugaacagaaucacuuauggugccuguccaagguacgucaaacagaauacacugaaacuugcuaccgggaugcggaacguucccgaaaagcagacucguggaauauucggcgccauugcaggcuuuaucgagaaugggugggaaggaaugguggacgguugguauggcuuccgccaccaaaacagcgaggggacaggacaggcugccgaucugaagucaacccaggcggccaucaaucaaauuaacggcaaauugaauagacucaucgagaagacgaacgaaaaguuucaucagauugagaaagaguucagugaaguagaagguaggauacaggaccuggagaaguacguggaggauaccaaaaucgacuuaugguccuauaaugcagaacugcucgucgcucuugagaaccagcacacaauugaucugacugacagcgaaaugaacaaguuguucgagcggacccgaaaacaacuacgcgaaaaugccgaggauauggggaacggcugcuuuaagaucuaccauaagugugacaaugcuugcaucggaucuauuagaaacggcacauacgaucacgacguguauagggacgaggcccugaauaaccgguuccagauaaaagggguugaacucaagucaggauacaaagauuggauccuguggauuaguuuugcaaucagcugcuuccuucuguguguggucuugcucgguuuuauuaugugggccugccagaagggcaauauccgcuguaacauaugcaucuga

SEQ ID NO: 128514 - RNA, 1701 nt, Artificial Sequence
  derived and/or modified CDS sequence (opt3) from hemagglutinin__InfluenzaA__ABB80661
augaagaccaucauugcccugagcuacauacucugccuuguguucgcucagaaaauccccggcaacgacaauuccacagcaacucuguguuuggggcaccaugccgucccuaacggaacguuaguuaagaccauuacaaaugaucaaaucgaggugacuaacgcgaccgaacugguacagucuucaaguacagguagaauuugcgacagcccacacaggauccuagauggcgagaauuguacccucauagacgcucugcuuggggauccgcauugcgacggauuucagaacaaagaaugggaucuguucguggagcgguccaaggccuauucuaauuguuaccccuaugacgucccugauuacgcaucguugcgcucacucguggccagcaguggcacucuggaauuuaacaaugaguccuucaacuggacagguguugcucagaaugggaccucuuaugcaugcaaacgacguagcaucaaguccuuuuucucaagacugaacuggcuccaccaauuaaaguacaaauauccagcccugaaugugacgaugcccaacaaugacaaguuugauaaacuuuacauuuggggaguccaucacccuaguacugacagcgaucaggcuucuuuguacgcccaggcguccggcagggugaccguaucaacaaagcggagccagcaaacuguuaucccaaacauuggcagucgccccugggugagaggggucucuuccaggaucagcauauauuggaccauugugaaaccuggagacauccugcuaauuaacucgacagguaaucucaucgcaccacggggcuacuucaagauccgcucugggaaguccucaauuaugcgaagugacgccccgauaggaaaauguaacagcgagugcaucacccccaauggcuccauuccuaacgauaagccauuucagaaugugaacagaaucacguauggugcuugucccagguacgucaaacagaauacucugaagcuggccacagggaugcggaacguuccugaaaaacagacccguggaauauucggcgcaauugcuggcuuuaucgagaaugggugggaaggaaugguggacgguugguauggcuuccgccaccaaaacucugaggggacuggacaggccgcggaucuuaagagcacacaggccgcaaucaaucaaauuaacggcaaauugaauagacucaucgagaagaccaacgaaaaguuucaucagauugagaaagaguucucagaaguagaagguaggauacaggaccuggagaaguacguggaggauacgaaaaucgacuuauggaguuauaaugcugaacugcucgucgcccuugagaaccagcacaccauugaucugacagacuccgaaaugaacaaguuguucgagcggacucgaaaacaacuacgcgaaaaugcugaggauauggggaacggcugcuuuaagaucuaccauaagugugacaaugccugcaucggaagcauuagaaacggcaccuacgaucacgacguguauagggacgaggcacugaauaaccgguuccagauaaaagggguugaacucaagucuggauacaaagauuggauccuguggauuucauuugccaucaguugcuuccuucuguguguggucuugcucgguuuuauuaugugggcuugccagaagggcaauauccgcuguaacauaugcaucuga

SEQ ID NO: 128515 - RNA, 1701 nt, Artificial Sequence
  derived and/or modified CDS sequence (opt3) from hemagglutinin__InfluenzaA__ABB80672
augaagaccaucauugcccugagcuacauacucugccuuguguucgcucagaaacugcccggcaacgacaauuccacagcaacuuuguguuuagggcaccaugccgucccuaacggaacgcugguuaagaccaucacaaaugaucaaauugaggugacuaacgcgaccgaacuuguacaggguucuucaacaggcagaaucugcgacaguccacaccagauucucgaugggaaaaauuguacccugaucgacgcucuacugggagauccgcauugcgacggcuuucagaacaaggagugggauuuguucguggaaaggagcacugccuauuccaauuguuaccccuaugacgucccugauuacgcaucucuccggucgcugguggccucaagcgguacacuggaguuuaccaaagaaggguucaacuggacgggaguugcucaagacggcacuagcuaugcaugcaagcgcggcuccgugaagucuuucuucagccgacucaauugguuacacaaacuggaguacaaguauccagcccuuaacgucaccaugcccaauaacgauaaauuugacaaguuguacauauggggagugcaucacccuuccacagauucagaccagaccagucuguacguacaggcuagcgggcguguuacugugucuacaaaaagaucccagcaaaccgucaucccaaauauugguucaaggcccugggugcggggcgugagcagucgcaucucuauuuauuggacgaucgucaagccuggggacauacuacucauuaacuccacuggaaaucugaucgccccaagaggcuacuucaagauuaggagcgguaaaucgucuaucaugcgguccgaugcgccgaucgacaacuguaacucagagugcauuacacccaaugggaguauaccuaacgauaagccauuucagaauguuaaccgcaucaccuauggagcauguccccgauacgugaaacagaauacucuuaagcuggccacaggcaugagaaacguaccugaaaaacagaccaggggcauuuucggggcuaucgccggauuuauagagaaugguugggaaggcaugguggacgggugguauggauuccggcaccaaaacagcgagggcacgggucaggcagcugauuugaaguccacccaggccgcgauuaaucaaaucaacgggaaacucaaucgucugaucgagaagacaaacgaaaaguuucaucagauugagaaagaauuuucugaggucgaaggccgcauccaggacuuagagaaguacguggaggauacuaaaauugaccuguggagcuauaaugccgaacuccuuguugcacuggagaaccagcacaccauagauuugacagacucagaaaugaauaagcuauucgagagaacuaggaaacaacugcgggaaaacgcugaggauaugggaaacggcugcuuuaagaucuaccauaagugugacaaugccugcauugggaguauccgaaacggaaccuacgaccacgauguguaucgcgacgaggcucucaauaacagauuccagaucaaaggugucgaacugaaguccggcuacaaagauuggauucuuuggauaaguuuugccaucucuugcuuccuguugugugugguacuccugggguuuauuaugugggcaugccagaagggaaauaucagguguaacauuugcaucuga

SEQ ID NO: 128516 - RNA, 1701 nt, Artificial Sequence
  derived and/or modified CDS sequence (opt3) from hemagglutinin__InfluenzaA__ABB80682
augaagaccaucauugcccugagcuacauauccugccucguguucgcucagaaacuucccggcaacgacaauucuacagcaacucuguguuuggggcaccaugccgucccuaacggaacguuaguuaagaccaucacaaaugaucaaauugaggugacuaacgcgaccgaacugguacagucaaguagcacagguagaaucugcgacuccccacacaggauucuagauggcgagaauuguacccucaucgacgcucugcuuggggauccgcauugcgacggauuucagaacaaagaaugggaucuguucguggagcggucuaaggccuauucgaauuguuaccccuaugacgucccugauuacgcaucauugcgcagccucguggccaguuccggcacucuggaauuuaacaaugagucuuucaacuggacagguguugcucagaaugggaccagcuaugcaugcaaacgacguuccauaaagucauuuuucaguagacugaacuggcuccaccaauuaaaguacaaauauccagcccugaaugugacgaugcccaacaaugacaaguuugauaaacuuuacaucuggggaguccaucacccuagcacugacucugaucagaccuccuuguacgcucaggccucaggcagggugacaguaagcacuaagcggagucagcaaaccguuauuccaaacaucggcucucgccccugggugagaggggucuccagcaggauuucgaucuauuggacaauagugaaaccuggagacauucugcuaaucaacucuaccgguaaucucauugcgccacggggcuacuucaagauccgcuccgggaagucaaguaucaugcgaagcgacgcaccgauuggaaaauguaacuccgagugcauaacgcccaauggcucuaucccuaacgauaagccauuucagaaugugaacagaauuacuuauggugccugucccagguacgucaaacagaauacacugaaacuugcuaccgggaugcggaacguuccugaaaagcagacucguggaaucuucggcgccauagcaggcuuuauugagaaugggugggaaggaaugguggacgguugguauggcuuccgccaccaaaacagcgaggggacaggacaggcugccgaucugaagucaacccaggcggccaucaaucaaaucaacggcaaauugaauagacucauugagaagacgaacgaaaaguuucaucagaucgagaaagaguucagugaaguagaagguaggauucaggaccuggagaaguacguggaggauaccaaaauagacuuaugguccuauaaugcagaacugcucgucgcucuugagaaccagcacacaaucgaucugacugacagcgaaaugaacaaguugcuagagcggacccgaaaacaacugcgcgaaaaugccgaggauauggggaacggcugcuucaagauuuaccauaagugugacaaugcuugcaucggaucuaucagaaacggcacauacgaucacgacguguauagggacgaggcccucaauaaccgguuucagauuaaagggguugaacugaagucaggauacaaagauuggauacuuuggaucaguuucgcaauuagcugcuuucuguugugugugguccuccuggguuucaucaugugggccugccagaagggcaauauucgcuguaacaucugcauauga

SEQ ID NO: 128517 - RNA, 1701 nt, Artificial Sequence
  derived and/or modified CDS sequence (opt3) from hemagglutinin__InfluenzaA__ABB80693
augaagaccaucauugcccugagcuacauauccugccucguguucgcucagaaacuucccggcaacgacaauucuacagcaacucuguguuuggggcaccaugccgucccuaacggaacguuaguuaagaccaucacaaaugaucaaauugaggugacuaacgcgaccgaacugguacagucaaguagcacagguagaaugugcgacuccccacacaggauccuagauggcgagaauuguacccucauugacgcucugcuuggggauccgcauugcgacggauuucagaacaaagaaugggaucuguucguggagcggucuaaggccuauucgaauuguuaccccuaugacgucccugauuacgcaucauugcgcagccucguggccaguuccggcacucuggaauuuaacaaugagucuuucaacuggacagguguugcucagaaugggaccagcuaugcaugcaaacgacguuccaucaagucauuuuucaguagacugaacuggcuccaccaauuaaaguacaaauauccagcccugaaugugacgaugcccaacaaugacaaguuugauaaacuuuacauauggggaguccaucacccuagcacugacucugaucagaccuccuuguacgcucaggccucaggcagggugacaguaagcacuaagcggagucagcaaaccguuaucccaaacauuggcucucgccccugggugagaggggucuccagcaggaucucgauuuauuggacaaucgugaaaccuggagacauacugcuaauuaacucuaccgguaaucucaucgcgccacggggcuacuucaagauucgcuccgggaagucaaguaucaugcgaagcgacgcaccgaucggaaaauguaacuccgagugcauuacgcccaauggcucuauaccuaacgauaagccauuucagaaugugaacagaaucacuuauggugccugucccagguacgucaaacagaauacacugaaacuugcuaccgggaugcggaacguuccugaaaagcagacucguggaauuuucggcgccaucgcaggcuuuauagagaaugggugggaaggaaugguggacgguugguauggcuuccgccaccaaaacagcgaggggacaggacaggcugccgaucugaagucaacccaggcggccauuaaucaaaucaacggcaaauugaauagacucaucgagaagacgaacgaaaaguuucaucagauugagaaagaguucagugaaguagaagguaggauccaggaccuggagaaguacguggaggauaccaaaauugacuuaugguccuauaaugcagaacugcucgucgcucuugagaaccagcacacaauagaucugacugacagcgaaaugaacaaguuguucgagcggacccgaaaacaacuacgcgaaaaugccgaggauauggggaacggcugcuuuaagaucuaccauaagugugacaaugcuugcauuggaucuaucagaaacggcacauacgaucacgacguguauagggacgaggcccugaauaaccgguuccagaucaaagggguugaacucaagucaggauacaaagauuggauucuguggauaaguuuugcaaucagcugcuuccuucuguguguggucuugcucgguuuuauuaugugggccugccagaagggcaauauccgcuguaacauuugcaucuga

SEQ ID NO: 128518 - RNA, 1701 nt, Artificial Sequence
  derived and/or modified CDS sequence (opt3) from hemagglutinin__InfluenzaA__ABB80704
augaagaccaucauugcccugagcuacauacucugccuuguguucgcucagaaaauccccggcaacgacaauuccacagcaacucuguguuuggggcaccaugccgucccuaacggaacguuaguuaagaccauuacaaaugaucaaaucgaggugacuaacgcgaccgaacugguacagucuucaaguacagguagaauuugcgacagcccacacaggauccuagauggcgagaauuguacccucauagacgcucugcuuggggauccgcauugcgacggauuucagaacaaagaaugggaucuguucguggagcgguccaaggccuauucuaauuguuaccccuaugacgucccugauuacgcaucguugcgcucacucguggccagcaguggcacucuggaauuuaacaaugaguccuucaacuggacagguguugcucagaaugggaccucuuaugcaugcaaacgacguagcaucaaguccuuuuucucaagacugaacuggcuccaccaauuaaaguacaaauauccagcccugaaugugacgaugcccaacaaugacaaguuugauaaacuuuacauuuggggaguccaucacccuaguacugacagcgaucagaccucuuuguacgcucaggccuccggcagggugacaguaucaacuaagcggagccagcaaaccguuaucccaaacauuggcagucgccccugggugagaggggucucuuccaggaucagcauauauuggacaauugugaaaccuggagacauccugcuaauuaacucgaccgguaaucucaucgcgccacggggcuacuucaagauccgcucugggaaguccucaauuaugcgaagugacgcaccgauaggaaaauguaacagcgagugcaucacgcccaauggcuccauuccuaacgauaagccauuucagaaugugaacagaaucacuuauggugccugucccagguacgucaaacagaauacacugaagcuggcuaccgggaugcggaacguuccugaaaaacagacucguggaauauucggcgccauugcaggcuuuaucgagaaugggugggaaggaaugguggacgguugguauggcuuccgccaccaaaacucugaggggacaggacaggcugccgaucuuaagagcacccaggcggccaucaaucaaauuaacggcaaauugaauagacucaucgagaagacgaacgaaaaguuucaucagauugagaaagaguucucagaaguagaagguaggauacaggaccuggagaaguacguggaggauaccaaaaucgacuuauggaguuauaaugcagaacugcucgucgcucuugagaaccagcacacaauugaucugacugacuccgaaaugaacaaguuguucgagcggacccgaaaacaacuacgcgaaaaugccgaggauauggggaacggcugcuuuaagaucuaccauaagugugacaaugcuugcaucggaagcauuagaaacggcacauacgaucacgacguguauagggacgaggcccugaauaaccgguuccagauaaaagggguugaacucaagucuggauacaaagauuggauccuguggauuucauuugcaaucaguugcuuccuucuguguguggucuugcucgguuuuauuaugugggccugccagaagggcaauauccgcuguaacauaugcaucuga

SEQ ID NO: 128519 - RNA, 1701 nt, Artificial Sequence; identical to SEQ ID NO: 128500
  derived and/or modified CDS sequence (opt3) from hemagglutinin__InfluenzaA__ABB80715

SEQ ID NO: 128520 - RNA, 1701 nt, Artificial Sequence
  derived and/or modified CDS sequence (opt3) from hemagglutinin__InfluenzaA__ABB80724
augaagaccaucauugcccugagcuacauacucugccuuguguucgcucagaaacugcccggcaacgacaauuccacagcaacuuuguguuuagggcaccaugccgucccuaacggaacgcugguuaagaccaucacaaaugaucaaauugaggugacuaacgcgaccgaauugguacagucuucaaguacagguagaaucugcgacagcccacacaggauucucgauggcgagaauuguacccugaucgacgcccuucugggggauccgcauugcgacggauuucagaacaaagaaugggauuuguucguggagcgguccaaggcuuauucuaauuguuaccccuaugacgucccugauuacgcaucgcuccgcucacugguggccagcaguggcacucuggaauuuaacaaugaguccuucaacuggacagguguugcucagaaugggaccucuuaugcaugcaaacgacguagcauaaaguccuuuuucucaagacucaacugguuacaccaacugaaguacaaauauccagcccuuaaugugacgaugcccaacaaugacaaguuugauaaauuguacaucuggggaguccaucacccuaguacugacagcgaucaggcuucucuguacgcccaggcguccggcagggugaccguaucaacaaagcggagccagcaaacuguuauuccaaacaucggcagucgccccugggugagaggggucucuuccaggauuagcaucuauuggaccauagugaaaccuggagacauucuacucaucaacucgacagguaaucugauugcaccacggggcuacuucaagauccgcucugggaaguccucaaucaugcgaagugacgccccgauuggaaaauguaacagcgagugcauaacccccaauggcuccaucccuaacgauaagccauuucagaaugugaacagaauuacguauggugcuugucccagguacgucaaacagaauacucuuaagcuggccacagggaugcggaacguuccugaaaaacagacccguggaaucuucggcgcaauagcuggcuuuauugagaaugggugggaaggaaugguggacgguugguauggcuuccgccaccaaaacucugaggggacuggacaggccgcggaucuaaagagcacacaggccgcaaucaaucaaaucaacggcaaacucaauagacugauugagaagaccaacgaaaaguuucaucagaucgagaaagaguucucagaaguagaagguaggauucaggacuuagagaaguacguggaggauacgaaaauagaccuguggaguuauaaugcugaacuccuugucgcccuggagaaccagcacaccaucgauuugacagacuccgaaaugaacaagcuauucgagcggacucgaaaacaacugcgcgaaaaugcugaggauauggggaacggcugcuuuaagauuuaccauaagugugacaaugccugcaucggaagcaucagaaacggcaccuacgaucacgacguguauagggacgaggcacucaauaaccgguuccagauuaaagggguugaacugaagucuggauacaaagauuggauacuuuggaucucauuugccaugaguugcuuccuguugugugugguccuccuggguuuuauuaugugggcuugccagaagggcaauauccgcuguaacauuugcaucuga

SEQ ID NO: 128521 - RNA, 1701 nt, Artificial Sequence; identical to SEQ ID NO: 128506
  derived and/or modified CDS sequence (opt3) from hemagglutinin__InfluenzaA__ABB80737

SEQ ID NO: 128522 - RNA, 1701 nt, Artificial Sequence
  derived and/or modified CDS sequence (opt3) from hemagglutinin__InfluenzaA__ABB80748
augaagaccaucauugcccugagcuacauauccugccucguguucgcucagaaacuucccggcaacgacaauucuacagcaacucuguguuuggggcaccaugccgucccuaacggaacguuaguuaagaccaucacaaaugaucaaauugaggugacuaacgcgaccgaacugguacagucaaguagcacagguagaaucugcgacuccccacacaggauucuagauggcgagaauuguacccucaucgacgcucugcuuggggauccgcauugcgacggauuucagaacaaagaaugggaucuguucguggagcggucuaaggccuauucgaauuguuaccccuaugacgucccugauuacgcaucauugcgcagccucguggccaguuccggcacucuggaauuuaacaaugagucuuucaacuggacagguguugcucagaaugggaccagcuaugcaugcaaacgacguuccauaaagucauuuuucaguagacugaacuggcuccaccaauuaaaguacaaauauccagcccugaaugugacgaugcccaacaaugacaaguuugauaaacuuuacaucuggggaguccaucacccuagcacugacucugaucagaccuccuuguacgcucaggccucaggcagggugacaguaagcacucagcggagucaacagaccguuauuccaaacaucggcucucgccccugggugagaggggucuccagcaggauuucgaucuauuggacaauagugaagccuggagacauucugcuaaucaacucuaccgguaaucucauugcgccacggggcuacuucaaaauccgcuccgggaagucaaguaucaugcgaagcgacgcaccgauuggaaaguguaacuccgagugcauaacgcccaauggcucuaucccuaacgauaaaccauuucagaaugugaacagaauuacuuauggugccugucccagguacgucaagcagaauacacugaaacuugcuaccgggaugcggaacguuccugaaaagcaaacucguggaaucuucggcgccauagcaggcuuuauugagaaugggugggaaggaaugguggacgguugguauggcuuccgccaccagaacagcgaggggacaggacaggcugccgaucugaaaucaacccaagcggccaucaaucagaucaacggcaaguugaauagacucauugagaaaacgaacgaaaaguuucaucagaucgagaaggaguucagugaaguagaagguaggauucaggaccuggaggaguacguggaagauaccaaaauagacuuaugguccuauaaugcagagcugcucgucgcucuugaaaaccaacacacaaucgaucugacugacagcgagaugaacaaguuguucgaacggacccgaaaacagcuacgcgagaaugccgaggauauggggaacggcugcuuuaagauuuaccauaaaugugacaaugcuugcaucggaucuaucagaaacggcacauacgaucacgacguguauagggacgaagcccugaauaaccgguuccagauuaaggggguugagcucaagucaggauacaaagauuggauacuguggaucaguuuugcaauuagcugcuuccuucuguguguggucuugcucgguuuuaucaugugggccugccagaagggcaauauucgcuguaacaucugcauauga

SEQ ID NO: 128523 - RNA, 1701 nt, Artificial Sequence
  derived and/or modified CDS sequence (opt3) from hemagglutinin__InfluenzaA__ABB82183
augaagaccaucauugcccugagcuacauacucugccuuguguucgcucagaaacugcccggcaacgacaauuccacagcaacuuuguguuuagggcaccaugccgucccuaacggaacgcugguuaagaccaucacaaaugaucaaauugaggugacuaacgcgaccgaacuuguacagucuucaaguacagguagaaucugcgacagcccacaccagauucucgauggcgagaauuguacccugaucgacgcucuacugggggauccgcauugcgacggauuucagaacaaagaaugggauuuguucguggagagguccaaggccuauucuaauuguuaccccuaugacgucccugauuacgcaucgcuccggucacugguggccagcaguggcacucuggaauuuaacaaugaguccuucaacuggacagguguugcucaaaaugggaccucuagcgcaugcaaacgccgauccaacaagucauuuuucagucgucucaauugguuacaccagcugaaguauaaauacccagcccuuaacgugacgaugcccaauaacgagaaguuugacaaauuguauauauggggaguccaucacccuagcacugauucugaccagaucucccuguacgcucaggccucaggcagagugaccguaagcacaaagaggagucaacagacuguuauuccaaacaucggcucucggcccugggugcgcggggucuccagcagaauuucgaucuacuggaccauagugaaaccuggagauauucuacucaucaauucuacagguaaccugauugcgccaaggggcuauuucaagauccgguccgggaagucaagugugaugcgcagcgacgcauccaucggacgauguaauucugaaugcauuaccccgaacggcagcauacccaaugacaaaccuuuucagaacgucaauagaaucacguacggugccuguccaagguauguuaagcagaacacucuuaaacuggcuacagggaugcggaaugugcccgagaagcaaacccguggaauuuucggcgccaucgcaggcuuuauagaaaacgggugggagggaaugguagaugguugguacggcuuccgccaccagaauagcgaggggacuggacaggcugccgacuugaaaaguacacaagcggccauuaaccagaucaauggcaagcucaacagacugaucgagaaaaccaaugaaaaguuucaucagauugaaaaggaguucuccgaaguggaggguaggauccaggauuuagagaaauaugucgaagacacgaagauugaucuguggagcuacaacgcagagcuccuuguggcucuggaaaaccaacacaccauagacuugacagauucugagaugaauaaacuauucgaacggacuaagaaacagcugcgagagaacgccgaggacauggggaauggcugcuuuaagaucuaucauaagugugauaacgcuugcauuggaucaauccgcaauggcaccuacgaccacgauguuuacagagacgaagcccucaacaauagguuccagaucaaagggguggagcugaagaguggauauaaagacuggauucuuuggauaucauuugcaaucuccugcuuccuguugugugucgugcuccuggguuuuauuaugugggccugccagaagggcaacauccgguguaauauuugcaucuga

SEQ ID NO: 128524 - RNA, 1698 nt, Artificial Sequence; identical to SEQ ID NO: 128344
  derived and/or modified CDS sequence (opt3) from hemagglutinin__InfluenzaA__ABB82194

SEQ ID NO: 128525 - RNA, 1698 nt, Artificial Sequence
  derived and/or modified CDS sequence (opt3) from hemagglutinin__InfluenzaA__ABB82205
augaaggugaaacugcucguccuucugugcaccuucacagccacuuacgcugacacgaucuguauuggcuaucacgcaaacaauagcaccgauacaguugacacuguguuggagaagaacguaaccgugacacauuccgucaauuuacuggaagauucucacaacgggaaacuaugccuccugaagggaauagcgccccuucagcuggguaauuguucaguggccggcuggaucuuggggaacccugagugcgaacuccugauuaguaaagagagcugguccuacaucguugaaaccccaaauccggagaacggaacuuguuaucccggcuacuuugcugacuaugaggaacugagagagcaacucucuucggugagcucauucgaaagguuugagauuuucccuaaggagaguuccuggccaaaucauacagucaccggugugucugccagcugcucccacaacgggaagucaaguuuuuacaaaaauuuacuguggcuuacgggaaagaacggcuuguaucccaaucugagcaaaucuuacgcaaacuccaaggaaaaagagguacuuguucucuggggcgugcaucacccuccaaauaucggggaucagcgggcccuguaccacacugaaaacgcuuaugucucaguggugagcagucauuacucucgccgauucacccccgagauagcaaagcguccuaaggucagagaccaggaaggaaggaucaacuauuacuggacacuucuggagccaggugauacuauuaucuuugaggccaauggcaacuugauugcuccgcgguaugccuucgcgcucucccgcggguuuggaagcggcaucauaaccucgaaugcacccauggacgaaugugaugccaaaugccagacaccucaaggugcuauuaacucuucccugccauuccagaauguucaccccgugaccaucggggaguguccuaaguacguaagaucagccaaauuaaggauggugacgggacugcggaacauuccaaguauccagagccgcggccucuuuggcgcaaucgcuggguucauugaaggagguuggacuggcauggucgacgggugguauggauaccaucaccagaaugagcaaggcuccgguuacgccgcggaucagaagucuacacagaacgccauaaaugggaucaccaacaaagugaauagcguuauugaaaagaugaacacucaguuuacagcagugggcaaagaguucaauaagcuagagcgaagaauggaaaaccugaauaagaaagucgacgauggauucuuggacaucuggaccuauaacgcugagcuacuggugcuccuggaaaacgagaggacgcuugacuuucacgauucaaauguaaagaaccuguacgaaaaaguuaagagucaauugaaaaauaacgccaaggagauaggcaaugggugcuucgaguuuuaucauaaguguaacgacgaaugcauggaguccgugaaaaauggaaccuacgauuaucccaaguacagcgaagagucuaaacucaaccgggagaagauugacggugucaaacuggaaucaaugggcguguaucagaucuuagcuaucuacaguacagucgccagcucccuggugcuacucguuucucugggggcaauuucguucuggaugugcagcaauggaucccuucagugucguaucugcauuuga

SEQ ID NO: 128526 - RNA, 1698 nt, Artificial Sequence
  derived and/or modified CDS sequence (opt3) from hemagglutinin__InfluenzaA__ABB82216
augaaggugaaacugcucguccuucugugcaccuucacagccacuuacgcugacacgaucuguauuggcuaucacgcaaacaauagcaccgauacaguugacacuguguuggagaagaacguaaccgugacacauuccgucaauuuacuggaagauucucacaacgggaaacuaugccuccugaagggaauagcgccccuucagcuggguaauuguucaguggccggcuggaucuuggggaacccugagugcgaacuccugauuaguaaagagagcugguccuacaucguugaaaccccaaauccggagaacggaacuuguuaucccggcuacuuugcugacuaugaggaacugagagagcaacucucuucggugagcucauucgaaagguuugagauuuucccuaaggagaguuccuggccaaaucauacagucaccggugugucuagcuccugcucacacaacgggaagaguagcuuuuaccggaauuuacuguggcuuacgggcaaaaacggauuguaucccaaucugucuaaguccuacguaaacaauaaagaaaaggagguucuagugcucuggggcguccaucacccuccaaacaucggggaucagcgcgcccuguaccacacugaaaacgcauaugugucaguggucagcagucauuacucucgacguuucacccccgagauagccaaaagaccuaagguuagggaccaggaaggacggaucaauuauuacuggacacuucuggagccaggugauacuauuaucuuugaggcuaacggcaauuugauugcaccgcgcuaugccuucgcucucuccagaggguuuggaagcggcaucauaaccucgaacgcccccauggacgaaugugaugcgaagugccagacaccucaaggugcaauuaauucuucccugccauuccagaacgugcaccccguaaccaucggggaguguccuaaauacgugaggucagccaaguuacggauggucacgggacugcgcaauauuccaaguauccagagccgaggccucuuuggcgcuaucgccggguucauugaaggagguuggacuggcaugguggacgggugguauggauaccaucaccagaacgagcaaggcuccgguuacgcagcugaucagaaaucuacacagaaugccauaaacgggaucaccaauaagguuaacagcgugauugaaaagaugaauacucaguuuacagcggucggcaaagaguucaacaaacuugagagaaggauggaaaaucugaacaagaagguggacgauggauucuuggacaucuggaccuauaacgccgagcuacugguacuccuggaaaaugagcggacgcuugacuuucacgauucaaacguuaaaaaucuguacgaaaaggugaaaagucaauugaagaacaaugcaaaagagauaggcaacgggugcuucgaguuuuaucauaaguguaaugacgaaugcauggaguccgucaagaacggaaccuacgauuaucccaaauacagcgaagagucuaagcucaaucgugagaaaauugacggugugaagcuggaaucaaugggcgucuaucagaucuuagcuaucuacaguacaguggccagcucccugguucuacucgugucucugggggcuauuucguucuggaugugcagcaacggaucccuucagugucgcaucugcauuuga

SEQ ID NO: 128527 - RNA, 1701 nt, Artificial Sequence
  derived and/or modified CDS sequence (opt3) from hemagglutinin__InfluenzaA__ABB82227
augaagaccaucauugcccugagcuacauauucugccucacacuuggccaggaccugcccgggaacgauaauuccaaagcuacuuuguguuuaggacaccaugcagugccuaacgguacgcuggucaagaccaucacagacgaucaaacugagguuaccaaugccacagaacuugugcagucuucaaguaccggcaaaauuugcaacaauccacacagaauccucgacgggauggauuguacucugauugacgcgcuucugggagauccgcauugcgacguauuucagaacgagacaugggauuuguucguggaaaggagcaaggcuuuuuccaauuguuaucccuacgacgucccugauuaugccucucuccggucgcuggcagccucaagcggcacccuggaguucaucacggaagguuuuacuuggaccggggugacacagaacggaggcaguaaugcuugcaaacgcggcccaggguccggauucuuuucucgacucaacugguuaacuaagagcgguaauaccuaccccguucugaacgugacaaugccuaauaacgacaauuucgauaagcuauauauauggggcguccaccauccauccaccgaccaagagcagacgucauuguacgugcaggcaagugggcguguaacuguuagcacaagaaggucucagcaaaccaucauucccaacaucggaucccggccuugggugcgcggccugucaagcagaauuaguaucuauuggacuauagucaaaccaggugacgugcuagugauuaacucuaaugggaaccucaucgccccgaggggauacuuuaagaugcggacaggcaaauccagcauuaugcgcucggaugcucccaucgacaccuguaucucugagugcauuacgccuaauggcuccauaccaaacgauaagcccuuccagaauaucaacaaaauuaccuacggggccuguccuaaguaugucaagcagaauacacugaaacuugcgacuggaaugcgaaacguuccagaaaagcagaccagaggucuguuuggcgcaaucgccggguucauagagaauggaugggaaggcaugauugacgguugguacggguuuaggcaccaaaacucagagggcacaggacaggcugccgauuugaaaaguacucaggcagcuaucgaccaaaucaauggcaagcucaaccggauuaucgagaaaaccaaugaaaaguuccaccagauugagaaagaguucagcgaaguggaagggcguauacaggaucuggagaaguauguagaggacacaaagaucgauuuaugguccuacaacgccgaacugcucguggcgauggagaaucagcauaccauugaccuuacugauucugaaaugaacaaacuguuugagaagacgcgcagacaauugagggaaaacgccgaggacaugggaaaugguugcuucaaaaucuaucacaagugugacaacgcaugcaucgagagcauucggaauggcacauacgaucaugacgucuaucgagaugaagcucuaaacaaucgcuuucagauaaaagggguggagcugaagucaggauacaaggacuggauccucuggauuaguuucgccaucuccugcuuucugcuuuguguugugcuguugggcuucauuaugugggcuugccagagagguaacaucagguguaauauaugcaucuga

SEQ ID NO: 128528 - RNA, 1698 nt, Artificial Sequence
  derived and/or modified CDS sequence (opt3) from hemagglutinin__InfluenzaA__ABB83026
augaaggugaaacugcucauccuucugugcaccuucacagccacuuacgcugacacgauuuguauaggcuaucacgcaaacaauagcaccgauacagucgacacuguuuuggagaagaacgugaccguaacacauuccgugaauuuacuggaagauucucacaacgggaaacuaugccuccugaagggaaucgcgccccuucagcuggguaauuguucagucgccggcuggauuuuggggaacccugagugcgaacuccugaucaguaaagagagcugguccuacauuguggaaaccccaaauccggagaacggaacuuguuaucccggcuacuuugcugacuaugaggaacugagagagcaacucucuucgguuagcucauucgaaagguuugagaucuucccuaaggagaguuccuggccaaaucauacagugaccggugucucugccagcugcucccacaacgggaagucaaguuuuuaccggaauuuacuguggcuuacggagaaaaacggauuguaucccaaucugagcaagucuuacgcaaacaauaaagagaaggaagugcuaauacucuggggcguacaucacccuccaaacaucggcgaucagcgcacucuguaccacaccgagaacgccuauguuuccguggucucaagccauuacagucgacguuucacacccgaaauuacuaaaagaccuaaggugagggaccaggaggggcggaucaauuauuacuggacccuucuggagccaggagauacaauuaucuuugaagcuaacgguaauuugauagcaccgugguaugccuucgcucucucucgcggcuuuggguccggaauuaucaccagcaacgcccccauggacgagugugaugcgaagugccagacgccucaaggcgcaauuaauucgucucugccauuccagaacgugcaccccgucacuaucggugaauguccuaaauacguuagauccgccaaguuaaggauggugacagggcugcggaauaucccaucaauucagagucgcggacucuuuggcgcuauagccggcuucaucgaagggggauggaccgguaugguagacggcugguauggguaccaucaccagaacgaacaaggaagcggcuacgcagcugaucagaaauccacucagaaugccauuaacgguaucacaaauaaggugaacucugucauagagaaaaugaauacccaguuuacggcgguggggaaggaguucaacaaacuugaacgaagaauggagaaucugaacaagaagguugacgauggcuucuuggacauuuggaccuauaacgccgaacuacuggugcuccuggagaaugaaaggacacuugacuuucacgauagcaacgucaaaaaucuguacgagaaggugaaaucacaauugaagaacaaugcaaaagagaucggaaacggcugcuucgaauuuuaucauaaguguaauaacgagugcauggaaaguguaaagaaugggacuuacgacuaucccaaauacuccgaggagagcaagcucaaccgggagaaaaucgauggaguuaagcuggaaucuauggguguguaucagauuuuagcuaucuacucaaccgucgccaguagccuggugcuacucgucucccugggcgcuauuucuuucuggaugugcucgaaugggagccuucagugucguauaugcaucuga

SEQ ID NO: 128529 - RNA, 1698 nt, Artificial Sequence
  derived and/or modified CDS sequence (opt3) from hemagglutinin__InfluenzaA__ABB83127
augaaggugaaacugcucauccuucugugcaccuucacagccacuuacgcugacacgauuuguauaggcuaucacgcaaacaauagcaccgauacagucgacacuguuuuggagaagaacgugaccguaacacauuccgugaauuuacuggaagauucucacaacgggaaacuaugccuccugaagggaaucgcgccccuucagcuggguaauuguucagucgccggcuggauuuuggggaacccugagugcgaacuccugaucaguaaagagagcugguccuacauuguggaaaccccaaauccggagaacggagcuuguuaucccggcuacuuugccgacuaugaggaacugagagagcaacucucuucgguuagcucauucgaaagguuugagaucuucccuaaggagaguuccuggccaaaucauacugugacaggugucucugcaagcugcucccacaacgggaagucaaguuuuuaccggaauuuacuguggcuuaccggcaaaaacggauuguaucccaaucugagcaagucuuacgccaacaauaaagaaaaggaggugcuaauacucuggggcguacaucacccuccaaacaucggggaucagcgcacgcuguaccacacugaaaacgcuuauguuuccguggucucaagccauuacagucgacguuucacccccgagauuacaaaaagaccuaaggugagggaccaggaaggacggaucaauuauuacuggacucuucuggagccaggugauaccauuaucuuugaggcaaacggcaauuugauagccccgugguaugcuuucgcccucucucgcggguuuggauccggcauuaucauuagcaacgcgcccauggacgaaugugaugcaaagugccagacaccucaaggugccaucaauucgucucugccauuccagaacgugcaccccgucaccaucggggaguguccuaaauacguuagauccgcuaaguuaaggauggugacgggacugcggaauauuccaucaauacagagucgcggccucuuuggcgccaucgcaggguucauugaaggagguuggacuggcaugguagacgggugguauggauaccaucaccagaacgagcaaggcagcgguuacgcugccgaucagaaauccacacagaaugcgaucaacgggauaaccaauaaggugaacucugucauugaaaagaugaauacucaguuuacagccgugggcaaagaguucaacaaacuugagcgaagaauggaaaaucugaacaagaagguugacgauggauucuuggacaucuggaccuauaacgcagagcuacuggugcuccuggaaaaugagaggacgcuugacuuucacgauagcaacgucaaaaaucuguacgaaaaggugaaaucacaauugaagaacaaugcuaaagagaucggcaacgggugcuucgaguuuuaucauaaguguaauaacgaaugcauggagaguguaaagaauggaaccuacgacuaucccaaauacuccgaagagagcaagcucaaccgggagaaaauugaugguguuaagcuggacucuaugggcguguaucagaucuuagccauuuacucaacagucgcuaguagccuggugcuacucgucucccugggggccauaucuuucuggaugugcucgaauggaagccuucagugucguaucugcauuuga

SEQ ID NO: 128530 - RNA, 1698 nt, Artificial Sequence
  derived and/or modified CDS sequence (opt3) from hemagglutinin__InfluenzaA__ABB83138
augaaggugaaacugcucauccuucugugcaccuucacagccacuuacgcugacacgauuuguauaggcuaucacgcaaacaauagcaccgauacagucgacacuguuuuggagaagaacgugaccguaacacauuccgugaauuuacuggaagauucucacaacgggaaacuaugccuccugaagggaaucgcgccccuucagcuggguaauuguucagucgccggcuggauuuuggggaacccugagugcgaacuccugaucaguaaagagagcugguccuacauuguggaaaccccaaauccggagaacggagcuuguuaucccggcuacuuugccgacuaugaggaacugagagagcaacucucuucgaucagcucauucgaaagguuugagauauucccuaaggagaguuccuggccaaaucauacuguuacaggugugucugcaagcugcucccacaacgggaagucaaguuuuuaccggaauuuacuguggcuuaccggcaaaaacggauuguaucccaaucugagcaagucuuacgccaacaauaaagaaaaggagguccuaauccucuggggcgugcaucacccuccaaacauuggggaucagcgcacgcuguaccacacugaaaacgcuuauguauccguugugucaagccauuacagucgacguuucacccccgagaucacaaaaagaccuaaggucagggaccaggaaggacggauuaauuauuacuggacucuucuggagccaggugauaccaucauauuugaggcaaacggcaauuugauugccccgugguaugcuuucgcccucucucgcggguuuggauccggcaucauuacaagcaacgcgcccauggacgaaugugaugcaaagugccagaccccucaaggugccaucaauucgucucugccauuccagaacgugcaccccgugacgaucggggaguguccuaaauacgucagauccgcuaaguuaaggaugguuacuggacugcggaauauuccaucaauacagagucgcggccucuuuggcgccaucgcaggguucauugaaggagguuggacaggcaugguggacgggugguauggauaccaucaccagaacgagcaaggcagcgguuacgcugccgaucagaaauccacccagaaugcgaucaacgggauaacuaauaagguaaacucugugauugaaaagaugaauacacaguuuaccgccgucggcaaagaguucaacaaacuugagcgaagaauggaaaaucugaacaagaagguggacgauggauucuuggacaucuggacguauaacgcagagcuacugguucuccuggaaaaugagaggacccuugacuuucacgauagcaacgugaaaaaucuguacgaaaaggucaaaucacaauugaagaacaaugcuaaagagaucggcaacgggugcuucgaguuuuaucauaaguguaauaacgaaugcauggagagugugaagaauggaacauacgacuaucccaaauacuccgaagagagcaagcucaaccgggagaaaauugaugguguaaagcuggacucuaugggcguuuaucagaucuuagccauuuacucaacuguggcuaguagccugguccuacucgugucccugggggccauaucuuucuggaugugcucgaauggaagccuucagugucguaucugcauuuga

SEQ ID NO: 128531 - RNA, 1701 nt, Artificial Sequence
  derived and/or modified CDS sequence (opt3) from hemagglutinin__InfluenzaA__ABB86877
augaaggccauccugcucauucuucuguacaccuucacagcuacuaacgcagacacguugugcauaggcuaucacgccaauaacagcaccgauacaguggacacugucuuagagaaaaauguuaccgugacacauuccguaaaccugcuagaagauagacacaaugggaagcucuguaaccugggagguaucgcgccccuuuaccugggcaauugcaacauugcugggugguugcucggaaauccugagugugaacugcuguuuaccgugucuucauggaguuauaucgucgagacuagcaacuccgacaauggcacaugcuacccaggugauuucauuaacuaugaagaacucagggagcaguuaucuucgaugucaagcuacgaacgguuugagaucuucccgaaagaaaguuccuggcccaaucaugagaccaaccgcggggugacggccgcauguccuuaugccggagcuaauucuuuuuaccgaaaccugauauggcuuguuaagaaaggcaacagcuacccaaagaucaauaaguccuaugugaacaauaaagagaaggaagucuuggugcuguggggcauucaccaucccccuacuucagcagaccaacagagucuauaccagaacgccgaugcuuauguaagcguugagucuuccaaauacaauaagaaauucaagccagaaaucgccacccgucccaaggugagagggcaggcgggaaggaugaacuauuacuggacacucgucgagccuggugacacuauuaccuuugaagcaacaggcaaucugguggugccacgguaugccuucgcuaugaaccgcgggucaggaagcggcaucauaauuagugauaccccgguccacgacugcaauacgacuugucaaacacccaaaggugccaucaacaccucucuuccuuuucagaauguucacccagugacuauuggggagugccccaaguacguaaaauccacaaagcugagaauggcaaccggauugaggaacaucccuagcauccagucgcggggccucuucgaggcuauugccggcuuuauagaagggggauggacggguaugaucgauggcugguacggguaucaucaccagaaugagcaaggaucuggcuacgcggccgaccgcaaauccacccagaacgcaauugaugguaucacaaauaaggugaacucagucauagagaaaaugaacacucaguucaccgcuguggggaaggaguuuaaucaucuggaaaagcgaauugagaacuuaaauaaaaagguugacgacggcuuccuggauguguggacauauaacgccgagcuccuuguccuguuggaaaaugagagaacucuagacuuccacgauaguaacgugaaaaaucuguacgaaaagguaaggagccagcuccggaacaaugcuaaagagaucggaaacggcuguuuugaguucuaucacaagugcgacgauaccuguauggaauccguucguaaugggacauacgacuaucugaaguacucugaggaaagcaaacuuaaccgcgagaagaucgaaggagugaaacuggauucagccagaauuuaccaaaucuuggcaauuuauaguaccgucgccuccagccucgugcuguuagucucucugggugcuauaucauuuuggaugugcaguaauggcagccuacagugcaggaucuguauuuga

SEQ ID NO: 128532 - RNA, 1701 nt, Artificial Sequence
  derived and/or modified CDS sequence (opt3) from hemagglutinin__InfluenzaA__ABB86887
augaaggccauccugcucauucuucuguacaccuucacagcuacuaacgcagacacguugugcauaggcuaucacgccaauaacagcaccgauacaguggacacugucuuagagaaaaauguuaccgugacacauuccguaaaccugcuagaagauagacacaaugggaagcucuguaaccugggagguaucgcgccccuuuaccugggcaauugcaacauugcugggugguugcucggaaauccugagugugaacugcuguuuaccgugucuucauggaguuauaucgucgagacuagcaacuccgacaauggcacaugcuacccaggugauuucauuaacuaugaggaacucagggagcaguuaucuucgaugucaagcuacgaacgguuugagaucuucccgaaagaaaguuccuggcccaaucaugagaccaaccgcggggugacggccgcauguccuuaugccggagcuaauucuuuuuaccgaaaccugauauggcuuguuaagaaaggcaacagcuacccaaagaucaauaaguccuaugugaacaauaaagagaaggaagucuuggugcuguggggcauucaccaucccccuacuucagcagaccaacagagucuauaccagaacgccgaugcuuauguaagcguugagucuuccaaauacaauaagaaauucaagccagaaaucgccacccgucccaaggugagagggcaggcgggaaggaugaacuauuacuggacacucgucgagccuggugacacuauuaccuuugaagcaacaggcaaucugguggugccacgguaugccuucgcuaugaaacgcgggucaggaagcggcaucauaauuagugauaccccgguccacgacugcaacacgacuugucaaacacccaagggugccaucaauaccucucuuccuuuucagaacauucacccaguuacuaucggggagugccccaaauacgugaaguccacaaaacugagaauggcaaccggauugaggaauaucccuagcauucagucgcggggccucuucggcgcuauagccggguuuaucgagggagguuggacgggcaugauugaugggugguacggauaucaucaccagaacgaacaaggcucugguuacgcggccgaccgcaaguccacccagaaugcaaucgaugggauaacaaacaaaguaaauucagugauugagaagaugaacacucaguucaccgcugucggcaaggaauuuaaccaucuggagaaacgaaucgaaaauuuaaacaagaaaguggacgacggauuccuggauguuuggacauauaaugccgagcuccuugugcuguuggagaacgaaagaacucuagacuuccacgauaguaaugucaagaaccuguacgagaaagugaggagccagcuccggaauaacgcuaaggaaaucggcaauggguguuuugaguucuaucacaagugcgacgauaccuguauggaauccguacguaacggaacauacgacuaucugaaauacucugaggagagcaaacuuaaucgcgaaaagauugaggguguuaagcuggauucagccagaaucuaccaaauuuuggcaauauauaguaccguggccuccagccucguccuguuagugucucugggcgcuaucucauuuuggaugugcaguaacgggagccuacagugcaggauuuguaucuga

SEQ ID NO: 128533 - RNA, 1698 nt, Artificial Sequence
  derived and/or modified CDS sequence (opt3) from hemagglutinin__InfluenzaA__ABB86899
augaaggugaaacugcucauccuucugugcaccuucacagccacuuacgcugacacgauuuguauaggcuaucacgcaaacaauagcaccgauacagucgacacuguuuuggagaagaacgugaccguaacacauuccgugaauuuacuggaagauucucacaacgggaaacuaugccuccugaagggaaucgcgccccuucagcuggguaauuguucagucgccggcuggauuuuggggaacccugagugcgaacuccugaucaguaaagagagcugguccuacauuguggaaaccccaaauccggagaacggagcuuguuaucccggccauuuugccgacuacgaggaacugagagagcaacucucuucgguuagcucauucgaaagguuugagaucuucccuaaggagaguuccuggccaaaucacacuauaacaggugugucugcaagcugcucccauaacgggaagcggucauuuuaucgcaauuuacuguggcuuaccggcaaaaacggauuguaccccaaucugaguaagagcuaugccaacaauaaagaaaaggagguccuaauccucuggggcgugcaccacccuccaaacauuggggaucagcgaacgcuguaccauacugaaaacgcuuacguaucuguuguguccucacacuauagccguagauucacccccgagaucacaaaaaggccuaagguccgggaccaggaaggacgcauuaauuacuauuggacucuucuggagccaggugauaccaucauauuugaggcaaacggcaauuugauugccccgugguacgcuuucgcccucaguagaggguuuggaucuggcaucauuacauccaacgcgcccauggacgaaugugaugcaaagugccagaccccucaaggugccaucaauagcucgcugccauuccagaacgugcaucccgugacgaucggggaguguccuaaauaugucaggucugcuaaguuacggaugguuacuggacugcgcaauauuccauccauacagucacgaggccucuuuggcgccaucgcaggguucauugaaggagguuggacaggcaugguggacgggugguacggauaucaccaccagaacgagcaaggcagugguuacgcugccgaucagaaaagcacccagaaugcgaucaacgggauaacuaauaagguaaacuccgugauugaaaagaugaauacacaguuuaccgccgucggcaaagaguucucuaaacuugagagaaggauggaaaaccugaauaagaagguggacgauggauucuuggacaucuggacguacaacgcagagcuacugguucuccuggaaaacgagcggacccuugacuuucaugauagcaaugugaaaaaccuguaugaaaaggucaaaggccaauugaagaauaacgcuaaagagaucgggaauggaugcuucgaguuuuaccacaaguguaacaaugaaugcauggagucagugaagaacgguacauaugacuaccccaaauauagugaagaguccaagcucaaucgugagaaaauugauggcguaaagcuggacagcauggggguuuaccagaucuuagccauuuauucuacuguggcuucaagucugauacuacucgucagccugggagccaucuccuucuggaugugcucuaacggcucgcuucagugucgcauuugcaucuga

SEQ ID NO: 128534 - RNA, 1701 nt, Artificial Sequence
  derived and/or modified CDS sequence (opt3) from hemagglutinin__InfluenzaA__ABB86907
augaaggccauccugcucgugcuucuguacaccuucacaagcacuaacgcugacacguugugcauuggcuaucacgcaaauaacuccaccgauacagucgacacuguuuuagagaaaaaugugaccguaacacauucugugaaccugcuagaagauaagcacaaugggaaacucuguagacugggagguauagcuccccuucaucugggcaagugcaacaucgcggggugguugcucggaaauccugagugugaccugcugcucaccgucucaaguuggagcuacauuguggaaacuuccaacucuuauaauggcacaugcuacccaggugauuuuaccaacuaugaggaauuaagggagcagcugucgucaguuagcaguuucgagcgguuugaaaucuucccgaaagccuccucuuggcccaaucacgagacgaaccgcggggugacugccgcauguccucaugccggaaccaauagcuuuuaccgaaaccuuauuugguuggucaagaagggcaauacauauccaaaacuguccaagucauacgugaacaacaaaggcaaggaaguucuaguacucugggggauccaccaccccaguacuagcaccgaccaacagucucuguaccagaaugcugauacauauguguucgucggaaccuccaaauacaacaagaaguuuaaaccugagauagcagugcguccaaaggugaaagaccaggccgguagaaugaauuauuacuggacgcuugucgagcccggcgauacuaucacauucgaagcuaccgggaaccugguugugccuagguaugccuuugcgaugaaucggggacauggcucagguauuaucauuagcgacacuccaguacacgauugcaacacaaccugucaaacgccgaagggggcaaucaauaccaguuugcccuuccagaacgugcauccugucacaauaggaaaaugcccaaaguacgugaaaucuacucgccucagaauggccaccggccugaggaauauucccuccauccagagccggggcuuauuuggggcuauugccggauucaucgaggguggcuggacagggaugaucgacggaugguauggcuaccaccaccagaacggucaagggucgggcuacgcagcugaucagaagucuacucagaaugccauugacggaauaaccaacaagguuaauuccgugaucgaaaagaugaacacacaguuuaccgcggucggcaaagaguucaaucaucuggaaaaacgcauugagaaccucaacaagaaaguggacgauggguuccuugacguauggacuuauaaugccgagcuguugguucuacuggaaaacgagcgaacgcucgauuuucacgacucaaaugugaagaaccuguacgaaaaggucagaaggcaacuuaaaaauaacgcaaaggagaucggaaaugguuguuucgaauuuuaucauaacugcgaugacgcuuguauggagagugugaaaaauggcacauacgauuauccuaaguacagcgaggaaucccggcugaaccgugaggaaauaaaugggauuaaauuggacucuacccgcaucuaucagauccucgccauuuacagcacugucgcuucaaguuccgugcuguuaguuagccugggagccaucucuuucuggaugugcucaaacggcagucuacagugcagaauuuguauauga

SEQ ID NO: 128535 - RNA, 1698 nt, Artificial Sequence
  derived and/or modified CDS sequence (opt3) from hemagglutinin__InfluenzaA__ABB86917
augaaggugaaacugcucauccuucugugcaccuucacagccacuuacgcugaccccauuuguauaggcuaucacgcaaacaauagcacggauaccgucgacacaguuuuggagaagaacguggccguaacucauuccgugaauuuacuggaagauucucacaacgggaaacuaugccuccugaagggaaucgcgccucuucagcuggguaauuguucagucgcuggcuggauuuuggggaacccagagugcgaacuccugaucaguaaagagagcugguccuacauuguggaaaccccgaaucccgagaacggagccuguuauccuggcuacuuugcagacuaugaggaacugagagagcaacucucuucgguuagcucauucgaaagguuugagaucuucccaaaggagaguuccuggcccaaucauacagugaccggugucucugccagcugcucccacaacgggaagucaaguuuuuaccggaauuuacuguggcuuacuggcaaaaacggauuguauccuaaucugagcaagucuuacgcuaacaauaaagaaaaggaggugcuaauacucuggggcguacaucacccacccaacaucggggaucagcgcacacuguaccacaccgaaaacgcauauguuuccguggucucaagccauuacagucgacguuucacgccugagauuacuaaaagaccaaaggugagggaccaggaaggacggaucaauuauuacuggacccuucuggagccgggugauacaauuaucuuugaggccaacggcaauuugauagcucccugguaugccuucgcgcucucucgcggguuuggauccggcauuaucacuagcaacgcaccuauggacgaaugugaugccaagugccagaccccacaaggugcuauuaauucgucucugcccuuccagaacgugcacccugucacaaucggggaguguccaaaauacguuagauccgccaaguuaaggauggugaccggacugcggaauauccccucaauucagagucgcggccucuuuggcgcaauagcuggguucaucgaaggagguuggacgggcaugguagacgggugguauggauaccaucaccagaacgagcaaggcagcgguuacgccgcggaucagaaauccacucagaaugccauuaacgggaucacaaauaaggugaacucugucauagaaaagaugaauacccaguuuacugcagugggcaaagaguucaacaaacuugagcgaagaauggaaaaucugaacaagaagguugacgauggauucuuggacauuuggacauauaacgcugagcuacuggugcuccuggaaaaugagaggacccuugacuuucacgauagcaacgucaaaaaucuguacgaaaaggugaaaucacaauugaagaacaaugccaaagagaucggcaacgggugcuucgaguuuuaucauaaguguaauaacgaaugcauggagaguguaaagaauggaacguacgacuauccgaaauacuccgaagagagcaagcucaaccgggagaaaaucgaugguguuaagcuggacucuaugggcguguaucagauuuuagcuaucuacucaaccgucgccaguagccuggugcuacucgucucccugggggcaauuucuuucuggaugugcucgaauggaagccuucagugucguauaugcaucuga

SEQ ID NO: 128536 - RNA, 1698 nt, Artificial Sequence
  derived and/or modified CDS sequence (opt3) from hemagglutinin__InfluenzaA__ABB86929
augaaggugaaacugcucauccuucuguacaccuucacagccacuuaugcugacacgauuugcauaggcuaccacgcaaacaauagcaccgauacagucgacacuguuuuggagaagaacgugaccguaacacauuccgugaauuuacuggaagauucucacaacgggaaacuaugucuccugaagggaaucgcgccccuucagcuggguaauugcucagucgccggcuggauuuuggggaacccugagugugaacuccugaucaguaaagagagcugguccuauauuguggaaaccccaaauccggagaacggagcuugcuaccccggccauuuugccgacuaugaggaacugagagagcaacucucuucgguuagcucauucgaaagguuugagaucuucccuaaggagaguuccuggccaaaucacacuauaacaggugugucugcaagcuguucccauaacgggaagcggucauuuuaccgcaauuuacuguggcuuaccggcaaaaacggauuguaucccaaucugaguaagagcuacgccaacaauaaagaaaaggagguccuaauccucuggggcgugcaccacccuccaaacauuggggaucagcgaacgcuguaccauacugaaaacgcuuauguaucuguuguguccucacacuacagccguagauucacccccgagaucacaaaaaggccuaagguccgggaccaggaaggacgcauuaauuauuacuggacucuucuggagccaggugauaccaucauauuugaggcaaacggcaauuugauugccccgugguaugcuuucgcccucaguagaggguuuggaucuggcaucauuacauccaacgcgcccauggacgaaugcgaugcaaagugucagaccccucaaggugccaucaauagcucgcugccauuccagaacgugcaucccgugacgaucggggagugcccuaaauacgucaggucugcuaaguuacggaugguuacuggacugcgcaauauuccauccauacagucacgaggccucuuuggcgccaucgcaggguucauugaaggagguuggacaggcaugguggacgggugguauggauaccaccaccagaacgagcaaggcagugguuacgcugccgaucagaaaagcacccagaaugcgaucaacgggauaacuaauaagguaaacuccgugauugaaaagaugaauacacaguuuaccgccgucggcaaagaguucucuaaacuugagagaaggauggaaaaccugaauaagaagguggacgauggauucuuggacaucuggacguauaacgcagagcuacugguucuccuggaaaacgagcggacccuugacuuucaugauagcaaugugaaaaaccuguacgaaaaggucaaaggccaauugaagaauaacgcuaaagagaucgggaauggauguuucgaguuuuaucacaagugcaacaaugaauguauggagucagugaagaacgguacauacgacuaucccaaauacagugaagaguccaagcucaaucgugagaaaauugauggcguaaagcuggacagcauggggguuuaucagaucuuagccauuuacucuacuguggcuucaagucugauacuacucgucagccugggagccaucuccuucuggaugugcucuaacggcucgcuucagugccgcauuuguaucuga

SEQ ID NO: 128537 - RNA, 1701 nt, Artificial Sequence
  derived and/or modified CDS sequence (opt3) from hemagglutinin__InfluenzaA__ABB86937
augaaggccauccugcucgugcuucuguacaccuucacaagcacuaacgcugacacguugugcauuggcuaucacgcaaauaacuccaccgauacagucgacacuguuuuagagaaaaaugugaccguaacacauucugugaaccugcuagaagauaagcacaaugggagacucuguaaacugggagguauagcgccccuucaucugggcaagugcaacaucgccgggugguugcucggaaauccugagugugaacugcuguuuaccgucucaaguuggagcuacauuguggagacuuccaacucuuauaauggcacaugcuacccaggugacuucaucaacuaugaagaacucagggagcaguuaucgucaguuagcaguuuugaacgguucgagauuuuuccgaaggcuuccucuuggcccaaucacgaaaccaaccgcggggugacggccgcauguccucaugccggaacuaauagcuucuaccgaaaccugaucuggcuugucaagaagggcaauaccuauccaaaaauauccaagucauacgugaacaacaaaggcaaggagguauugguucugugggggauccaccaccccaguacaagcaaugaucaacagucucuauaccagaacgcugacacuuauguguuugucggaccuuccaaauacaauaagaaguucaaaccagagauugcaacccgucccaaggugagagaucaggccgguaggaugaacuauuacuggacacucguggaaccuggcgacaccaucacguuugaggcuacugggaaucuggucguuccacgguaugccuucgcgaugaaccgcggaucagaaagcggcauuaucauaagugauacaccggugcaugacugcaauaccacuugucaaacacccaaaggugcaauuaacaccucucuuccuuuucagaauguacacccagugacgaucggggagugccccaaguacgucaaauccaccagacugaggauggccacaggauugcggaacauuccuagcauccagucgcgcggccucuucggcgcuaucgccggguuuauugaagagggauggacugguaugauagauggcugguauggguaccaucaccagaauggacaaggcucugguuacgcagcugaccagaaguccacccagaacgccaucgaugggauuacaaauaaagugaacucaguuaucgagaagaugaauacucaguucaccgcggugggcaaggaguucaaccaccuggagaaacgaauagaaaacuuaaauaagaaagucgacgacggauuucuggauguguggacauauaacgccgagcuccuuguacuguuggaaaaugagagaacccuagacuuccaugauaguaacguuaagaaucuguacgagaaagugaggcggcaacucaagaacaaugcaaaggaaauuggcaacggguguuuugaguucuaucacaaaugcgacgaugcuuguauggaaagcgucaagaauggaacuuacgacuauccaaaauacuccgaggaaucucgucugaaccgcgaggagaucaaugguaucaaacuugauagcacgagaauuuaucagauccuggccauuuacucaacaguggcuaguuccagcgucuugcucgugucucugggcgccauaucauuuuggaugugcaguaacgggagcuuacagugcaggaucuguauuuga

SEQ ID NO: 128538 - RNA, 1701 nt, Artificial Sequence
  derived and/or modified CDS sequence (opt3) from hemagglutinin__InfluenzaA__ABB86946
augaaggccauccugcucgugcuucuguacaccuucacagcugcaaacgccgacacuuugugcauuggcuaucacgcgaauaacagcacggauaccgucgacacaguuuuagagaaaaaugugacuguaacccauuccgugaaccugcuagaagauagacacaaugggaagcucuguaaacugaggggaauagcuccccuucaucuggguaagugcaacaucgccggcugguugcucgggaauccugagugugaaucucugucaacagucaguagcugguccuacauuguggagaccucuaacucggacaauggaacuugcuauccaggcgauuuuaucaacuacgaagaacugcgggagcagcucucaagcguuaguuccuucgaacgcuuugagauuuucccgaaagcaucuagcuggcccaaucacgaaacaaaccgagguaccacggccgcuuguccuuaugcaggggccaauuccuuuuaccguaacuuaaucuggcuggugaagaagggaaauucauauccaaaacuuaacaagaguuacgucaacaauaaaggcaaggagguguugguacuguggggcauacaucaccccagcacuucuaacgagcaacagucccuauaccagaaugcugacaccuauguuuucguggggucaagcaaauacaacaagaaguuuaaaccugaaaucgccacaagaccaaaggucagggaucaggcgggacggaugaauuauuacuggacucucauugagcccggugacaccaucacauucgaagcaaccggcaaccugguggugccucgcuaugccuuugcuaugaauagagggaguggaucuggcauuaucauauccgauacgccaguccacgacugcaacacuacaugucaaaccccgaaaggugccauuaauacuagccuucccuuccagaacguucauccugugacaaucggggagugcccaaaguacguaaaaucgaccaagcugaggauggcaacgggauugcggaauauucccucuauccagucccgcggccucuuuggcgcuaucgccggguucauugaaggagguuggaccggcaugauagaugggugguauggauaccaccaucagaacgagcaaggcucagguuacgcggccgaccagaaaaguacacagaaugcaaucgaugggauuacuaacaaggugaauagcgucaucgagaagaugaacacccaguuuacagcugugggcaaagaguucaaccaccuggagaagcgaauagaaaauuuaaacaaaaagguugacgacggauuccuggauguguggacuuauaaugccgagcuccuuguccuguuggaaaacgagagaacccuagacuuucacgauuccaaugugaaaaaccuguacgagaagguaaggucucaacucaagaauaacgcuaaagaaauuggcaauggguguuucgaguuuuaucauaagugcgacgaugccuguauggaaagcguuaaaaacggaacauacgacuauccuaaguacucagaggaaagucggcugaaucgugaggagaucgaugguaucaaacuugacuccacccgcauuuaucagauccuggcaauuuacagcacuguggccucuucaagugucuugcucgugagccugggcgcuauauccuucuggaugugcucuaacgggucguuacagugcagaaucuguauuuga

SEQ ID NO: 128539 - RNA, 1701 nt, Artificial Sequence
  derived and/or modified CDS sequence (opt3) from hemagglutinin__InfluenzaA__ABB96319
augaagaccaucauugcccugagcuacauauucugccagguguuugcucaaaaccuccccggcaaugacaacuccacagcaacucuuugucuggggcaccaugccgucccuaauggaacguugguuaaaaccaucacaaacgaucagauugaggugacuaaugcgaccgaauuaguacagucuucaaguacagguagaaucugcgacaacccacacaggauucuggauggcaagaauuguacccuaaucgacgcucuccugggggauccgcauugcgacggauuccagaacgagaaaugggaucuuuuuguggaacggagcaaggccuucuccaauuguuaucccuacgacgucccugauuaugcaucucugcgcucguugguggccucaagcggcacucucgaguuuuucaacgaagguuuuaauuggacagggguuacccaaaacggaggcaguuacgcuugcaaacgaggcccagacaauuccuucuuuucucgucugaacuggcuguauaagagcgaguccacguaccccgugcucaaugucacuaugccuaacaacgauaauuucgacaaguuauauauauggggagugcaccauccaucaaccgauaaagagcagacaaaccuguacguacaggcaagugggagaguuacugugagcaccaagaggucucagcaaacaaucauucccaaugucgguccucggccaugggugcgcggccuuuccucaagaaucagcauuuacuggaccaucgugaaaccgggggacgucuugcugauaaacaguaauggaaaccuaauugcccccaggggcuauuuuaagauccggacggguaaaucuuccauuaugcgcagcgacgcuccuaucgggacuuguucgucugaaugcaucacaccaaauggauccauucccaacgauaagccuuuccagaauguuaacaagauaaccuacggcgccuguccaaaauaugugaagcagaauacucucaaacuggcgacaggcaugcgaaacguacccgagaagcagaccagagggaucuuuggagcaauugccgguuucaucgaaaauggcugggaggggaugauagacggaugguacggcuucaggcaccaaaacucagaggguacggggcaggcugccgaucuuaaaaguacccaggcagcuauugaccaaaucaauggcaagcugaaccgggugaucgagaaaacaaacgaaaaguuucaccagauugaaaaggaguucagcgaagucgagggacguauccaggauuuggagaaauauguggaagacacuaagauugaucucugguccuacaaugccgagcuguuaguugcgcuggaaaaccagcauaccauagaccucacagauucugagaugaauaaacuuuuugaaaagacucgcagacaacugagggagaacgccgaggacaugggcaaugggugcuucaaaaucuaucacaagugugauaacgcaugcauuggaagcauccggaaugguaccuacgaccaugacguguaccgagaugaggcuuugaacaaucgcuuucagaucaagggcgucgaacuaaaaucaggguauaaggacuggauucuguggauaaguuucgccaucuccugcuuucuccugugugugguacuucugggauucauuaugugggcuugccagaaaggcaacaucagauguaauauuugcaucuga

SEQ ID NO: 128540 - RNA, 1701 nt, Artificial Sequence
  derived and/or modified CDS sequence (opt3) from hemagglutinin__InfluenzaA__ABB96330
augaagaccaucauugcccugagcuacauauucugccagguguuugcucaaaaccuccccggcaaugacaacuccacagcaacucuuugucuggggcaccaugccgucccuaauggaacguugguuaaaaccaucacaaacgaucagauugaggugacuaaugcgaccgaauuaguacagucuucaaguacagguagaaucugcgacaacccacacaggauucuggauggcaagaauuguacccuaaucgacgcucuccugggggauccgcauugcgacggauuccagaacgagaaaugggaucuuuuuguggaacggagcaaggccuucuccaauuguuaucccuacgacgucccugauuaugcaucucugcgcucguugguggccucaagcggcacucucgaguuuuucaacgaagguuuuaauuggacagggguuacccaaaacggaggcaguuacgcuugcaaacgaggcccagacaauuccuucuuuucucgucugaacuggcuguauaagagcgaguccacguaccccgugcucaaugucacuaugccuaacaacgauaauuucgacaaguuauauauauggggagugcaccauccaucaaccgauaaagagcagacaaaccuguacguacaggcaagugggagaguuacugugagcaccaagaggucucagcaaacaaucauucccaaugucgguucccggccuugggugcgcggccuuucaagcagaaucaguauuuacuggaccaucgugaaaccaggggacgucuugcugauaaacucuaauggaaaccuaauugccccgaggggcuauuuuaagauccggacggguaaauccagcauuaugcgcucggacgcucccaucgggacuuguucuuccgaaugcaucacaccuaauggaucaauuccaaacgaucgacccuuccagaauguuaacaagauaaccuacggcgccuguccuaaguaugugaaacagaauacucucaagcuggcgacaggcaugagaaacguaccagagaaacagaccagggggaucuuuggagcaauugccgguuucaucgaaaauggcugggaggggaugguggacggaugguacggcuuccggcaccaaaacagugaggguacggggcaggcugccgaucuuaagagcacccaggcagcuauagaccaaauuaauggcaaacugaaccgugucaucgaaaagacaaacgagaaauuucaccagaucgaaaaggaguucuccgaaguggagggacgcauucagaauuuggagaaguauguugaagauacuaaaaucgaccucuggucuuacaacgccgagcuguuaguggcgcuggaaaaucagcauaccauugaucucacagacagcgagaugaacaaacuuuuugaaaagacuagaaggcaacugcgggagaaugccgaggauaugggcaacgggugcuucaagauauaucacaaaugugacaaugcaugcaucggaucaauucgaaacgguaccuacgaucaugacgucuaccgcgacgaggcuuugaauaacagauuucagaucaagggcguggaacuaaagaguggguauaaagauuggauccuguggauuuccuucgccauaagcugcuuucuccuguguguaguucuucugggauucaucaugugggcuugccagaagggcaauauuagguguaacaucugcauuuga

SEQ ID NO: 128541 - RNA, 1701 nt, Artificial Sequence
  derived and/or modified CDS sequence (opt3) from hemagglutinin__InfluenzaA__ABB96341
augaagaccaucauugcccugagcuacauauucugccagguguuugcucaaaaccuccccggcaaugacaacuccacagcaacucuuugucuggggcaccaugccgucccuaauggaacguugguuaaaaccaucacaaacgaucagauugaggugacuaaugcgaccgaauuaguacagucuucaaguacagguagaaucugcgacaacccacacaggauucuggauggcaagaauuguacccuaaucgacgcucuccugggggauccgcauugcgacggauuccagaacgagaaaugggaucuuuuuguggaacggagcaaggccuucuccaauuguuaucccuacgacgucccugauuaugcaucucugcgcucguugguggccucaagcggcacucucgaguuuuucaacgaagguuuuaauuggacagggguuacccaaaacggaggcaguuacgcuugcaaaaagggcccagacaauuccuucuuuucucgacugaacuggcuguauaagagcgaguccacguaccccgugcucaaugucacuaugccuaacaacgauaauuucgacaaauuauauauauggggagugcaccauccaucaaccgauaaggagcagacaaaccuguacguacaggcaagugggcguguuacugugagcaccaaaagaucucagcaaacaaucauucccaaugucgguuccaggccuugggugcggggccuuucaagccgcaucaguauuuacuggaccaucgugaagccaggggacgucuugcugauaaacucuaauggaaaccuaauugccccgagaggcuauuuuaaaaucaggacggguaaguccagcauuaugcggucggacgcucccaucgggacuuguucuuccgaaugcaucacaccuaauggaucaauuccaaacgauaagcccuuccagaauguuaacaaaauaaccuacggcgccuguccuaaguaugugaaacagaauacucucaagcuggcgacaggcaugcgcaacguaccagagaaacagacccgagggaucuuuggagcaauugccgguuucaucgaaaauggcugggaggggaugauagacggaugguacggcuucagacaccaaaacagugaggguacggggcaggcugccgaucuuaagagcacccaggcagcuauugaccaaaucaauggcaaacugaacagggugaucgaaaagacaaacgagaaguuucaccagauugaaaaagaguucuccgaagucgagggacggauccaggauuuggagaaguauguggaagacacuaaaauugaucucuggucuuacaaugccgagcuguuaguugcgcuggaaaaccagcauaccauagaccucacagauagcgagaugaauaaacuuuuugaaaagacucgucgccaacugagagagaacgccgaggacaugggcaaugggugcuucaagaucuaucacaagugugauaacgcaugcauuggaucaaucaggaaugguaccuacgaccaugacguguaccgggaugaggcuuugaacaaucgauuucagaucaaaggcgucgaacuaaagaguggguauaaagacuggauucuguggauauccuucgccaucagcugcuuucuccugugugugguacuucugggauucauuaugugggcuugccagaagggcaacauccgcuguaauauuugcaucuga

SEQ ID NO: 128542 - RNA, 1701 nt, Artificial Sequence
  derived and/or modified CDS sequence (opt3) from hemagglutinin__InfluenzaA__ABB96395
augaagaccaucauugcccugagcuacauauucugccagguguuugcucaaaaccuccccggcaaugacaacuccacagcaacucuuugucuggggcaccaugccgucccuaauggaacguugguuaaaaccaucacaaacgaucagauugaggugacuaaugcgaccgaauuaguacagucuucaaguacagguagaaucugcgacagcccacacaggauucuggauggcaagaacuguacccuaauggacgcucuccugggggauccgcauugcgacggauuccagaaugagaaaugggaucuuuuuguggaacgguccaaggccuucucuaacuguuaucccuacgacgucccugauuaugcaucgcugcgcucauugguggccagcaguggcacucucgaguuuaucaaugaagguuucaacuggacagggguuacccaaaauggaggcuccuacgcuugcaaacgaggcccagacaacagcuuuuucucucgucugaauuggcuguauaaguccgagucaacguaccccgugcucaacgucacuaugccuaauaacgauaacuuugacaaguuauauauauggggagugcaccauccaaguaccgauaaagagcagacaaaucuguacguacaggcaagcgggagaguuacugugucuaccaagaggucccagcaaacaaucauucccaacgucgguucacggccuugggugcgcggccuuagcaguagaaucucuauuuacuggaccaucgugaaaccaggggacauauugcugauuaauuccaacggaaaucuaaucgccccgaggggcuauuucaagauucggacggguaaaagcucgaucaugcgcucugacgcucccaucgggacuuguuccucagaaugcauuacaccuaacggaaguauaccaaaugauaagcccuuucagaacgucaauaagaucaccuacggcgccuguccuaaauauguuaagcagaacacucucaaacuggcgacaggcaugcgaaaugugccagagaagcagaccagagggauuuucggagcaaucgccgguuuuauagaaaacggcugggaggggaugauugacggaugguacggcuucaggcaccaaaauagcgaggguacggggcaggcugccgaucuuaaauccacccaggcagcuaucgaccaaaucaacggcaagcugaaucggguaauugaacguacaaacgagaaauuccaccagaucgaaaaggaguuuucugaaguggagggacgcauucaggauuuggagaaguaugucgaagacacuaaaauagaucucuggagcuacaacgccgagcuguuaguggcgcuggaaaaucagcauaccaucgaccucacagauucagagaugaacaaacuuuucgaaaagacuagaaggcaacugcgggagaaugccgaggacaugggcaacgggugcuuuaagauuuaucacaaaugugauaaugcaugcaucggaaguauccgaaacgguaccuacgaccaugacguuuaccgcgaugaggcuuugaauaacagauuccagauuaagggcguggaacuaaaguccggguauaaagacuggauacuguggaucagcuuugccauuucuugcuuccuccugugugucgugcuucugggauuuaucaugugggcuugccagaagggcaauauuagguguaacaucugcauauga

SEQ ID NO: 128543 - RNA, 1698 nt, Artificial Sequence
  derived and/or modified CDS sequence (opt3) from hemagglutinin__InfluenzaA__ABB96487
augaaggugaaacugcucauccuucugugcaccuucacagccacuuacgcugacacgauuuguauaggcuaucacgcaaacaauagcaccgauacagucgacacuguuuuggagaagaacgugaccguaacacauuccgugaauuuacuggaagauucucacaacgggaaacuaugccuccugaagggaaucgcgccccuucagcuggguaauuguucagucgccggcuggauuuuggggaacccugagugcgaacuccugaucaguaaagagagcugguccuacauuguggaaaccccaaauccggagaacggagcuuguuaucccggcuacuuugccgacuaugaggaacugagagagcaacucucuucgguuucaucuuucgaaagguuugagaucuucccuaagaagaguuccuggccaaaucauacugugacaggugucucugcaagcugcucccacgaugggaaaucaaguuuuuaccggaacuuacuguggcuuaccggaaagaauggcuuguaucccaaccugagcaaaucuuacgccaauaacaaggagaaagaagugcuaauacucuggggcguacaucacccuccaaauaucggggaccagcgcacgcuguaccacacugagaacgcuuauguuuccguggucucaagccauuacagucgacguuucacccccgaaauuacaaagagaccuaaggugagggaucaggagggacggaucaacuauuacuggacucuucuggaaccaggugacaccauuaucuuugaggcaaauggcaacuugauagccccgugguaugcuuucgcccucucucgcggguuuggauccggcauuaucacaagcaaugcgcccauggaugagugugacgcaaaaugccagaccccucaaggugccauuaacucgucucugccauuccagaaugugcaccccgucacgaucggggaauguccuaaguacguuagauccgcuaaauuaaggauggugacuggacugcggaacaucccaucaauucagagucgcggccucuuuggcgccauagcaggguucaucgagggagguuggacaggcaugguagaugggugguauggauaccaucaccagaaugaacaaggcagcgguuacgcugccgaccagaaguccacccagaacgcgauuaaugggaucacuaacaaagugaauagcgucauagagaagaugaacacacaguuuaccgccgugggcaaagaguucaauaaacuugaacgaagaauggagaaccugaauaagaaaguugaugacggauucuuggacauuuggacguauaacgcagaacuacuggugcuccuggagaacgaaaggacccuugauuuucacgacagcaaugucaagaaccuguacgagaaagugaagucacaauugaaaaauaacgcuaaggaaaucggcaaugggugcuucgaguuuuaucauaaguguaacaaugagugcauggaaaguguaaagaacggaacauacgauuaucccaaguacuccgaggaaagcaaacucaaucgggagaagaucgacgguguuaaacuggauucuaugggcguguaucagauuuuagccaucuacucaacugucgcuaguagccuggugcuacucgucucccugggggccauuucuuucuggaugugcucgaacggaagccuucagugucguauaugcaucuga

SEQ ID NO: 128544 - RNA, 1701 nt, Artificial Sequence
  derived and/or modified CDS sequence (opt3) from hemagglutinin__InfluenzaA__ABB96520
augaagaccaucauugcccugagcuacauauucugccucgcucuuggccaggaccugcccgggaacggaaauuccacagcaacuuuguguuuaggucaccaugccgugccuaacggcacgcuggucaaaaccaucacagaugaccaaauugagguuacuaaugcgaccgagcuagugcagucuucaaguacagggaagaucugcaacaauccacacaggauucucgauggaaucgacuguacccugauagaugcucugcugggcgacccgcauugcgauguauuucagaacgaaacuugggacuuguucguggaaagaagcaaagccuuuuccaauuguuaucccuacgaugucccugacuaugcaucucuccggucgcugguggccucaagcgguacacuggaguucaucaccgaaggguuuacguggacuggaguuacccagaacggcggcaguaaugcuugcaagcgcgggccaggauccgguuucuuuucucgacucaacugguuaacaaaaagcggcuccacuuaccccgugcugaaugucaccaugccuaacaaugauaacuucgacaaacuuuauauuuggggagugcaccauccaucaacagaucaagagcagaccaguuuguacguacaggcaagcgggcguguuacggugucuacuagaaggucccagcaaacaaucauucccaauaucggcucacggccuuggguccgcggucugagcaguagaauaucuauuuauuggaccaucgugaagccaggggacgugcuagucauuaacuccaacggaaaucucaucgccccgaggggcuacuuuaagaugcggacuggcaagagcucgaucaugcgcucugacgcucccauugauacauguauauccgagugcaucaccccuaacgggucaauuccaaaugacaaacccuuccagaacguuaauaagaucacguacggagccuguccuaaauaugugaagcagaagacccugaaacuugcgacagguaugcgaaacauaccagaaaagaaaacuagaggcauuuuuggggcaaucgccggauucaucgagaauggcugggaagguaugauugaugggugguacggcuuuaggcaccagaacagugagggaaccggccaagcugccgaccuuaagagcacacaggcagcuaucgaucagauuaaugggaaauugaaccggguaauagagaagacuaaugaaaaauuccaccaaaucgagaaggaguucuccgaaguggaaggacguauucaggaccucgagaaguaugucgaggauaccaaaaucgaccuguggucuuacaacgccgaauuacugguggcgcucgagaaucagcauacaaucgaucuuaccgacagcgaaaugaacaagcuguuugagaaaacucgcagacaguugagggaaaaugccgaggauauggguaacggcugcuucaagauuuaucacaaaugugacaacgcaugcauagagucaauccggaaugggacguacgaccaugauguuuaucgagacgaagcucuaaacaaucgcuuucaaauuaagggaguggagcugaagaguggcuacaaagauuggauccucuggauuuccuucgccaucagcugcuuucugcuuugugucgugcuguuggguuucauaaugugggcuugccagagagggaacaucagguguaauauuugcaucuga

SEQ ID NO: 128545 - RNA, 1701 nt, Artificial Sequence
  derived and/or modified CDS sequence (opt3) from hemagglutinin__InfluenzaA__ABB96531
augaagaccaucauugcccugagcuacauacucugccuuguguccgcucagaaaauccccggcaacgacucuucaacagcaacucuguguuuggggcaccaugccgucccuaauggaacguuaguuaagaccauuacaaacgaucaaaucgaggugacuaaugcgaccgaacugguacagaguagcuccacagguagaauuugcgacucuccacacaggauccuagauggcgagaacuguacccucauagacgcucugcuuggggauccgcauugcgacggauuccagaauaaagaaugggaucuguuuguggagcggucgaaggccuauucaaacuguuaccccuaugacgucccugauuacgcaagccuucgcagucucguggccuccucuggcacucuggaauuuaauaacgagagcuucaauuggacagguguugcucagaacgggaccuccuaugcaugcaaacgacguucaaucaagaguuucuuuagcagacugaauuggcuccaccaauuaaaguacaaauauccagcccugaacgugacgaugcccaauaacgacaaguucgauaaacuuuacauuuggggaguccaucacccuucuacugacuccgaucagaccucauuguacgcucaggccagcggcagggugacaguaaguacuaagcggucucagcaaaccguuaucccaaauauuggcucccgccccugggugagaggggucagcucgaggaucucuauauauuggacaauugugaaaccuggagacauccugcuaauuaacuccaccgguaaccucaucgcgccacggggcuacuuuaagauccgcucagggaagaguagcauuaugcgauccgacgcaccgauaggaaaauguaauucugagugcaucacgcccaacggcagcauuccuaaugauaagccauuccagaacgugaauagaaucacuuauggugccugucccagguacgucaaacagaacacacugaaguuggcuaccgggaugcggaauguuccugaaaaacagacucguggaauauuuggcgccauugcaggcuucaucgagaacgggugggaaggaaugguggacgguugguauggcuuucgccaccaaaauucagaggggacaggacaggcugccgaucugaagaguacccaggcggccaucaaccaaauuaauggcaaauugaacagacucaucgagaagacgaaugaaaaguuccaucagauugagaaagaauuuuccgagguagaagguaggauacaggaccuggagaaguacguggaggauaccaaaaucgacuuauggagcuauaacgcagaacugcucgucgcucuugagaaucagcacacaauugaucugacugacucugaaaugaacaaguuguucgagcggacccgaaaacaacuacgcgaaaacgccgaggauauggggaauggcugcuucaagaucuaccauaagugugacaacgcuugcaucggaucaauuagaaauggcacauacgaucacgacguguauagggacgaggcccugaacaaucgguuucagauaaaagggguugaacucaagaguggauacaaagauuggauccuguggauuagcuucgcaaucuccugcuuucuucuguguguggucuugcucgguuucauuaugugggccugccagaagggcaacauccgcuguaauauaugcaucuga

SEQ ID NO: 128546 - RNA, 1701 nt, Artificial Sequence
  derived and/or modified CDS sequence (opt3) from hemagglutinin__InfluenzaA__ABC02234
augaagaccaucauugcccugagcuacauacucugccuuguguucgcucagaaacugcccggcaacgacaauuccacagcaacuuuguguuuagggcaccaugccgucccuaacggaacgcugguuaagaccaucacaaaugaucaaauugaggugacuaacgcgaccgaauugguacagucuucaaguacagguagaaucugcgacagcccacacaggauucucgauggcgagaauuguacccugaucgacgcccuucugggggauccgcauugcgacggauuucagaacaaagaaugggauuuguucguggagcgguccaaggcuuauucuaauuguuaccccuaugacgucccugauuacgcaucgcuccgcucacugguggccagcaguggcacucuggaauuuaacaaugaguccuucaacuggacagguguugcucagaaugggaccucuuaugcaugcaaacgacguagcauaaaguccuuuuucucaagacucaacugguuacaccaacugaaguacaaauauccagcccuuaaugugacgaugcccaacaaugacaaguuugauaaauuguacaucuggggaguccaucacccuaguacugacagcgaucagaccucucuguacgcucaggccuccggcagggugacaguaucaacuaagauuagccagcaaaccguuaucccaaacauuggcagucggcccugggugcgcggggucucuuccagaaucagcauauauuggacaauugugaaaccuggagacauccuacucauuaacucgaccgguaaucugaucgcgccaaggggcuacuucaagauccggucugggaaguccucaauuaugcgcagugacgcaccgauaggaaaauguaacagcgagugcaucacgcccaauggcuccauuccuaacgauaagccauuucagaaugugaaccgaaucacuuauggugccugucccagauacgucaaacagaauacacuuaagcuggcuaccgggaugaggaacguuccugaaaaacagacucggggaauauucggcgccauugcaggcuuuaucgagaaugggugggaaggaaugguggacgguugguauggcuuccgucaccaaaacucugaggggacaggacaggcugccgaucuaaagagcacccaggcggccaucaaucaaauuaacggcaaacucaaucgccugaucgagaagacgaacgaaaaguuucaucagauugagaaagaguucucagaaguagaagguagaauacaggacuuagagaaguacguggaggauaccaaaaucgaccuguggaguuauaaugcagaacuccuugucgcucuggagaaccagcacacaauugauuugacugacuccgaaaugaacaagcuauucgagaggacccggaaacaacugcgagaaaaugccgaggauauggggaacggcugcuuuaagaucuaccauaagugugacaaugcuugcaucggaagcauucgcaacggcacauacgaucacgacguguauagagacgaggcccucaauaacagguuccagauaaaagggguugaacugaagucuggauacaaagauuggauccuuuggauuucauuugcaaugaguugcuuccuguuuuguguggucuugcucgguuucaucaugugggccugccagaagggcaauauucgguguaacaucugcauauga

SEQ ID NO: 128547 - RNA, 1701 nt, Artificial Sequence
  derived and/or modified CDS sequence (opt3) from hemagglutinin__InfluenzaA__ABC02255
augaagaccaucauugcccugagcuacauauucugccucgugcuugcucaggaccugcccggcaacgauaauuccacagcaacuuuguguuuagggcaccaugccgucccuaacggaacgcugguuaaaaccaucacaaaugaccaaauugaggugacuaacgcgaccgaacugguacagucuucaaguacagguaagaucugcaauaacccacacaggauucucgauggcaucaauuguacccugauagacgcccuucugggggauccgcauugcgacggauuucagaacgagaaaugggauuuguucguggaaagaagcaaggcuuuuuccaauuguuaucccuacgacgucccugauuaugcaucucuccggucgcugguggccucaagcggcacucuggaguucaucaacgaagguuuuaauuggacagggguuacccagaacggaggcaguaaugcuugcaaacgcggcccagacuccggguucuuuucucgacucaacugguuauacaagagcggauccacguaucccgugcugaaugucacuaugccuaacaacgauaauuucgacaaacuuuacauuuggggugugcaccauccaucaaccgaucaagagcagacaaacuuguauguacaggcaaguggccguguuacugugagcaccaagagaucucagcaaacaaucauucccaaugucggguccaggccuugggugcggggacugucaagccgcaucaguauauacuggaccauugugaagccaggcgacauccuagucauuaacucuaaugguaaccucaucgccccgagagggcacuuuaaaaugaggacgggaaaguccagcaucaugcggucggacgcucccauuggcacuuguucuuccgagugcauaacaccuaauggcucaaucccaaacgauaaacccuuccagaauguuaacaagauuaccuacggggccuguccuaaguaugugaaacagaauacucugaaacuugcgacaggaaugcgcaacguaccagaaaagcagacccgagguaucuuuggcgcaauagccggguucauugagaauggaugggaaggcaugaucgacgguugguacggguuuagacaccaaaacagugagggcacgggacaggcugccgaucuaaagagcacccaggcagcuaucgaccaaauuaauggcaaauugaacagggugaucgagaagacaaacgaaaaauuccaucagauugagaaggaguucuccgaagucgaagggcggauacaggaucucgagaaguauguggaggacacuaaaaucgaucuguggucuuacaaugccgaauuacugguugcgcucgagaaccagcacaccauugaccuuacagauagcgaaaugaauaagcuguuugagaaaacucgucgccaauugagagaaaacgccgaggacaugggaaaugguugcuucaagaucuaucauaaaugugauaacgcaugcaucggcucaauuaggaaugggaccuacgaccacgacguguaucgggaugaggcucuaaacaaucgauuucagauaaagggagucgaacugaagaguggcuacaaagacuggauccucuggauuuccuucgccaucagcugcuuucugcuuugugugguacuguuggguuucauuaugugggcuugccagaaggggaacauccgcuguaauauaugcaucuga

SEQ ID NO: 128548 - RNA, 1701 nt, Artificial Sequence
  derived and/or modified CDS sequence (opt3) from hemagglutinin__InfluenzaA__ABC02266
augaagaccaucauugcccugagcuacauauucugccucguguuugcucaggaccuucccggcaacgauaauuccacagcaacucuguguuuggggcaccaugccgucccuaacggaacguuaguuaaaaccaucacaaaugaccaaauugaggugacuaacgcgaccgaacugguacagucuucaaguacagguaagaucugcgauaauccacacaggauucuagacggcaucaacuguacccucauagaugcucugcuuggggacccgcauugcgauggauuccagaaugagaaaugggaccuguuuguggaaagaagcaaggccuucuccaacuguuaucccuacgaugucccugacuaugcaucuuugcggucgcucguggccucaagcggcacucuggaguuuaucaaugaagguuucaacuggacagggguuacccagaauggaggcagucgcgcuugcaaacgaggcccagauaacggguuuuucucccgucugaauuggcucuacaagucuggaagcacguaucccgugcaaaacgucacuaugccuaauaacgacaacuccgauaaguuauacauuuggggugugcaccauccaucaaccgacaaagagcagacagaccuguauguacaggcaaguggcaagguuacugugagcaccaaaagaucucagcaaacagucauccccaaugugggguccaggccuugggugcggggacuuucaagccgcgucaguauuuacuggaccaucguuaagccaggcgauauauuggugauuaacucuaaugguaaccugaucgccccgagaggguacuuuaaaaugaggacgggaaaguccagcauuaugcggucggacgcucccaucggcacuuguucuuccgagugcaucacaccuaauggcucaauuccaaacgauaagcccuuccagaauguaaacaaaauaaccuauggggccuguccuaaguacgugaaacagaauacucuaaagcucgcgacaggaaugcgcaacgucccagaaaaacagacccgagguaucuuuggcgcaauugccggguucaucgagaauggaugggaaggcaugauagacgguugguauggguuuagacaccaaaacagugagggcacgggacaggcugccgaucuuaagagcacccaggcagcuauugaccaaaucaauggcaaacugaacagggugaucgagaagacaaaugaaaaguuccaccagauugagaaagaguucuccgaaguugaagggcggauccaggaucuggagaaguacguggaggacacuaaaauugauuuguggucuuauaacgccgaacuccuggucgcguuagagaaccagcauaccauagaccugacagauagcgaaaugaauaagcucuuugagaaaacucgucgccaacuuagagaaaacgccgaggacaugggaaaugguugcuucaagaucuaccacaagugugacaacgcaugcauuggcucaaucaggaaugggaccuaugaucaugacguguaccgggaugaggcucugaacaaucgauuucagaucaaaggaguagaauugaagaguggcuacaaagacuggauucuauggauauccuucgccaucagcugcuuucugcucuguguugugcugcuugguuucauuaugugggcuugccagaaggggaacauccgcuguaauauuugcaucuga

SEQ ID NO: 128549 - RNA, 1701 nt, Artificial Sequence
  derived and/or modified CDS sequence (opt3) from hemagglutinin__InfluenzaA__ABC02288
augaagaccaucauugcccugagcuacauacucugccuuguguucgcucagaaaauccccggcaacgacaauuccacagcaacucuguguuuggggcaccaugccgucccuaacggaacguuaguuaagaccauuacaaaugaucaaaucgaggugacuaacgcgaccgaacugguacagucuucaaguacagguagaauuugcgacagcccacacaggauccuagauggcgagaauuguacccucauagacgcucugcuuggggauccgcauugcgacggauuucagaacaaagaaugggaucuguucguggagcgguccaaggccuauucuaauuguuaccccuaugacgucccugauuacgcaucguugcgcucacucguggccagcaguggcacucuggaauuuaacaaugaguccuucaacuggacagguguugcucagaaugggaccucuuaugcaugcaaacgacguagcaucaaguccuuuuucucaagacugaacuggcuccaccaauuaaaguacaaauauccagcccugaaugugacgaugcccaacaaugacaaguuugauaaacuuuacauuuggggaguccaucacccuaguacugacagcgaucagaccucuuuguacgcucaggccuccggcagggugacaguaucaacuaagcggagccagcaaaccguuaucccaaacauuggcagucgccccugggugagaggggucucuuccaggaucagcauauauuggacaauugugaaaccuggagacauccugcuaauuaacucgaccgguaaucucaucgcgccacggggcuacuucaagauccgcucugggaaguccucaauuaugcgaagugacgcaccgauaggaaaauguaacagcgagugcaucacgcccaauggcuccauuccuaacgauaagccauuucagaaugugaacagaaucacuuauggugccugucccagguacgucaaacagaauacacugaagcuggcuaccgggaugcggaacguuccugaaaaacagacucguggaauauucggcgccauugcaggcuuuaucgagaaugggugggaaggaaugguggacgguugguauggcuuccgccaccaaaacucugaggggacaggacaggcugccgaucuuaagagcacccaggcggccaucaaucaaauuaacggcaaauugaauagacucaucgagaagacgaacgaaaaguuucaucagauugagaaagaguucucagaaguagaagguaggauacaggaccuggagaaguacguggaggauaccaaaaucgacuuauggaguuauaaugcagaacugcucgucgcucuugagaaccagcacacaauugaucugacugacuccgaaaugaacaaguuguucgagcggacccgaaaacaacuacgcgaaaaugccgaggauauggggaacggcugcuuuaagaucuaccauaagugugacaaugcuugcaucggaagcauuagaaacggcacauacgaucacgacguguauagggacgaggcccugaauaaccgguuccagauaaaagggguugaacucaagucuggacacaaagauuggauccuguggauuucauuugcaaucaguugcuuccuucuguguguggucuugcucgguuuuauuaugugggccugccagaagggcaauauccgcuguaacauaugcaucuga

SEQ ID NO: 128550 - RNA, 1701 nt, Artificial Sequence; identical to SEQ ID NO: 128518
  derived and/or modified CDS sequence (opt3) from hemagglutinin__InfluenzaA__ABC02299

SEQ ID NO: 128551 - RNA, 1701 nt, Artificial Sequence; identical to SEQ ID NO: 128542
  derived and/or modified CDS sequence (opt3) from hemagglutinin__InfluenzaA__ABC02310

SEQ ID NO: 128552 - RNA, 1701 nt, Artificial Sequence; identical to SEQ ID NO: 128547
  derived and/or modified CDS sequence (opt3) from hemagglutinin__InfluenzaA__ABC02321

SEQ ID NO: 128553 - RNA, 1701 nt, Artificial Sequence; identical to SEQ ID NO: 128353
  derived and/or modified CDS sequence (opt3) from hemagglutinin__InfluenzaA__ABC02332

SEQ ID NO: 128554 - RNA, 1701 nt, Artificial Sequence
  derived and/or modified CDS sequence (opt3) from hemagglutinin__InfluenzaA__ABC39805
augaagaccaucauugcccugagcuacauacucugccuuguguucgcucagaaccugcccggcaaugacaacuccacagcaacuuuguguuuagggcaccaugccgucccuaauggaacgcugguuaaaaccaucacaaacgaucaaauugaggugacuaaugcgaccgaauugguacagucuucaagugcugguagaaucugcgacagcccacacaggauucucgauggcaagaacuguacacugaucgacgcccuucugggggauccgcauugcgacggauuucagaaugagaaaugggauuuguucguggaacgguccaaggcauuuucuaacuguuaucccuacgacguccaggauuaugccucgcuccgcucacugguggcuagcaguggcacccuggaguucauaaaugaagguuuuaacuggacugggguuacacaauccggaggcucuuacgcaugcaaacgaggcagcggaaauuccuucuuuucacgucucaacugguuauauaagagugagagcaaguacccugcccugaaugugaccaugccaaacaaugggaacuucgacaaacuuuauaucugggguguccaccaucccucuacggauaaggagcagacuaacuuguacgugagagcuuccggcaggguaaccguuucaacaaaacggagccagcagacugugauuccuaauaucgggccacgccccugggucagaggacugaguucuaggauuuccaucuacuggaccauagugaagccuggcgacauucuacucaucaacagcucggguaaucugauugccccacggggguauuuuaaaauccgcacaggaaagucuuccaucaugcgaucagaugcgccgauuggcaccuguaguagcgaaugcauaacgcccaacggcuccaucccuaaugacaagccauuccaaaacgugaauaaaauuacuuacggggcaugucccaaguaugucaaacagaacacacuuaagcuggccaccggaaugagaaauaucccugagaaacagacuagggguauauuuggcgcuauugccggguucaucgaaaacggaugggagggcaugguugacgguugguacggguuucggcaccaaaauucugagggcacaggacaggcagcugaucuaaagagcacccaggccgcgaucgaccagauuaacggcaaacucaaucgugugaucgaaaagacgaacgagaaguuccaccaaauugaaaaagaguucucagaaguagaggggcgcauacaggaucuggagaaguauguggaagacaccaaaaucgauuuauggaguuacaaugccgagcugcucgucgcacuugaaaaccagcauacaauugaccugacugauuccgagaugaacaaguuguuugagaaaaccagaaggcagcuacgggaaaaugcugaggacaugggaaacgguugcuucaagaucuaucacaagugugauaaugccugcaucggcagcauucgaaacgggacauacgaccaugauguguaccgcgacgaagcucugaauaacagauuucaaauaaaaggaguugagcucaagucuggcuauaaagacuggauccuguggauuucauucgccaucaguugcuuucuucuguguguggucuugcucgguuucauuaugugggcaugccagaaggggaauaucagguguaacauaugcaucuga

SEQ ID NO: 128555 - RNA, 1698 nt, Artificial Sequence
  derived and/or modified CDS sequence (opt3) from hemagglutinin__InfluenzaA__ABC40522
augaaggugaaacugcucauccuucugugcaccuucacagccacuuacgcugacacgauuuguauaggcuaucacgcaaacaauagcaccgauacagucgacacuguuuuggagaagaacgugaccguaacacauuccgugaauuuacuggaagauucucacaacgggaaacuaugccuccugaagggaaucgcgccccuucagcuggguaauuguucagucgccggcuggauuuuggggaacccugagugcgaacuccugaucaguaaagagagcugguccuacauuguggaaaccccaaauccggagaacggagcuuguuaucccggcuacuuugccgacuaugaggaacugagagagcaacucucuucgguuagcucauucgaaagguuugagaucuucccuaaggagaguuccuggccaaaucauacugugacaggugucucugcaagcugcucccacaacgggaagucaaguuuuuacaaaaauuuacuguggcuuaccggaaagaacggcuuguaucccaaucugagcaaaucuuacgccaacaauaaggaaaaagaggugcuaauacucuggggcguacaucacccuccaaacaucggggaucagcggacgcuguaccacacugaaaacgcuuauguuuccguggucucaagccauuacagucgccgauucacccccgagauuacaaagcguccuaaggugagagaccaggaaggaaggaucaauuauuacuggacucuucuggagccaggugauaccauuaucuuugaggcaaacggcaauuugauagccccgugguaugcuuucgcccucucucggggguuuggauccggcauuaucacaagcaacgcgcccauggacgaaugugaugcaaaaugccagaccccucaaggugccauuaauucgucucugccauuccagaacgugcaccccgucacgaucggggaguguccuaaguacguucgcuccgcuaaauuaagaauggugacuggacugaggaauaucccaucaauucagagucggggccucuuuggcgccauagcaggguucaucgaaggagguuggacaggcaugguagacgggugguauggauaccaucaccagaacgagcaaggcagcgguuacgcugccgaucagaaguccacccagaaugcgauuaacgggaucacuaauaaagugaacucugucauagaaaagaugaauacacaguuuaccgccgugggcaaagaguucaacaaacuugagcgccgaauggaaaaucugaacaagaaaguugacgauggauucuuggacauuuggacguauaacgcagagcuacuggugcuccuggaaaaugagagaacccuugacuuucacgauagcaacgucaagaaucuguacgaaaaagugaagucacaauugaaaaacaaugcuaaggagaucggcaacgggugcuucgaguuuuaucauaaguguaauaacgaaugcauggagaguguaaagaauggaacauacgacuaucccaaguacuccgaagagagcaaacucaacagggagaagaucgaugguguuaaacuggacucuaugggcguguaucagauuuuagccaucuacucaacugucgcuaguagccuggugcuacucgucucccugggggccauuucuuucuggaugugcucgaauggaagccuucagugucggauaugcaucuga

SEQ ID NO: 128556 - RNA, 1698 nt, Artificial Sequence; identical to SEQ ID NO: 128344
  derived and/or modified CDS sequence (opt3) from hemagglutinin__InfluenzaA__ABC40533

SEQ ID NO: 128557 - RNA, 1701 nt, Artificial Sequence
  derived and/or modified CDS sequence (opt3) from hemagglutinin__InfluenzaA__ABC40555
augaagaccaucauugcccugagcuacauauucugccucguguuugcucagaaccuucccagaaaugacaaauccacagcaacucuguguuugggccaccaugccgucccuaacgggacguuaguuaagaccaucacaaaugaucaaauugaggugacuaacgcgaccgaacugguacagucuucaaguacaggaaggaucugcgacagcccacaccggauucuagaugguaaaaauuguacccucguggacgcucugcuuggcgauccgcauugcgacggguuccagaacgagaagugggaucuguuugucgaacgcuccaaagccuucucuaauuguuaucccuacgacgugccugauuaugcaucguugcgaucacucguugccagcaguggaacucuggaguuuaucaacgaauccuucaauuggacaggcgugacccagucuggugggagcuacgcuugcaagcguggauccgacaacucauuuuucaguagacugaauuggcucuaugagagcgagucuaaguacccagucuuaaacgugacgaugcccaauaacggcaauuuugauaaacuguauauauggggcguacaccauccuuccacugacaaggaacaaaccaaccuuuacguuagggcaucagggcgggugacagucagcacuaaacgcagucagcagaccaucauuccaaacaucggaucuagacccugggugagggguuuguccagccggauuucgaucuacuggacaauagugaagccuggcgauauucugcuaaucaauucuaacgggaaucucauugccccacgcggauauuucaaaauccgaaccggcaaguccucaaucaugagaagugacgcuccgauugguacguguagcuccgagugcauaacucccaacgggucuaucccuaaugacaagccauuucagaacgucaauaaaauuacauacggagccugucccaaguauguuaaacaaaacacccugaaacuugcgacuggcaugaggaaugugccugaaaagcagacacggggcaucuucggggcaauagccggauuuauugagaacgguugggagggcaugguagaugggugguacggauuccgucaccagaauagcgaaggcaccggucaggcugccgaccugaagucaacgcaagcagcuaucgaucagaucaacgggaaauugaaucgcgugauugagaagaccaacgaaaaguuccaccagaucgagaaagaauuuagugaggucgagggcaggauucaagaccucgaaaaguauguggaggauacaaaaauagaccugugguccuacaaugccgaauuacugguugcgcucgagaaccagcauacuaucgaucuuaccgacagcgaaaugaacaagcuguucgagaaaacaagacggcaguugcgagagaaugccgaagauaugggaaacggcugcuuuaagauuuaucacaagugugacaaugcaugcaucgggucuauccgcaacggaacuuacgaucaugacguguacagagacgaggcucuaaauaacagguuccagauuaaaggugucgaacugaagucaggcuauaaagauuggauacucuggaucaguuuugccauuagcugcuuccugcuuugugugguacuguugggguuuaucaugugggcuugccaaaagggaaauauucgguguaacaucugcauauga

SEQ ID NO: 128558 - RNA, 1701 nt, Artificial Sequence
  derived and/or modified CDS sequence (opt3) from hemagglutinin__InfluenzaA__ABC40608
augaagaccaucauugcccugagcuacauacucugccuuguguucgcucagaaacugcccggcaacgacaauuccacagcaacuuuguguuuagggcaccaugccgucccuaacggaacgcugguuaagaccaucacaaaugaucaaauugaggugacuaacgcgaccgaacuuguacagucuucaaguacagguagaaucugcgacagcccacacaggauucucgauggcgagaauuguacccugaucgacgcucuacugggggauccgcauugcgacggauuucagaacaaagaaugggauuuguucguggagcgguccaaggccuauucuaauuguuaccccuaugacgucccugauuacgcaucgcuccgcucacugguggccagcaguggcacucuggaauuuaacaaugaguccuucaacuggacagguguugcucagaaugggaccucuagcgcaugcaaacgacguuccauaaagucauuuuucaguagacucaacugguuacaccaacugaaguauaaauacccagcccuuaaugugacgaugcccaacaaugacaaguuugauaaauuguauaucuggggaguccaucacccuagcacugacucugaucagaccucccuguacgcucaggccucaggcagggugacaguaagcacucggcgcagucagcaaaccguuauuccaaacaucggcucuagacccugggugaggggagucuccagccggauuucgaucuacuggacaauagugaagccuggggacauucuacucaucaacucuaccgguaaucugauugcgccacgcggcuauuucaaaauccgauccgggaagucaaguaucaugagaagcgacgcaccgauuggaaaguguaacuccgagugcauaacgcccaauggcucuaucccuaacgauaaaccauuucagagcgugaauaggauuacuuacggugccuguccccgguaugucaagcagaacacacuuaaacuggcuaccgggaugcguaauguuccugaaaagcagacucgcggaaucuucggcgccauagcaggcuuuauugagaacgggugggaaggaaugguggacgguugguacggcuucagacaccaaaauucagaggggacaggacaggcugccgauuugaaaaguacccaggcggccaucaaccaaaucaauggcaagcucaacaggcugauugagaaaacgaaugaaaaguuucaucagaucgagaaggaguucuccgaaguagaaggucggauucaggacuuagagaaauauguggaggauaccaagauagaccuguggagcuacaacgcagaacuccuugucgcucuggagaaucagcacacaaucgauuugacugacucugaaaugaacaaacuauucgagcgaacccgcaagcaacugagagaaaacgccgaggauauggggaauggcugcuuuaaaauuuaucauaagugugacaacgcuugcaucggaucaaucaggaauggcacauacgaucacgacguguaccgggacgaggcccucaacaaucgcuuccagauuaaggggguugaacugaaaaguggauauaaggauuggauacuuuggaucagcuuugcaauuuccugcuuccuguugugugugguccuccuggguuuuaucaugugggccugccagaaaggcaacauuagauguaauaucugcauauga

SEQ ID NO: 128559 - RNA, 1701 nt, Artificial Sequence
  derived and/or modified CDS sequence (opt3) from hemagglutinin__InfluenzaA__ABC40619
augaagaccaucauugcccugagcuacauauucugccucgugcuuggccaggacuuuuccgggaacgauaauucuacagcuacucuguguuugggacaccaugcaguccccaacgguacguuaguuaaaaccaucacaaaugaccaaauugaggugacuaacgccaccgaacugguacagucaaguagcacaggcaagaucugcaauaacccucacaggauucuagaugggaucgacuguacccucauagaugcgcugcuuggagacccacauugcgauggcuuccagaaugagacuugggaccuguuuguggaaagauccaaggcuuucucuaacuguuauccguacgauguccccgacuaugccucguugcggucacucguggcaagcagugguacacuggaguuuaucaaugaaggguucaacuggaccggaguuacgcagaauggcggcuccaacgccugcaaacgcgggccugauucuggauuuuucagccgacugaauuggcucuacaaauccgguucaacuuauccaguguuaaacgucaguaugcccaauaacgacaacuuugauaagcuguacauuuggggcgugcaccauccuagcaccgaccaagagcagacaaaucuuuauguacaggcuucugggcguguuacuguguccaccaagagaucacagcaaacaaucauuccaaacaucggaagcaggcccuggguccggggcuugaguucucgcauauccauuuacuggaccaucgugaaaccuggugacauucuggugaucaauagcaacgggaaucuaaucgcaccaagaggauacuucaagaugaggacgggcaaaucgucuauuaugcgguccgaugccccgauaggcacuuguaucucagagugcauuacacccaacgggaguaucccuaaugacaagccauuucagaacgucaauaaaauaaccuauggagcuugucccaaguacguuaagcagaacacucucaaacuggccacagguaugcgcaaugugccugaaaagcagacccgaggcauuuucggggcgaucgcaggauuuaucgagaacggcugggaagguaugauugaugggugguauggcuucagacaccaaaauagcgagggaacgggccaggccgcugaccuuaaauccacccaggccgcaaucgaucaaauuaacgggaagcugaauaggauaaucgagaaaacaaacgaaaaguuccaccagauugagaaagaauuuucugagguagaaggacggauccaggacuuggagaaguacguggaggauacuaagaucgaccucuggagcuauaacgcugaacuguuagucgcccuggagaaucagcauaccauugaucucacagacucagaaaugaacaaacuuuucgagaagacucgucgccaacugagagaaaaugcggaggauauggguaacggcugcuuuaaaauauaccacaagugugacaaugccugcaucgggaguauuaggaacggaaccuaugaccaugauguguaccgggacgaggcauugaauaaccgauuccagaucaaaggcguugaacuaaaguccgguuacaaggauuggauucuguggaucagcuuugcuauaucuugcuuccuccugugugugguccuucugggguuuaucaugugggccugccagaaaggcaauauucgcuguaacaucugcauuuga

SEQ ID NO: 128560 - RNA, 1698 nt, Artificial Sequence
  derived and/or modified CDS sequence (opt3) from hemagglutinin__InfluenzaA__ABC40631
augaaggugaaacugcucauccuucugugcaccuucacagccacuuacgcugacacgauuuguauaggcuaucacgcaaacaauagcaccgauacagucgacacuguuuuggagaagaacgugaccguaacacauuccgugaauuuacuggaagauucucacaacgggaaacuaugccuccugaagggaaucgcgccccuucagcuggguaauuguucagucgccggcuggauuuuggggaacccugagugcgaacuccugaucaguaaagagagcugguccuacauuguggaaaccccaaauccggagaacggaacuuguuaucccggcuacuuugcugacuaugaggaacugagagagcaacucucuucgguuagcucauucgaaagguuugagaucuucccuaaggagaguuccuggccaaaucauacagugaccggugucucugccagcugcucccacaacgggaagucaaguuuuuaccggaauuuacuguggcuuacgggcaaaaacggauuguaucccaaucugagcaagucuuacgcaaacaauaaagaaaaggaggugcuaauacucuggggcguacaucacccuccaaacaucggggaucagcgcacucuguaccacaccgaaaacgccuauguuuccguggucucaagccauuacagucgacguuucacacccgagauuacuaaaagaccuaaggugagggaccaggaaggacggaucaauuauuacuggacccuucuggagccaggugauacaauuaucuuugaggcuaacggcaauuugauagcaccgugguaugccuucgcucucucucgcggguuuggauccggcauuaucaccagcaacgcccccauggacgaaugugaugcgaagugccagacgccucaaggugcaauuaauucgucucugccauuccagaacgugcaccccgucacuaucggggaguguccuaaauacguuagauccgccaaguuaaggauggugacaggacugcggaauaucccaucaauucagagucgcggccucuuuggcgcuauagccggguucaucgaaggagguuggaccggcaugguagacgggugguauggauaccaucaccagaacgagcaaggcagcgguuacgcagcugaucagaaauccacucagaaugccauuaacgggaucacaaauaaggugaacucugucauagaaaagaugaauacccaguuuacggcggugggcaaagaguucaacaaacuugagcgaagaauggaaaaucugaacaagaagguugacgauggauucuuggacauuuggaccuauaacgccgagcuacuggugcuccuggaaaaugagaggacacuugacuuucacgauagcaacgucaaaaaucuguacgaaaaggugaaaucacaauugaagaacaaugcaaaagagaucggcaacgggugcuucgaguuuuaucauaaguguaauaacgaaugcauggagaguguaaagaauggaacuuacgacuaucccaaauacuccgaagagagcaagcucaaccgggagaaaaucgaugguguuaagcuggaaucuaugggcguguaucagauuuuagcuaucuacucaaccgucgccaguagccuggugcuacucgucucccugggggcuauuucuuucuggaugugcucgaauggaagccuucagugucguauaugcaucuga

SEQ ID NO: 128561 - RNA, 1701 nt, Artificial Sequence
  derived and/or modified CDS sequence (opt3) from hemagglutinin__InfluenzaA__ABC41692
augaagaccaucauugcccugagcuacauacucugccuuguguucgcucagaaacccccuggcaacgacaauuccacagcaacucuguguuuggggcaccaugccgucccaaacggaacgaucguuaagaccauuacaaaugaucaaaucgaggugacuaacgcgaccgaauuaguacagucuucaaguacagguggcauuugcgacagcccgcaccagauccuggauggggagaauuguacccuaauagacgcucuccugggagauccccagugcgacggcuuucaaaacaaaaagugggaucuuuucguggaaagauccaaagccuauucuaauuguuacccuuaugacgucccagaucaugcaucgcugaggucauugguggccagcagugguacucucgaguuuaacaaugaauccuucgacuggacagggguuacccagaacggaacgucuagcgcuugcaagcggcgcuccaauaagucauuuuucagucgacugaacuggcugacucaccucaaauacaaguaucccgcauuaaaugugaccaugccuaacaaugagaaauuugauaagcuguacaucuggggcguccaucacccaggcacagacagcgaucagauuucucuuuaugcccaggcuuccgggcguaucacugugucaaccaaaagaagccaacagacaguaauucccaacaucggaaguaggccucggguucgcgacgugucuuccagaauaagcauuuacuggaccaucgucaagccaggugacauuuugcugaucaacucgacgggcaaucuaaucgccccgaggggguacuucaagauucggucuggaaaauccucaauaaugcgcagugaugcgcccaucggcaaguguaacagcgagugcauuacuccuaaugguuccaucccaaacgacaaacccuuucagaaugugaaccgaauaacauauggggcauguccuagauacgugaagcagaauacccucaaacuggccacuggaaugaggaacgucccagaaaagcaaacacggggcauuuucggcgcuaucgccggguuuaucgagaauggaugggaagguaugguugauggcugguauggguuccgucaccagaacucugagggaaccggccaggcagcugaccuuaaaagcacgcaagccgcgauuaaucagaucaacgguaagcugaaucgcuugauugggaagaccaacgagaaauuucaucagauagaaaaggaguucucagaaguggagggcagaauccaggaucucgaaaaauacguagaggacacaaagauugaucuguggaguuauaaugccgaguuacugguggcacucgaaaaccaacacacuaucgaccuuaccgauuccgagaugaacaaacuguucgaaaggacaaagaagcaguugcgggagaaugcugaagacaugggaaacggcugcuuuaaaaucuaccauaagugugauaaugccugcauugggagcauacgaaacggaacuuaugaccacgacgucuaccgcgaugaggcucuaaauaacagauuccagaucaaagguguggagcugaagucuggcuacaaagacuggauucucuggaucucauuugccauuaguugcuuccugcuuuguguugcacuguugggguuuaucaugugggccugccagaagggaaauauaagguguaacaucugcauuuga

SEQ ID NO: 128562 - RNA, 1698 nt, Artificial Sequence; identical to SEQ ID NO: 128347
  derived and/or modified CDS sequence (opt3) from hemagglutinin__InfluenzaA__ABC41714

SEQ ID NO: 128563 - RNA, 1701 nt, Artificial Sequence
  derived and/or modified CDS sequence (opt3) from hemagglutinin__InfluenzaA__ABC41725
augaagaccacaaucgcccugagcuacauucucugccuuguguucgcucagaaacugcccggcaacgacaauuccacugcaacguuguguuuagggcaccaugccgucccuaacggaaccauaguuaagacaaucacuaaugaucaaauugaggugaccaacgcgacagaacugguacagucuucaaguaccgguggcaucugcgacagcccacaccagauucuagauggggagaauuguacucucaucgacgcucugcuuggagauccgcagugcgacggcuuucaaaacaaaaagugggaucuguucguggaaagauccaaagccuauucuaauuguuaccccuaugacgucccugaucaugcaucguugaggucacucguggccagcagugguacacuggaguuuaacaaugaauccuucgacuggaccgggguuacgcagaacggaacuucuagcgcuugcaagcggcgcuccaauaagucauuuuucagucgacugaacuggcucacccacuuaaaauacaaguauccagcacugaaugugacaaugcccaacaaugagaaauuugauaaacuuuacauauggggcguccaucacccuggcacugacagcgaucagaucucuuuguaugcccaggcuuccgggcguauuaccgugucaacaaagagaagccaacagaccguaaucccaaacauuggaaguaggccccggguucgcgacgugucuuccagaaucagcauauacuggacgauugucaagccuggugacauccugcuaauuaacucgacuggcaaucucaucgccccaaggggguacuucaagauccggucuggaaaauccucaauuaugcgcagugaugcgccgauaggcaaguguaacagcgagugcaucacacccaaugguuccauuccuaacgacaaaccauuucagaaugugaaccgaaucaccuauggggcaugucccagauacgugaagcagaauacucugaaacuugccacaggaaugaggaacgucccugaaaagcaaacccggggcauauucggcgcuauugccggguuuaucgagaauggaugggaagguaugguugauggcugguauggguuccgucaccagaacucugagggaacgggccaggcagcugaccugaaaagcacccaagccgcgaucaaucagauuaacgguaaguugaaucgccucaucgggaagacaaacgagaaauuucaucagauugaaaaggaguucucagaaguggagggcagaauacaggaucuggaaaaauacguagaggacacuaagaucgauuuauggaguuauaaugccgagcugcucguggcacuugaaaaccaacacaccauugaccugacagauuccgagaugaacaaauuguucgaaaggacuaagaagcagcuacgggagaaugcugaagacaugggaaacggcugcuuuaaaaucuaccauaagugugauaaugccugcaucgggagcauucgaaacggaaccuaugaccacgacgucuaccgcgaugaggcucugaauaacagauuccagauaaaagguguggagcucaagucuggcuacaaagacuggauccuguggauuucauuugccaucaguugcuuccuucuguguguugcauugcucggguuuauuaugugggccugccagaagggaaauaucagguguaacauaugcaucuga

SEQ ID NO: 128564 - RNA, 1701 nt, Artificial Sequence
  derived and/or modified CDS sequence (opt3) from hemagglutinin__InfluenzaA__ABC41736
augaagaccaucauugcccugagcuacauacucugccuuguguucgcucagaaacugcccggcaacgacaauuccacagcaacuuuguguuuagggcaccaugccgucccuaacggaacgaucguuaagaccauuacaaaugaucaaaucgaggugacuaacgcgaccgaacugguacagucuucaaguacagguggcauuugcgacagcccacaccagauccuagauggggagaauuguacccucauagacgcucugcuuggagauccgcagugcgacggcuuucaaaacaaaaagugggaucuguucguggaaagauccaaagccuauucuaauuguuaccccuaugacgucccugaucaugcaucguugaggucacucguggccagcagugguacucuggaguuuaacaaugaauccuucgacuggacagggguuacccagaacggaacgucuagcgcuugcaagcggcgcuccaauaagucauuuuucagucgacugaacuggcucacucacuuaaaauacaaguauccagcacugaaugugaccaugcccaacaaugagaaauuugauaaacuuuacaucuggggcguccaucacccuggcacagacagcgaucagauuucuuuguaugcccaggcuuccgggcguaucacugugucaaccaagagaagccaacagacaguaauuccaaacaucggaaguaggccccggguucgcgacgugucuuccagaauaagcauuuacuggaccaucgucaagccuggugacauucugcuaaucaacucgacgggcaaucucaucgccccaaggggguacuucaagauucggucuggaaaauccucaauaaugcgcagugaugcgccgaucggcaaguguaacagcgagugcauuacucccaaugguuccaucccuaacgacaaaccauuucagaaugugaaccgaauaacauauggggcaugucccagauacgugaagcagaauacccugaaacuugccacuggaaugaggaacgucccugaaaagcaaacacggggcauuuucggcgcuaucgccggguuuaucgagaauggaugggaagguaugguugauggcugguauggguuccgucaccagaacucugagggaaccggccaggcagcugaccugaaaagcacgcaagccgcgauuaaucagaucaacgguaaguugaaucgccucauugggaagaccaacgagaaauuucaucagauagaaaaggaguucucagaaguggagggcagaauccaggaucuggaaaaauacguagaggacacaaagauugauuuauggaguuauaaugccgagcugcucguggcacuugaaaaccaacacacuaucgaccugaccgauuccgagaugaacaaauuguucgaaaggacaaagaagcagcuacgggagaaugcugaagacaugggaaacggcugcuuuaaaaucuaccauaagugugauaaugccugcauugggagcauacgaaacggaacuuaugaccacgacgucuaccgcgaugaggcucugaauaacagauuccagaucaaagguguggagcucaagucuggcuacaaagacuggauucuguggaucucauuugccauuaguugcuuccuucuguguguugcauugcucggguuuaucaugugggccugccagaagggaaauauaagguguaacaucugcauuuga

SEQ ID NO: 128565 - RNA, 1701 nt, Artificial Sequence; identical to SEQ ID NO: 128564
  derived and/or modified CDS sequence (opt3) from hemagglutinin__InfluenzaA__ABC41952

SEQ ID NO: 128566 - RNA, 1701 nt, Artificial Sequence; identical to SEQ ID NO: 128564
  derived and/or modified CDS sequence (opt3) from hemagglutinin__InfluenzaA__ABC41953

SEQ ID NO: 128567 - RNA, 1701 nt, Artificial Sequence; identical to SEQ ID NO: 128564
  derived and/or modified CDS sequence (opt3) from hemagglutinin__InfluenzaA__ABC41964

SEQ ID NO: 128568 - RNA, 1701 nt, Artificial Sequence; identical to SEQ ID NO: 128564
  derived and/or modified CDS sequence (opt3) from hemagglutinin__InfluenzaA__ABC42014

SEQ ID NO: 128569 - RNA, 1701 nt, Artificial Sequence; identical to SEQ ID NO: 128564
  derived and/or modified CDS sequence (opt3) from hemagglutinin__InfluenzaA__ABC42114

SEQ ID NO: 128570 - RNA, 1701 nt, Artificial Sequence; identical to SEQ ID NO: 128564
  derived and/or modified CDS sequence (opt3) from hemagglutinin__InfluenzaA__ABC42125

SEQ ID NO: 128571 - RNA, 1701 nt, Artificial Sequence; identical to SEQ ID NO: 128564
  derived and/or modified CDS sequence (opt3) from hemagglutinin__InfluenzaA__ABC42136

SEQ ID NO: 128572 - RNA, 1701 nt, Artificial Sequence
  derived and/or modified CDS sequence (opt3) from hemagglutinin__InfluenzaA__ABC42147
augaagaccaucauugcccugagcuacauacucugccuuguguucgcucagaaacugcccggcaacgacaauuccacagcaacuuuguguuuagggcaccaugccgucccuaacggaacgaucguuaagaccauuacaaaugaucaaaucgaggugacuaacgcgaccgaacugguacagucuucaaguacagguggcauuugcgacagcccacaccagauccuagauggggagaauuguacccucauagacgcucugcuuggagauccgcagugcgacggcuuucaaaacaaaaagugggaucuguucguggaaagauccaaagccuauucuaauuguuaccccuaugacgucccugaucaugcaucguugaggucacucguggccagcagugguacucuggaguuuaacaaugaauccuucgacuggacagggguuacccagaacggaacgucuagcgcuugcaagcggcgcuccaauaagucauuuuucagucgacugaacuggcucacucacuuaaaauacaaguauccagcacugaaugugaccaugcccaacaaugagaaauuugauaaacuuuacaucuggggcguccaucacccuggcacagacagcgaucagauuucuuuguaugcccaggcuuccgggcguaucacugugucaaccaagagaagccaacagacaguaauuccaaacaucggaaguaggccccggguucgcgacgugucuuccagaauaagcauuuacuggaccaucgucaagccuggugacauucugcuaaucaacucgacgggcaaucucaucgccccaaggggguacuucaagauucggucuggaaaauccucaauaaugcgcagugaugugccgaucggcaaguguaacagcgagugcauuacucccaaugguuccaucccuaacgacaaaccauuucagaaugugaaccgaauaacauauggggcgugucccagauacgucaagcagaauacccugaaacuugcaacuggaaugaggaacguuccugaaaagcaaacacggggcauuuucggcgccaucgcuggguuuaucgagaauggaugggaagguaugguggauggcugguauggguuccgucaccagaacucugagggaaccggccaggccgcagaccugaaaagcacgcaagcugccauuaaucagaucaacgguaaguugaaucgccucauugggaagaccaacgagaaauuucaucagauagaaaaggaguucucagaaguagagggcagaauccaggaucuggaaaaauacguggaggacacaaagauugauuuauggaguuauaaugcggagcugcucgucgcccuugaaaaccaacacacuaucgaccugaccgauuccgagaugaacaaauuguucgaaaggacaaagaagcagcuacgggagaaugcagaagacaugggaaacggcugcuuuaaaaucuaccauaagugugauaaugcuugcauugggagcauacgaaacggaacuuaugaccacgacguguaccgcgaugaggcccugaauaacagauuccagaucaaagguguugagcucaagucuggcuacaaagacuggauucuguggaucucauuugcuauuaguugcuuccuucuguguguggccuugcucggguuuaucaugugggcaugccagaagggaaauauaagguguaacaucugcauuuga

SEQ ID NO: 128573 - RNA, 1701 nt, Artificial Sequence; identical to SEQ ID NO: 128564
  derived and/or modified CDS sequence (opt3) from hemagglutinin__InfluenzaA__ABC42158

SEQ ID NO: 128574 - RNA, 1701 nt, Artificial Sequence; identical to SEQ ID NO: 128564
  derived and/or modified CDS sequence (opt3) from hemagglutinin__InfluenzaA__ABC42169

SEQ ID NO: 128575 - RNA, 1701 nt, Artificial Sequence; identical to SEQ ID NO: 128564
  derived and/or modified CDS sequence (opt3) from hemagglutinin__InfluenzaA__ABC42180

SEQ ID NO: 128576 - RNA, 1701 nt, Artificial Sequence; identical to SEQ ID NO: 128564
  derived and/or modified CDS sequence (opt3) from hemagglutinin__InfluenzaA__ABC42192

SEQ ID NO: 128577 - RNA, 1701 nt, Artificial Sequence; identical to SEQ ID NO: 128564
  derived and/or modified CDS sequence (opt3) from hemagglutinin__InfluenzaA__ABC42307

SEQ ID NO: 128578 - RNA, 1701 nt, Artificial Sequence
  derived and/or modified CDS sequence (opt3) from hemagglutinin__InfluenzaA__ABC42318
augaagaccaucauugcccugagcuacauacucugccuuguguucgcucagaaacugcccggcaacgacaauuccacagcaacuuuguguuuagggcaccaugccgucccuaacggaacgaucguuaagaccauuacaaaugaucaaaucgaggugacuaacgcgaccgaacugguacagucuucaaguacagguggcauuugcgacagcccacaccagauccuagauggggagaauuguacccucauagacgcucugcuuggagauccgcagugcgacggcuuucaaaacaaaaagugggaucuguucguggaaagauccaaagccuauucuaauuguuaccccuaugacgucccugaucaugcaucguugaggucacucguggccagcagugguacucuggaguuuaacaaugaauccuucgacuggacagggguuacccagaacggaacgucuagcgcuugcaagcggcgcuccaauaagucauuuuucagucgacugaacuggcucacucacuuaaaauacaaguauccagcacugaaugugaccaugcccaacaaugagaaauuugauaaacuuuacaucuggggcguccaucacccuggcacagacagcgaucagauuucuuuguaugcccaggcuuccgggcguaucacugugucaaccaagagaagccaacagacaguaauuccaaacaucggaaguaggccccggguucgcgacgugucuuccagaauaagcauuuacuggaccaucgucaagccuggugacauucugcuaaucaacucgacgggcaaucucaucgccccaaggggguacuucaagauucggucuggaaaauccucaauaaugcgcagugaugcgccgaucggcaaguguaacagcgagugcauuacucccaaugguuccaucccuaacgacaaaccauuucagaaugugaaccgaauaacauauggggcaugucccagauacgugaagcagaauacccugaaacuugccacuggaaugaggaacgucccugaaaagcaaacacggggcauuuucggcgcuaucgccggguuuaucgagaauggaugggaagguaugguugauggcugguauggguuccgucaccagaacucugagggaaccggccaggcagcugaccugaaaagcacgcaagccgcgauuaaucagaucaacgguaaguugaaucgccucauugggaagaccaacgagaaauuucaucagauagaaaaggaguucucagaaguggagggcagaauccaggaucuggaaaaauacguagaggacacaaagauugauuuauggaguuauaaugccgaguuccugguggcacucgaaaaccaacacacuaucgaccuuaccgauuccgagaugaacaaacuguuugaaaggacaaagaagcaguugcgggagaaugcugaagacaugggaaacggcugcuucaaaaucuaccauaagugugauaaugccugcauugggagcauacgaaacggaacuuaugaccacgacgucuaccgcgaugaggcucuaaauaacagauuucagaucaaagguguggagcugaagucuggcuacaaagacuggauucucuggaucucauucgccauuaguugcuuucugcuuuguguugcacuguugggguucaucaugugggccugccagaagggaaauauaagguguaacaucugcauuuga

SEQ ID NO: 128579 - RNA, 1701 nt, Artificial Sequence; identical to SEQ ID NO: 128564
  derived and/or modified CDS sequence (opt3) from hemagglutinin__InfluenzaA__ABC42346

SEQ ID NO: 128580 - RNA, 1701 nt, Artificial Sequence; identical to SEQ ID NO: 128564
  derived and/or modified CDS sequence (opt3) from hemagglutinin__InfluenzaA__ABC42461

SEQ ID NO: 128581 - RNA, 1701 nt, Artificial Sequence; identical to SEQ ID NO: 128564
  derived and/or modified CDS sequence (opt3) from hemagglutinin__InfluenzaA__ABC42494

SEQ ID NO: 128582 - RNA, 1701 nt, Artificial Sequence; identical to SEQ ID NO: 128564
  derived and/or modified CDS sequence (opt3) from hemagglutinin__InfluenzaA__ABC42505

SEQ ID NO: 128583 - RNA, 1701 nt, Artificial Sequence
  derived and/or modified CDS sequence (opt3) from hemagglutinin__InfluenzaA__ABC42516
augaagaccaucauugcccugagcuacauacucugccuuguguucgcucagaaacugcccggcaacgacaauuccacagcaacuuuguguuuagggcaccaugccgucccuaacggaacgaucguuaagaccauuacaaaugaucaaaucgaggugacuaacgcgaccgaacugguacagucuucaaguacagguggcauuugcgacagcccacaccagauccuagauggggagaauuguacccucauagacgcucugcuuggagauccgcagugcgacggcuuucaaaacaaaaagugggaucuguucguggaaagauccaaagccuauucuaauuguuaccccuaugacgucccugaucaugcaucguugaggucacucguggccagcagugguacucuggaguuuaacaaugaauccuucgacuggacagggguuacccagaacggaacgucuagcgcuugcaagcggcgcuccaauaagucauuuuucagucgacugaacuggcucacucacuuaaaauacaaguauccagcacugaaugugaccaugcccaacaaugagaaauuugauaaacuuuacaucuggggcguccaucacccuggcacagacagcgaucagauuucuuuguaugcccaggcuuccgggcguaucacugugucaaccaagagaagccaacagacaguaauuccaaacaucggaaguaggccccggguucgcgacgugucuuccagaauaagcauuuacuggaccaucgucaagccuggugacauucugcuaaucaacucgacgggcaaucucaucgccccaaggggguacuucaagauucggucuggaaaauccucaauaaugcgcagugaugcgccgaucggcaaguguaacagcgagugcauuacucccaaugguuccaucccuaacgacaaaccauuucagaaugugaaccgaauaacauauggggcaugucccagauacgugaagcagaauacccugaaacuugccacuggaaugaggaacgucccugaaaagcaaacacggggcauuuucggcgcuaucgccggguuuaucgagaauggaugggaagguaugguugauggcugguauggguuccgucaccagaacucugagggaaccggccaggcagcugaccugaaaagcacgcaagccgcgauuaaucagaucaacgguaaguugaauaagcucauugggaaaaccaacgagaaguuucaucagauagaaaaagaguucucagaaguggagggccgcauccaggaucuggaaaaguacguagaggacacaaaaauugauuuauggaguuauaaugccgagcugcucguggcacuugaaaaccaacacacuaucgaccugaccgauuccgagaugaacaaguuguucgaaagaacaaagaaacagcuaagggagaaugcugaagacaugggaaacggcugcuuuaagaucuaccauaaaugugauaaugccugcauugggagcauacggaacggaacuuaugaccacgacgucuaccgagaugaggcucugaauaaccgcuuccagaucaaggguguggagcucaaaucuggcuacaaggacuggauucuguggaucucauuugccauuaguugcuuccuucuguguguugcauugcucggguuuaucaugugggccugccagaagggaaauauaagauguaacaucugcauuuga

SEQ ID NO: 128584 - RNA, 1701 nt, Artificial Sequence; identical to SEQ ID NO: 128564
  derived and/or modified CDS sequence (opt3) from hemagglutinin__InfluenzaA__ABC42527

SEQ ID NO: 128585 - RNA, 1701 nt, Artificial Sequence; identical to SEQ ID NO: 128564
  derived and/or modified CDS sequence (opt3) from hemagglutinin__InfluenzaA__ABC42574

SEQ ID NO: 128586 - RNA, 1701 nt, Artificial Sequence; identical to SEQ ID NO: 128564
  derived and/or modified CDS sequence (opt3) from hemagglutinin__InfluenzaA__ABC42585

SEQ ID NO: 128587 - RNA, 1701 nt, Artificial Sequence; identical to SEQ ID NO: 128291
  derived and/or modified CDS sequence (opt3) from hemagglutinin__InfluenzaA__ABC42596

SEQ ID NO: 128588 - RNA, 1701 nt, Artificial Sequence; identical to SEQ ID NO: 128330
  derived and/or modified CDS sequence (opt3) from hemagglutinin__InfluenzaA__ABC42607

SEQ ID NO: 128589 - RNA, 1701 nt, Artificial Sequence; identical to SEQ ID NO: 128330
  derived and/or modified CDS sequence (opt3) from hemagglutinin__InfluenzaA__ABC42618

SEQ ID NO: 128590 - RNA, 1701 nt, Artificial Sequence
  derived and/or modified CDS sequence (opt3) from hemagglutinin__InfluenzaA__ABC42629
augaagaccaucauugcccugagcuacauacucugccuuguguucgcucagaaacugcccggcaacgacaauuccacagcaacuuuguguuuagggcaccaugccgucccuaacggaacgaucguuaagaccauuacaaaugaucaaaucgaggugacuaacgcgaccgaacugguacagucuucaaguacagguggcauuugcgacagcccacaccagauccuagauggggagaauuguacccucauagacgcucugcuuggagauccgcagugcgacggcuuucaaaacaaaaagugggaucuguucguggaaagauccaaagccuauucuaauuguuaccccuaugacgucccugaucaugcaucguugaggucacucguggccagcagugguacucuggaguuuaacaaugaauccuucaacuggacagggguuacccagaauggaacgucuagcgcuugcaagcggcgcuccaacaauucauuuuucagucgacugaacuggcucacucacuuaaaguuuaaauacccagcacugaaugugaccaugcccaacaacgagaaguucgacaaacuuuauaucuggggcguccaucacccuggcacagauaaugaccagauuagcuuguacgcccaggcuucugggcguaucacuguguccaccaagagaucacaacagacaguaauuccaaacaucggaagcaggccccggguucgcgauauaccuaguagaauuucuaucuauuggaccauugugaaaccaggugacauccugcuaaucaauuccacgggcaaccucauugccccgaggggguacuuuaagauacggagcggaaagucgucuaucaugcgcuccgacgcgcccauuggcaaauguaauucagagugcaucacuccuaacgguaguauaccaaaugauaagcccuuccagaacgucaaucgaauuacauacggggcauguccuagauaugugaaacagaacacccugaaacuugccacuggaaugaggaaugugccagaaaaacaaacacggggcaucuuuggcgcuaucgccggguucauugagaacggaugggaagguauggucgacggcugguacggguuucgucaccagaauagcgagggaaccggccaggcagcugaucugaaguccacgcaagccgcgaucaaccagauuaaugguaaauugaaccgccucauagggaagaccaacgagaaguuccaucagaucgaaaaagaguucucugaaguugagggcaggauucaggaccuggaaaaguauguggaggauacaaaaaucgacuuauggagcuacaaugccgagcugcucguagcacuugaaaaccaacacacuaucgaucugaccgacucagagaugaauaaguuguuugaaagaacaaagaagcagcuacgggagaacgcugaagauaugggaaauggcugcuucaagauuuaucauaaaugugacaacgccugcauagggaguauccgaaauggaacuuacgaucacgacguguaucgcgacgaggcucugaacaauagauuucagauuaagggugucgagcucaaauccggcuacaaggauuggauccuguggauuagcuucgccaucucuugcuuucuucuguguguggcauugcucggguucauaaugugggccugccagaaaggaaacaucagguguaauauuugcaucuga

SEQ ID NO: 128591 - RNA, 1701 nt, Artificial Sequence
  derived and/or modified CDS sequence (opt3) from hemagglutinin__InfluenzaA__ABC42640
augaagaccaucauugcccugagcuacauacucugccuuguguucgcucagaaaauccccggcaacgacaauuccacagcaacucuguguuuggggcaccaugccgucccuaacggaacgauuguuaagaccaucacaaaugaucaaauugaggugacuaacgcgaccgaauuaguacagucuucaaguacagguggcaucugcgacagcccacaccagauacuggauggggagaauuguacccuaaucgacgcucuccugggagauccgcagugcgacggcuuucaaaacaaaaagugggaucuuuucguggaaagauccaaagccuauucuaauuguuaccccuaugacgucccugauuacgcaucgcugaggucauugguggccagcagugguacucucgaguuuaacaaugaauccuucaacuggacagggguuacccagaauggaacgucuagcgcuugcaagcggcgcuccaacaauucauuuuucagucgacugaacuggcugacucaucucaaguuuaaauauccagcauuaaaugugaccaugcccaacaacgagaaguucgacaaacuguacauuuggggcguccaccauccuggcacagauaaugaccagaucagccuuuaugcccaggcuucugggcguauuacuguguccaccaagagaucacaacagacaguaaucccaaacauaggaagcaggccccggguucgcgauauuccuaguagaaucucuauuuacuggaccaucgugaaaccaggugacaucuugcugauuaauuccacgggcaaccuaauagccccgaggggguacuuuaagauccggagcggaaagucgucuauuaugcgcuccgacgcgcccaucggcaaauguaauucagagugcauaacuccuaacgguaguauuccaaaugauaagcccuuccagaacgucaaucgaaucacauauggggcauguccuagauacgugaaacagaacacccucaagcuggccacuggaaugaggaaugugccagaaaaacaaacacggggcaucuuuggcgcuauugccggguucaucgagaacggaugggaagguauggucgacggcugguauggguuucgucaccagaauagcgagggaauuggccaggcagcugaucuuaaguccacccaagccgcgauaaaccagaucaaugguaaacugaaccgcuugauugggaagacgaacgagaaguuccaccagaucgaaaaagaguucucugaaguugagggcagaauccaggaccucgaaaaguacguggaggauaccaaaauugaccuguggagcuauaaugccgaguuacugguagcacucgaaaaccaacauacaauagaucuuacugacucagagaugaauaagcuguuugaaaggaccaaaaagcaguugcgggagaacgcugaagauaugggaaauggcugcuucaagaucuaccacaaaugugacaacgccugcauugggaguauccgaaauggaacauaugaucaugacguguaccgcgacgaggcucuaaacaauagauuucagauuaagggugucgagcugaaauccggcuacaaggauuggauccucuggaucagcuucgccauaucuugcuuucugcuuuguguggcacuguugggguucauuaugugggccugccagaaaggaaacaucagguguaauauuugcaucuga

SEQ ID NO: 128592 - RNA, 1701 nt, Artificial Sequence; identical to SEQ ID NO: 128291
  derived and/or modified CDS sequence (opt3) from hemagglutinin__InfluenzaA__ABC42651

SEQ ID NO: 128593 - RNA, 1701 nt, Artificial Sequence
  derived and/or modified CDS sequence (opt3) from hemagglutinin__InfluenzaA__ABC42662
augaagaccaucauugcccugagcuacauacucugccuuguguucgcucagaaacugcccggcaacgacaauuccacagcaacuuuguguuuagggcaccaugccgucccuaacggaacgaucguuaagaccauuacaaaugaucaaaucgaggugacuaacgcgaccgaacugguacagucuucaaguacagguggcauuugcgacagcccacaccagauccuagauggggagaauuguacccucauagacgcucugcuuggagauccgcagugcgacggcuuucaaaacaaaaagugggaucuguucguggaaagauccaaagccuauucuaauuguuaccccuaugacgucccugauuacgcaucguugaggucacucguggccagcagugguacucuggaguuuaacaaugaauccuucaacuggacagggguuacccagaauggaacgucuagcgcuugcaagcggcgcuccaacaauucauuuuucagucgacugaacuggcucacucauuuaaaguuuaaauauccagcacugaaugugaccaugcccaacaacgagaaguucgacaaacuuuacaucuggggcguccaccauccuggcacagauaaugaccagauuagcuuguaugcccaggcuucugggcguaucacuguguccaccaagagaucacaacagacaguaauuccaaacaucggaagcaggccccggguucgcgauauaccuaguagaauuucuaucuacuggaccauugugaaaccaggugacauccugcuaaucaauuccacgggcaaccucauugccccgaggggguacuuuaagauacggagcggaaagucgucuaucaugcgcuccgacgcgcccauuggcaaauguaauucagagugcaucacuccuaacgguaguauaccaaaugauaagcccuuccagaacgucaaucgaauuacauauggggcauguccuagauacgugaaacagaacacccugaaacuugccacuggaaugaggaaugugccagaaaagcaaacacggggcaucuuuggcgcuaucgccggguucauugagaacggaugggaagguauggucgacggcugguauggguuucgucaccagaauagcgagggaaucggccaggcagcugaucugaaguccacccaagccgcgauuaaccagauaaaugguaaauugaaccgccucaucgggaagacgaacgagaaguuccaccagauugaaaaagaguucucugaaguugagggcagaauccaggaccuggaaaaguacguggaggauaccaaaaucgacuuauggagcuauaaugccgaguuucugguagcacucgaaaaccaacauacaauugaucuuacugacucagagaugaauaagcuguucgaaaggaccaaaaagcaguugcgggagaacgcugaagauaugggaaauggcugcuuuaagauauaccacaaaugugacaacgccugcaucgggaguauucgaaauggaacauaugaucaugacguguaccgcgacgaggcucuaaacaauagauuccagaucaagggugucgagcugaaauccggcuacaaggauuggauucucuggaucagcuuugccauaucuugcuuccugcuuuguguggcacuguugggguuuaucaugugggccugccagaaaggaaacauuagguguaauaucugcauuuga

SEQ ID NO: 128594 - RNA, 1701 nt, Artificial Sequence
  derived and/or modified CDS sequence (opt3) from hemagglutinin__InfluenzaA__ABC42673
augaagaccaucauugcccugagcuacauacucugccuuaucuucgcucagaaacugcccggcaacgacaauuccacagcaacuuuguguuuagggcaccaugccgugccuaacggaacgauugucaagaccaucacaaaugaucaaauugagguuacuaacgcgaccgaacuggugcagucuucaaguacagguggcaucugcgacagcccacaccagauacuagauggggagaauuguacccucaucgacgcucugcuuggagauccgcagugcgacggcuuucaaaacaaaaagugggaucuguucguagaaagauccaaagccuauucuaauuguuaccccuaugacgugccugauuacgcaucguugaggucacucgucgccagcagugguacucuggaguuuaacaaugaauccuucaacuggacaggggugacccagaauggaacgucuagcgcuugcaagcggcgcuccaacaauucauuuuucagucgacugaacuggcucacucauuuaaaguuuaaauauccagcacugaauguuaccaugcccaacaacgagaaguucgacaaacuuuacauuuggggcgugcaccauccuggcacagauaaugaccagaucagcuuguaugcccaggcuucugggcguauuacugucuccaccaagagaucacaacagacagugaucccaaacauaggaagcaggccccggguacgcgauauuccuaguagaaucucuauuuacuggaccaucguuaaaccaggugacauccugcuaauuaauuccacgggcaaccucauagccccgaggggguacuuuaagauccggagcggaaagucgucuauuaugcgcuccgacgcgcccaucggcaaauguaauucagagugcauaacuccuaacgguaguauuccaaaugauaagcccuuccagaacgugaaucgaaucacauauggggcauguccuagauacgucaaacagaacacccugaaacuugccacuggaaugaggaaugugccagaaaagcaaacacggggcaucuuuggcgcuauugccggguucaucgagaacggaugggaagguaugguggacggcugguauggguuucgucaccagaauagcgagggaauuggccaggcagcugaucugaaguccacccaagccgcgauaaaccagaucaaugguaaauugaaccgccucauugggaagacgaacgagaaguuccaccagaucgaaaaagaguucucugaagucgagggcagaauccaggaccuggaaaaguacguugaggauaccaaaauugacuuauggagcuauaaugccgagcugcucguggcacuugaaaaccaacauacaauagaucugacugacucagagaugaauaaguuguuugaaaggaccaaaaagcagcuacgggagaacgcugaagauaugggaaauggcugcuucaagaucuaccacaaaugugacaacgccugcauugggaguauccgaaauggaacauaugaucaugacguauaccgcgacgaggcucugaacaauagauuucagauuaaggguguggagcucaaauccggcuacaaggauuggauccuguggaucagcuucgccauaucuugcuuucuucugugugucgcauugcucggguucauuaugugggccugccagaaaggaaacaucagguguaauauuugcaucuga

SEQ ID NO: 128595 - RNA, 1701 nt, Artificial Sequence; identical to SEQ ID NO: 128291
  derived and/or modified CDS sequence (opt3) from hemagglutinin__InfluenzaA__ABC42684

SEQ ID NO: 128596 - RNA, 1701 nt, Artificial Sequence; identical to SEQ ID NO: 128291
  derived and/or modified CDS sequence (opt3) from hemagglutinin__InfluenzaA__ABC42695

SEQ ID NO: 128597 - RNA, 1701 nt, Artificial Sequence
  derived and/or modified CDS sequence (opt3) from hemagglutinin__InfluenzaA__ABC42706
augaagaccaucauugcccugagcuacauacucugccuuguguucgcucagaaacugcccggcaacgacaauuccacagcaacuuuguguuuagggcaccaugccgucccuaacggaacgaccguuaagacaaucacuaaugaucaaauugaggugaccaacgcgacagaacugguacagucuucaaguaccgguggcaucugcgacagcccacaccagauucuagauggggagaauuguacucucaucgacgcucugcuuggagauccgcagugcgacggcuuucaaaacaaaaagugggaucuguucguggaaagauccaaagccuauucuaauuguuaccccuaugacgucccugauuacgcaucguugaggucacucguggccagcagugguacacuggaguuuaacaaugaauccuucaacuggaccgggguuacgcagaauggaacuucuagcgcuugcaagcggcgcuccaacaauucauuuuucagucgacugaacuggcucacccauuuaaaguuuaaauauccagcacugaaugugacaaugcccaacaacgagaaguucgacaaacuuuacauauggggcguccaccauccuggcacugauaaugaccagaucagcuuguaugcccaggcuucugggcguauuaccguguccacaaagagaucacaacagaccguaaucccaaacauuggaagcaggccccggguucgcgauaucccuaguagaauaucuauuuacuggacgaucgugaaaccaggugacauucugcuaaucaauuccacuggcaaccucaucgccccgaggggguacuuuaagauucggagcggaaagucgucuauaaugcgcuccgacgcgcccaucggcaaauguaauucagagugcauuacaccuaacgguaguaucccaaaugauaagcccuuccagaacgucaaucgaauaaccuauggggcauguccuagauacgugaaacagaacacucugaaacuugccacaggaaugaggaaugugccagaaaaacaaacccggggcauuuuuggcgcuaucgccggguucaucgagaacggaugggaagguauggucgacggcugguauggguuucgucaccagaauagcgagggaauuggccaggcagcugaucugaaguccacgcaagccgcgaucaaccagauuaaugguaaauugaaccgccucauagggaagaccaacgagaaguuccaccagaucgaaaaagaguucucugaaguugagggcaggauucaggaccuggaaaaguacguggaggauacaaaaaucgacuuauggagcuauaaugccgagcugcucguagcacuugaaaaccaacauacuaucgaucugaccgacucagagaugaauaaguuguuugaaagaacaaagaagcagcuacgggagaacgcugaagauaugggaaauggcugcuucaagauuuaccacaaaugugacaacgccugcauagggaguauccgaaauggaacuuaugaucaugacguguaccgcgacgaggcucugaacaauagauuucagauuaagggugucgagcucaaauccggcuacaaggauuggauccuguggauuagcuucgccaucucuugcuuucuucugugugugguuuugcucggguucauaaugugggcaugccagaaaggaaacaucagguguaauauuugcaucuga

SEQ ID NO: 128598 - RNA, 1701 nt, Artificial Sequence; identical to SEQ ID NO: 128291
  derived and/or modified CDS sequence (opt3) from hemagglutinin__InfluenzaA__ABC42717

SEQ ID NO: 128599 - RNA, 1701 nt, Artificial Sequence
  derived and/or modified CDS sequence (opt3) from hemagglutinin__InfluenzaA__ABC42728
augaagaccaucauugcccugagcuacauacucugccuuguguucgcucagaaacugcccggcaacgacaauuccacagcaacuuuguguuuagggcaccaugccgucccuaacggaacgguugugaagaccaucacaaaugaucaaauugagguaacuaacgcgaccgaacuggugcagucuucaaguacagguggcaucugcgacagcccacaccagauucuagauggggagaauuguacccucauggacgcucugcuuggagauccgcagugcgacggcuuucaaaacaaaaagugggaucuguucgucgaaagauccagggccuauucuaauuguuaccccuaugacgugccugauuacgcaucguugcggucacucguugccagcagugguacucuggaguuuaacaaugaauccuucaacuggacaggggugacccagaauggaacgucuagcgcuugcaaacgccgauccaacaauucauuuuucagucgucugaacuggcucacucauuuaaaguuuaaguauccagcacugaaugucaccaugcccaacaacgagaaauucgacaaguuguacaucuggggcgugcaccauccuggcacagauaaugaccagauaagccuuuaugcccaggcuucugggagaaucacuguauccaccaaaaggucacaacagacaguuauuccaaacaucggaagccggccccgcgugagagauauuccuaguaggaucucuauauacuggaccauugucaagccaggugacauccugcuaauuaauuccacgggcaaccucaucgccccgcggggguacuuuaaaauccgcagcggaaagucgucuauuaugcgauccgacgcgcccauaggcaaguguaauucagagugcaucacuccuaacgguaguauuccaaaugauaaacccuuccagaacgugaauagaaucacauauggggcauguccuagguacgugaagcagaacacccugaaacuugccacuggaaugcggaaugucccagaaaagcaaacacguggcauauuuggcgcuauugccggguucaucgagaacggaugggaagguaugguugacggcugguauggguuucgccaccagaauagcgagggaaccggccaggcagcugaucugaaauccacgcaagccgcgaucaaccagauuaaugguaaguugaacagacucaucgggaaaaccaacgagaaguuccaccagauugaaaaggaguucucugaaguggagggcaggauacaggaccuggaaaaauacguagaggauacaaagaucgacuuauggagcuauaaugccgagcugcucguggcacuugaaaaccaacauacuauugaucugaccgacucagagaugaauaaauuguuugaacggacaaagaaacagcuacgagagaacgcugaagauaugggaaauggcugcuucaagaucuaccacaagugugacaacgccugcaucgggaguauucgcaauggaacuuaugaucaugacgucuacagagacgaggcucugaacaauagguuucagauaaaagguguggagcucaaguccggcuacaaagauuggauccuguggauuagcuucgccaucucuugcuuucuucuguguguuguguugcucggguucauuaugugggcaugccagaagggaaacauccgguguaauauaugcaucuga

SEQ ID NO: 128600 - RNA, 1701 nt, Artificial Sequence; identical to SEQ ID NO: 128291
  derived and/or modified CDS sequence (opt3) from hemagglutinin__InfluenzaA__ABC42739

SEQ ID NO: 128601 - RNA, 1698 nt, Artificial Sequence
  derived and/or modified CDS sequence (opt3) from hemagglutinin__InfluenzaA__ABC42750
augaaggugaaacugcucguccuucugugcaccuucacagccacuuacgcugacacgaucuguauuggcuaucacgcaaacaauagcaccgauacaguugacacuguguuggagaagaacguaaccgugacacauuccgucaauuuacuggaagauucucacaacgggaaacuaugccuccugaagggaauagcgccccuucagcuggguaauuguucaguggccggcuggaucuuggggaacccugagugcgaacuccugauuaguaaagagagcugguccuacaucguugaaaagccaaauccggagaacggaaccuguuaucccggccauuuugcugacuacgaggaacugagagagcaacucucuucggugagcucauucgaaagguuugagauuuucccuaaggagaguuccuggccaaaucacacugucacaggugugucugccagcugcucccauaacgggaaaucaaguuuuuauaagaauuuacuguggcuuaccggaaagaacggcuuguaccccaaucugagcaagucuuaugcaaacaauaaagaaaaggaggugcuaguucucuggggcgugcaccacccuccaaacaucggggaucagaaggcccuguaccauacggaaaacgcuuacgucuccguggugucaagccacuauagucggaaauucacucccgagauagcaaagcgcccuaaaguccgagaccaggaaggacguaucaauuacuauuggacccuucuggagccaggugauacaauuaucuuugaggccaacggcaauuugauugcuccgagauacgccuucgcgcucucuaggggguuuggauccggcaucauaaacagcaaugcacccauggacgaaugugaugccaagugccagacuccucaaggugcuauuaacucgucucugccauuccagaauguucaucccgugaccaucggggaguguccuaaauauguacgguccgccaaguuacgcauggugacaggacugagaaacauuccaucaauccagaguaggggccucuuuggcgcaaucgcuggguucauugaaggagguuggaccggcauggucgacgggugguacggauaucaccaccagaaugagcaaggcagcgguuacgccgcggaucagaaauccacgcagaacgccauaaaugggaucacuaacaagguaaauucuguuauugaaaagaugaacacacaguuuaccgcagugggcaaagaguucaauaaacuugagcggcgcauggaaaaccugaacaaaaaggucgacgauggauucaucgacauauggacuuacaaugcugaguugcuagugcugcucgaaaacgagcgaacacuggacuuucaugauagcaauguuaaaaaccuuuaugaaaagguaaagucacaacugaaaaauaacgccaaggagauuggcaaugggugcuucgaguuuuaccacaaauguaacgacgaaugcauggagagugugaagaauggaaccuaugauuaccccaaauauuccgaagagagcaaguugaacagagagaagaucgacggugucaaacucgaaucuaugggcguguaccagauccuggcuauuuauucaacggucgccaguagcuuagugcugcuaguuucccucggggcaaucucuuucuggaugugcucgaauggaagccugcaguguaggauuugcauauga

SEQ ID NO: 128602 - RNA, 1701 nt, Artificial Sequence; identical to SEQ ID NO: 128291
  derived and/or modified CDS sequence (opt3) from hemagglutinin__InfluenzaA__ABC42761

SEQ ID NO: 128603 - RNA, 1701 nt, Artificial Sequence
  derived and/or modified CDS sequence (opt3) from hemagglutinin__InfluenzaA__ABC42772
augaagaccaucauugcccugagcuacauacucugccuuguguucgcucagaaacugcccggcaacgacaauuccacagcaacuuuguguuuagggcaccaugccgucccuaacggaacgaucguuaagaccauuacaaaugaucaaaucgaggugacuaacgcgaccgaacugguacagucuucaaguacagguggcauuugcgacagcccacaccagauccuagauggggagaauuguacccucauagacgcucugcuuggagauccgcagugcgacggcuuucaaaacaaaaagugggaucuguucguggaaagauccaaagccuauucuaauuguuaccccuaugacgucccugauuacgcaucguugaggucacucguggccagcagugguacucuggaguuuaacaaugaauccuucaacuggacagggguuacccagaauggaacgucuagcgcuugcaagcggcgcuccaacaauucauuuuucagucgacugaacuggcucacucauuuaaaguuuaaauauccagcacugaaugugaccaugcccaacaacgagaaguucgacaaacuuuacaucuggggcguccaccauccuggcacagauaaugaccagauuagcuuguaugcccaggcuucugggcguaucacuguguccaccaagagaucacaacagacaguaauuccaaacaucggaagcaggccccggguucgcgauauaccuaguagaauuucuaucuacuggaccauugugaaaccaggugacauccugcuaaucaauuccacgggcaaccucauugccccgaggggguacuuuaagauacggagcggaaagucgucuaucaugcgcuccgacgcgcccauuggcaaauguaauucagagugcaucacuccuaacgguaguauaccaaaugauaagcccuuccagaacgucaaucgaauuacauauggggcauguccuagauacgugaaacagaacacccugaaacuugccacuggaaugaggaaugugccagaaaagcaaacacggggcaucuuuggcgcuaucgccggguucauugagaacggaugggaagguauggucgacggcugguauggguuucgucaccagaauagcgagggaaucggccaggcagcugaucugaaguccacccaagccgcgauuaaccagauaaaugguaaauugaaccgccucaucgggaagacgaacgagaaguuccaccagauugaaaaagaguucucugaaguugagggcagaauccaggaccuggaaaaguacguggaggauaccaaaaucgacuuauggagcuauaaugccgagcugcucguagcacuugaaaaccaacauacaauugaucugacugacucagagaugaauaaguuguuugaaaggaccaaaaagcagcuacgggagaacgcugaagauaugggaaauggcugcuucaagauauaccacaaaugugacaacgccugcaucgggaguauucgaaauggaacauaugaucaugacguguaccgcgacgaggcucugaacaauagauuucagaucaaguccgucgagcucaaaagcgguuacaaggauuggauucuguggaucucuuucgccauaucaugcuuucuucuguguguggcauugcucggcuucaucaugugggccugccagaaagggaacauuagguguaauaucugcauuuga

SEQ ID NO: 128604 - RNA, 1701 nt, Artificial Sequence; identical to SEQ ID NO: 128291
  derived and/or modified CDS sequence (opt3) from hemagglutinin__InfluenzaA__ABC42783

SEQ ID NO: 128605 - RNA, 1701 nt, Artificial Sequence; identical to SEQ ID NO: 128291
  derived and/or modified CDS sequence (opt3) from hemagglutinin__InfluenzaA__ABC42794

SEQ ID NO: 128606 - RNA, 1701 nt, Artificial Sequence; identical to SEQ ID NO: 128291
  derived and/or modified CDS sequence (opt3) from hemagglutinin__InfluenzaA__ABC42805

SEQ ID NO: 128607 - RNA, 1701 nt, Artificial Sequence; identical to SEQ ID NO: 128330
  derived and/or modified CDS sequence (opt3) from hemagglutinin__InfluenzaA__ABC42816

SEQ ID NO: 128608 - RNA, 1701 nt, Artificial Sequence
  derived and/or modified CDS sequence (opt3) from hemagglutinin__InfluenzaA__ABC42827
augaagaccaucauugcccugagcuacauacucugccuuguguucgcucagaaacugcccggcaacgacaauuccacagcaacuuuguguuuagggcaccaugccgucccuaacggaacgaucguuaagaccauuacaaaugaucaaaucgaggugacuaacgcgaccgaacugguacagucuucaaguacagguggcauuugcgacagcccacaccagauccuagauggggagaauuguacccucauagacgcucugcuuggagauccgcagugcgacggcuuucaaaacaaaaagugggaucuguucguggaaagauccaaagccuauucuaauuguuaccccuaugacgucccugauuacgcaucguugaggucacucguggccagcagugguacucuggaguuuaacaaugaauccuucaacuggacagggguuacccagaauggaacgucuagcgcuugcaagcggcgcuccaacaauucauuuuucagucgacugaacuggcucacucauuuaaaguuuaaauauccagcacugaaugugaccaugcccaacaacgagaaguucgacaaacuuuacaucuggggcguccaccauccuggcacagauaaugaccagauuagcuuguaugcccaggcuucugggcguaucacuguguccaccaagagaucacaacagacaguaauuccaaacaucggaagcaggccccggguucgcgauauaccuaguagaaugucuauuuacuggaccaucgugaaaccaggugacauucugcuaaucaauuccacgggcaaccucaucgccccgaggggguacuuuaagauucggagcggaaagucgucuauaaugcgcuccgacgcgcccaucggcaaauguaauucagagugcauuacuccuaacgguaguaucccaaaugauaagcccuuccagaacgucaaucgaauaacauauggggcauguccuagauacgugaaacagaacacccugaaacuugccacuggaaugaggaaugugccagaaaagcaaacacggggcauuuuuggcgcuaucgccggguucaucgagaacggaugggaagguauggucgacggcugguauggguuucgucaccagaauagcgagggaauuggccaggcagcugaucugaaguccacccaagccgcgaucaaccagauuaaugguaaauugaaccgccucauagggaagacgaacgagaaguuccaccagaucgaaaaagaguucucugaaguugagggcaggauucaggaccuggaaaaguacguggaggauaccaaaaucgacuuauggagcuauaaugccgagcugcucguagcacuugaaaaccaacauacaaucgaucugacugacucagagaugaauaaguuguuugaaagaaccaaaaagcagcuacgggagaacgcugaagauaugggaaauggcugcuucaagauuuaccacaaaugugacaacgccugcauagggaguauccgaaauggaacauaugaucaugacguguaccgcgacgaggcucugaacaauagauuucagauuaagggugucgagcucaaauccggcuacaaggauuggauccuguggauuagcuucgccaucucuugcuuucuucuguguguggcauugcucggguucauaaugugggccugccagaaaggaaacaucagguguaauauuugcaucuga

SEQ ID NO: 128609 - RNA, 1701 nt, Artificial Sequence; identical to SEQ ID NO: 128291
  derived and/or modified CDS sequence (opt3) from hemagglutinin__InfluenzaA__ABC42849

SEQ ID NO: 128610 - RNA, 1701 nt, Artificial Sequence
  derived and/or modified CDS sequence (opt3) from hemagglutinin__InfluenzaA__ABC42882
augaagaccaucauugcccugagcuacauacucugccuuguguucgcucagaaacugcccggcaacgacaauuccacagcaacuuuguguuuagggcaccaugccgucccuaacggaacgcugguuaagaccaucacaaaugaucaaauugaggugacuaacgcgaccgaauugguacagucuucaaguacagguagaaucugcgacagcccacaccagauucucgauggcgagaauuguacccugaucgacgcccuucugggggauccgcauugcgacggauuucagaacaaagaaugggauuuguucguggagagguccaaggcuuauucuaauuguuaccccuaugacgucccugauuacgugucgcuccggucacugguugcaagcaguggcacucuggaauuuaacaaugaguccuucaacuggacagguguggcccaaaaugggaccucuagcgcuugcaaacgccgauccgacaagucauuuuucagucgucucaacugguuacaccagcugaaguauaaauacccagcacuuaaugucacgaugcccaacaaugagaaguuugauaaauuguauauauggggagugcaucacccuggcacugacagcgaucagaucucucuguacgcccaggcuuccggcagaguaaccguuucaacaaagaggagccaacagacugugauuccaaacaucgggagucggcccuggguccgcggagugucuuccagaauuagcaucuacuggaccauagugaaaccuggugacauucuacucaucaacucgacaggcaaucugauugccccaaggggguauuucaagauccggucuggaaaguccucaaucaugcgcagugacgcgccgauuggcaaauguaacagcgaaugcauaacccccaaugguuccaucccuaacgauaagccauuucagaaugucaaccgaauuacguacggggcaugucccagauauguuaaacagaauacucuuaagcuggccacaggaaugaggaacgugccugagaaacaaacccggggcaucuucggcgcuauagccggguuuauugaaaauggaugggaggguaugauggacggcugguacggguuccgucaccagaacucugagggaacuggccaggcagcugaucuaaagagcacacaagccgcgaucaaucagaucaacgguaaacucaaucgccugauugaaaagaccaacgagaaguuucaucagaucgaaaaagaguucucagaaguagaggggaggauucaggacuuagagaaguauguggaagauacgaaaauagaccuguggaguuacaaugccgagcuccuugucgcacuggaaaaccaacacaccaucgauuugacagacuccgagaugaacaagcuauucgaaagaacuaaaaagcagcugcgggagaaugcugaggauaugggcaacggaugcuuuaagauuuaucauaaaugugacaaugccugcaucggcagcauccgaaacgggaccuacgaucacgacguguaccgcgacgaagcucucaauaacagauuccagauuaagggaguugagcugaaaucugguuauaaggauugggugcuuuggauaucauuugccaucaguugcuuccuguuguguauuguccuccugggcuuuaucaugugggcaugccagaaagggaauauuagguguaacaucugcauauga

SEQ ID NO: 128611 - RNA, 1701 nt, Artificial Sequence; identical to SEQ ID NO: 128610
  derived and/or modified CDS sequence (opt3) from hemagglutinin__InfluenzaA__ABC42893

SEQ ID NO: 128612 - RNA, 1701 nt, Artificial Sequence; identical to SEQ ID NO: 128564
  derived and/or modified CDS sequence (opt3) from hemagglutinin__InfluenzaA__ABC42929

SEQ ID NO: 128613 - RNA, 1701 nt, Artificial Sequence; identical to SEQ ID NO: 128564
  derived and/or modified CDS sequence (opt3) from hemagglutinin__InfluenzaA__ABC42940

SEQ ID NO: 128614 - RNA, 1701 nt, Artificial Sequence; identical to SEQ ID NO: 128564
  derived and/or modified CDS sequence (opt3) from hemagglutinin__InfluenzaA__ABC42951

SEQ ID NO: 128615 - RNA, 1701 nt, Artificial Sequence; identical to SEQ ID NO: 128564
  derived and/or modified CDS sequence (opt3) from hemagglutinin__InfluenzaA__ABC42962

SEQ ID NO: 128616 - RNA, 1701 nt, Artificial Sequence; identical to SEQ ID NO: 128564
  derived and/or modified CDS sequence (opt3) from hemagglutinin__InfluenzaA__ABC42973

SEQ ID NO: 128617 - RNA, 1701 nt, Artificial Sequence; identical to SEQ ID NO: 128564
  derived and/or modified CDS sequence (opt3) from hemagglutinin__InfluenzaA__ABC42995

SEQ ID NO: 128618 - RNA, 1701 nt, Artificial Sequence; identical to SEQ ID NO: 128564
  derived and/or modified CDS sequence (opt3) from hemagglutinin__InfluenzaA__ABC43006

SEQ ID NO: 128619 - RNA, 1701 nt, Artificial Sequence; identical to SEQ ID NO: 128564
  derived and/or modified CDS sequence (opt3) from hemagglutinin__InfluenzaA__ABC43028

SEQ ID NO: 128620 - RNA, 1701 nt, Artificial Sequence; identical to SEQ ID NO: 128564
  derived and/or modified CDS sequence (opt3) from hemagglutinin__InfluenzaA__ABC43039

SEQ ID NO: 128621 - RNA, 1701 nt, Artificial Sequence; identical to SEQ ID NO: 128564
  derived and/or modified CDS sequence (opt3) from hemagglutinin__InfluenzaA__ABC43050

SEQ ID NO: 128622 - RNA, 1701 nt, Artificial Sequence; identical to SEQ ID NO: 128564
  derived and/or modified CDS sequence (opt3) from hemagglutinin__InfluenzaA__ABC43061

SEQ ID NO: 128623 - RNA, 1701 nt, Artificial Sequence
  derived and/or modified CDS sequence (opt3) from hemagglutinin__InfluenzaA__ABC43072
augaagaccaucauugcccugagcuacauacucugccuuguguucgcucagaaacugcccggcaacgacaauuccacagcaacuuuguguuuagggcaccaugccgucccuaacggaacgaucguuaagaccauuacaaaugaucaaaucgaggugacuaacgcgaccgaacugguacagucuucaaguacagguggcauuugcgacagcccacaccagauccuagauggggagaauuguacccucauagacgcucugcuuggagauccgcagugcgacggcuuucaaaacaaaaagugggaucuguucguggaaagauccaaagccuauucuaauuguuaccccuaugacgucccugaucaugcaucguugaggucacucguggccagcagugguacucuggaguuuaacaaugaauccuucgacuggacagggguuacccagaacggaacgucuagcgcuugcaagcggcgcuccaauaagucauuuuucagucgacugaacuggcucacucacuuaaaauacaaguauccagcacugaaugugaccaugcccaacaaugagaaauuugauaaacuuuacaucuggggcguccaucacccuggcacagacagcgaucagauuucuuuguaugcccaggcuuccgggcguaucacugugucaaccaagagaagccaacagacaguaauuccaaacaucggaaguaggccccggguucgcgacgugucuuccagaauaagcauuuacuggaccaucgucaagccuggugacauucugcuaaucaacucgacgggcaaucucaucgccccaaggggguacuucaagauucggucuggaaaauccucaauaaugcgcagugaugcgccgaucggcaaguguaacagcgagugcauuacucccaaugguuccaucccuaacgacaaaccauuucagaaugugaaccgaauaacauauggggcaugucccagauacgugaagcagaauacccugaaacuugccacuggaaugaggaacgucccugaaaagcaaacacggggcauuuucggcgcuaucgccggguuuaucgagaauggaugggaagguaugguugauggcugguauggguuccgucaccagaacucugagggaaccggccaggcagcugaccugaaaagcacgcaagccgcgauuaaucagaucaacgguaaguugaaucgccucauugggaagaccaacgagaaauuucaucagauagaaaaggaguucucagaaguggagggcagaauccaggaucuggaaaaauacguagaggacacaaagauugauuuauggaguuauaaugccgagcugcucguggcacuugaaaaccaacacacuaucgaccugaccgauuccgagaugaacaaauuguucgaaaagacaaagaaacagcuaagggagaaugcugaagacaugggaaacggcugcuuuaagaucuaccauaaaugugauaaugccugcauugggagcauacggaacggaacuuaugaccacgacgucuaccgagaugaggcucugaauaaccgcuuccagaucaaggguguggagcucaaaucuggcuacaaggacuggauucuguggaucucauuuaccauuaguugcuuccuucuguguguugccuugcucggguuuaucaugugggcaugccagaagggaaauauaagauguaacaucugcauuuga

SEQ ID NO: 128624 - RNA, 1701 nt, Artificial Sequence; identical to SEQ ID NO: 128564
  derived and/or modified CDS sequence (opt3) from hemagglutinin__InfluenzaA__ABC43083

SEQ ID NO: 128625 - RNA, 1701 nt, Artificial Sequence; identical to SEQ ID NO: 128564
  derived and/or modified CDS sequence (opt3) from hemagglutinin__InfluenzaA__ABC43094

SEQ ID NO: 128626 - RNA, 1701 nt, Artificial Sequence; identical to SEQ ID NO: 128564
  derived and/or modified CDS sequence (opt3) from hemagglutinin__InfluenzaA__ABC43116

SEQ ID NO: 128627 - RNA, 1701 nt, Artificial Sequence; identical to SEQ ID NO: 128291
  derived and/or modified CDS sequence (opt3) from hemagglutinin__InfluenzaA__ABC43127

SEQ ID NO: 128628 - RNA, 1701 nt, Artificial Sequence; identical to SEQ ID NO: 128330
  derived and/or modified CDS sequence (opt3) from hemagglutinin__InfluenzaA__ABC43138

SEQ ID NO: 128629 - RNA, 1701 nt, Artificial Sequence; identical to SEQ ID NO: 128291
  derived and/or modified CDS sequence (opt3) from hemagglutinin__InfluenzaA__ABC43149

SEQ ID NO: 128630 - RNA, 1701 nt, Artificial Sequence; identical to SEQ ID NO: 128291
  derived and/or modified CDS sequence (opt3) from hemagglutinin__InfluenzaA__ABC43160

SEQ ID NO: 128631 - RNA, 1701 nt, Artificial Sequence; identical to SEQ ID NO: 128291
  derived and/or modified CDS sequence (opt3) from hemagglutinin__InfluenzaA__ABC43171

SEQ ID NO: 128632 - RNA, 1701 nt, Artificial Sequence; identical to SEQ ID NO: 128291
  derived and/or modified CDS sequence (opt3) from hemagglutinin__InfluenzaA__ABC43182

SEQ ID NO: 128633 - RNA, 1701 nt, Artificial Sequence
  derived and/or modified CDS sequence (opt3) from hemagglutinin__InfluenzaA__ABC43475
augaagaccaucauugcccugagcuacauacucugccuuguguucgcucagaaacugcccggcaacgacaauuccacagcaacuuuguguuuagggcaccaugccgucccuaacggaacgaccguuaagacaaucacuaaugaucaaauugaggugaccaacgcgacagaacugguacagucuucaaguaccgguggcaucugcgacagcccacaccagauucuagauggggagaauuguacucucaucgacgcucugcuuggagauccgcagugcgacggcuuucaaaacaaaaagugggaucuguucguggaaagauccaaagccuauucuaauuguuaccccuaugacgucccugauuacgcaucguugaggucacucguggccagcagugguacacuggaguuuaacaaugaauccuucaacuggaccgggguuacgcagaauggaacuucuagcgcuugcaagcggcgcuccaacaauucauuuuucagucgacugaacuggcucacccauuuaaaguuuaaauauccagcacugaaugugacaaugcccaacaacgagaaguucgacaaacuuuacauauggggcguccaccauccuggcacugauaaugaccagaucagcuuguaugcccaggcuucugggcguauuaccguguccacaaagagaucacaacagaccguaaucccaaacauuggaagcaggccccggguucgcgauaucccuaguagaauaucuauuuacuggacgaucgugaaaccaggugacauucugcuaaucaauuccacuggcaaccucaucgccccgaggggguacuuuaagauucggagcggaaagucgucuauaaugcgcuccgacgcgcccaucggcaaauguaauucagagugcauuacaccuaacgguaguaucccaaaugauaagcccuuccagaacgucaaucgaauaaccuauggggcauguccuagauacgugaaacagaacacucugaaacuugccacaggaaugaggaaugugccagaaaaacaaacccggggcauuuuuggcgcuaucgccggguucaucgagaacggaugggaagguauggucgacggcugguauggguuucgucaccagaauagcgagggaauuggccaggcagcugaucugaaguccacgcaagccgcgaucaaccagauuaaugguaaauugaaccgccucauagggaagaccaacgagaaguuccaccagaucgaaaaagaguucucugaaguugagggcaggauucaggaccuggaaaaguacguggaggauacaaaaaucgacuuauggagcuauaaugccgagcugcucguagcacuugaaaaccaacauacuaucgaucugaccgacucagagaugaauaaguuguuugaaagaacaaagaagcagcuacgggagaacgcugaagauaugggaaauggcugcuucaagauuuaccacaaaugugacaacgccugcauagggaguauccgaaauggaacuuaugaucaugacguguaccgcgacgaggcucugaacaauagauuucagauuaagggugucgagcucaaauccggcuacaaggauuggauccuguggauuagcuucgccaucucuugcuuucuucuguguguggcauugcucggguucauaaugugggccugccagaaaggaaacaucagguguaauauuugcaucuga

SEQ ID NO: 128634 - RNA, 1701 nt, Artificial Sequence; identical to SEQ ID NO: 128291
  derived and/or modified CDS sequence (opt3) from hemagglutinin__InfluenzaA__ABC43486

SEQ ID NO: 128635 - RNA, 1701 nt, Artificial Sequence; identical to SEQ ID NO: 128291
  derived and/or modified CDS sequence (opt3) from hemagglutinin__InfluenzaA__ABC43497

SEQ ID NO: 128636 - RNA, 1701 nt, Artificial Sequence; identical to SEQ ID NO: 128330
  derived and/or modified CDS sequence (opt3) from hemagglutinin__InfluenzaA__ABC43508

SEQ ID NO: 128637 - RNA, 1701 nt, Artificial Sequence; identical to SEQ ID NO: 128330
  derived and/or modified CDS sequence (opt3) from hemagglutinin__InfluenzaA__ABC43519

SEQ ID NO: 128638 - RNA, 1701 nt, Artificial Sequence; identical to SEQ ID NO: 128330
  derived and/or modified CDS sequence (opt3) from hemagglutinin__InfluenzaA__ABC43530

SEQ ID NO: 128639 - RNA, 1701 nt, Artificial Sequence
  derived and/or modified CDS sequence (opt3) from hemagglutinin__InfluenzaA__ABC43552
augaagaccaucauugcccugagcuacauacucugccuuguguucgcucagaaacugcccggcaacgacaauuccacagcaacuuuguguuuagggcaccaugccgucccuaacggaacgaucguuaagaccauuacaaaugaucaaaucgaggugacuaacgcgaccgaacugguacagucuucaaguacagguggcauuugcgacagcccacaccagauccuagauggggagaauuguacccucauagacgcucugcuuggagauccgcagugcgacggcuuucaaaacaaaaagugggaucuguucguggaaagauccaaagccuauucuaauuguuaccccuaugacgucccugauuacgcaucguugaggucacucguggccagcagugguacucuggaguuuaacaaugaauccuucaacuggacagggguuacccagaauggaacgucuagcgcuugcaagcggcgcuccaacaauucauuuuucagucgacugaacuggcucacucauuuaaaguuuaaauauccagcacugaaugugaccaugcccaacaacgagaaguucgacaaacuuuacaucuggggcguccaccauccuggcacagauaaugaccagauuagcuuguaugcccaggcuccagggcguaucacugugucuaccaagagaucccaacagacaguaauucccaacaucggaucaaggccucggguucgcgauauaccaagcagaauuaguaucuacuggaccauugugaaaccgggugacauccugcuaaucaauucuacgggcaaccucauugcccccaggggguacuuuaagauacgguccggaaagagcucgaucaugcgcucugacgcgccuauuggcaaauguaauuccgagugcaucacuccaaacgguucaauacccaaugauaagccuuuccagaacgucaaucgaauuacauauggggcauguccaagauacgugaaacagaacacccugaagcuggccacuggaaugaggaaugugcccgaaaaacaaacacggggcaucuuuggcgcuaucgccggguucauugagaacggaugggaagguauggucgacggcugguauggguuucgucaccagaauagugagggaaucggccaggcagcugaucuuaagagcacccaagccgcgauuaaccagauaaaugguaaauugaaccgccucaucgggaagacgaacgagaaguuccaccagauugaaaaagaguucuccgaaguugagggcagaauccaggaccuggaaaaguacguggaggauaccaaaaucgacuuauggucuuauaaugccgagcugcucguagcacuugaaaaccaacauacaauugaucugacugacagcgagaugaauaaguuguuugaaaggaccaaaaagcagcuacgggagaacgcugaagauaugggaaauggcugcuucaagauauaccacaaaugugacaacgccugcaucgggucaauucgaaauggaacauaugaucaugacguguaccgcgacgaggcucugaacaauagauuucagaucaagggugucgagcucaaaaguggcuacaaggauuggauucuguggaucuccuucgccauaagcugcuuucuucuguguguggcauugcucggguucaucaugugggccugccagaaaggaaacauuagguguaauaucugcauuuga

SEQ ID NO: 128640 - RNA, 1701 nt, Artificial Sequence
  derived and/or modified CDS sequence (opt3) from hemagglutinin__InfluenzaA__ABC46554
augaagaccaucauugcccugagcuacauauucugccagguguuugcucaaaaccuccccggcaaugacaacuccacagcaacucuuugucuggggcaccaugccgucccuaauggaacguugguuaaaaccaucacaaacgaucagauugaggugacuaaugcgaccgaauuaguacagucuucaaguacagguagaaucugcgacagcccacacaggauucuggauggcaagaacuguacccuaaucgacgcucuccugggggauccgcauugcgacggauuccagaaugagaaaugggaucuuuuuguggaacgguccaaggccuucucuaacuguuaucccuacgacgucccugauuaugcaucgcugcgcucauugguggccagcaguggcacucucgaguuuauaaaugaagguuucaacuggacagggguuacccaagacggaggcuccuacgcuugcaaacgaggcccagauaauagcuuuuucucucgucugaacuggcuguauaaguccgagucaacguaccccgugcucaaugucacuaugccuaacaaugacaacuuugauaaguuauauaucuggggagugcaccauccaaguaccgacaaagagcagacaaaccuguacguacaggcaagcgggagaguuacugugucuaccaagaggucccagcaaacaauuauccccaaugucgguucacggccuugggugcgcggccuuagcaguagaauuucuaucuacuggaccauagugaaaccaggggacauuuugcugaucaacuccaauggaaaccuaauugccccgaggggcuauuucaagauccggacggguaaaagcucgaucaugcgcucugaugcucccauugggacuuguuccucagaaugcauaacaccuaauggaaguaucccaaacgacaagcccuuucagaaugucaacaagauuaccuacggcgccuguccuaaauauguuaagcagaauacucucaaacuggcgacaggcaugcgaaacgugccagagaagcagaccagagggaucuucggagcaauagccgguuuuauugaaaauggcugggaggggaugaucgauggaugguacggcuucaggcaccaaaacagcgaggguacggggcaggcugccgaccuuaaauccacccaggcagcuaucgaucaaauuaauggcaagcugaaccggguaaucgagaaaacaaaugaaaaguuccaccagauugaaaaggaguuuucugaaguggagggacguauacaggacuuggagaaauaugucgaagauacuaagaucgaccucuggagcuacaacgccgagcuguuaguggcgcuggaaaaccagcauaccauugaucucacagacucagagaugaauaaacuuuucgaaaagacucgcagacaacugagggagaacgccgaggauaugggcaaugggugcuuuaaaaucuaucacaagugugacaacgcaugcaucggaaguauucggaaugguaccuacgaccaugauguuuaccgagacgaggcuuugaacaaucgcuuccagauaaagggcguggaacuaaaauccggguauaaggauuggauccuguggauuagcuuugccaucucuugcuuccuccugugugucgugcuucugggauuuauuaugugggcuugccagaaaggcaacaucagauguaauauaugcaucuga

SEQ ID NO: 128641 - RNA, 1701 nt, Artificial Sequence
  derived and/or modified CDS sequence (opt3) from hemagglutinin__InfluenzaA__ABC46576
augaagaccaucauugcccugagcuacauauucugccucguguuugcucagaaccuucccggcaaugacaaauccacagcaacucuguguuuggggcaccaugccgucccuaacggaacguuaguuaagaccaucacaaaugaucaaauugaggugacuaacgcgaccgaacugguacagucuucaaguacagguagaaucugcgacagcccacacaggauucuagauggcaaaaauuguacccucguggacgcucugcuuggggauccgcauugcgacggauuccagaacgagaagugggaucuguuugucgaacgguccaaagccuucucuaauuguuaucccuacgacgugccugauuaugcaucguugcgcucacucguugccagcaguggcacucuggaguuuaucaacgaauccuucaauuggacaggugugacccagucugggggaagcuacgcuugcaagcgaggcuccgacaacucauuuuucagucgucugaauuggcucuaugagagcgagucuaaguacccagucuuaaacgugacgaugcccaauaacggcaauuuugauaaacuguauauauggggaguacaccauccuuccacugacaaggaacaaaccaaccuuuacguuagagcaucagggagggugacagucagcacuaaacggagucagcagaccaucauuccaaacaucgguucucgccccugggugagaggcuuguccagcaggauuucgaucuacuggacaauagugaagccuggggauauucugcuaaucaauucuaacggaaaucucauugccccacggggcuauuucaaaauccgcaccgguaaguccucaaucaugcgaagugacgcuccgauugggacguguagcuccgagugcauaacucccaacggaucuaucccuaaugacaagccauuucagaacgucaauaaaauuacauacggcgccugucccaaguauguuaaacaaaacacccugaaacuugcgacuggcaugagaaaugugccugaaaagcagacaagggggaucuucggagcaauagccgguuuuauugagaacggcugggaggggaugguagauggaugguacggcuuccggcaccagaauagcgaagguaccgggcaggcugccgaccugaagucaacgcaagcagcuaucgaucagaucaacggcaaauugaaucgugugauugagaagaccaacgaaaaguuccaccagaucgagaaagaauuuagugaggucgagggacgcauucaagaccucgaaaaguauguggaggauacaaaaauagaccugugguccuacaaugccgaauuacugguugcgcucgagaaccagcauacuaucgaucuuaccgacagcgaaaugaacaagcuguucgagaaaacaagaaggcaguugcgggagaaugccgaagauaugggcaacgggugcuuuaagauuuaucacaagugugacaaugcaugcaucggaucuauccgaaacgguacuuacgaucaugacguguaccgcgacgaggcucuaaauaacagauuccagauuaaaggcgucgaacugaagucaggguauaaagauuggauacucuggaucaguuuugccauuagcugcuuccugcuuugugugguacuguugggauuuaucaugugggcuugccaaaagggcaauauuagguguaacaucugcauauga

SEQ ID NO: 128642 - RNA, 1701 nt, Artificial Sequence; identical to SEQ ID NO: 128500
  derived and/or modified CDS sequence (opt3) from hemagglutinin__InfluenzaA__ABC50167

SEQ ID NO: 128643 - RNA, 1701 nt, Artificial Sequence; identical to SEQ ID NO: 128500
  derived and/or modified CDS sequence (opt3) from hemagglutinin__InfluenzaA__ABC50178

SEQ ID NO: 128644 - RNA, 1701 nt, Artificial Sequence; identical to SEQ ID NO: 128500
  derived and/or modified CDS sequence (opt3) from hemagglutinin__InfluenzaA__ABC50189

SEQ ID NO: 128645 - RNA, 1701 nt, Artificial Sequence; identical to SEQ ID NO: 128610
  derived and/or modified CDS sequence (opt3) from hemagglutinin__InfluenzaA__ABC50200

SEQ ID NO: 128646 - RNA, 1701 nt, Artificial Sequence; identical to SEQ ID NO: 128610
  derived and/or modified CDS sequence (opt3) from hemagglutinin__InfluenzaA__ABC50211

SEQ ID NO: 128647 - RNA, 1701 nt, Artificial Sequence; identical to SEQ ID NO: 128610
  derived and/or modified CDS sequence (opt3) from hemagglutinin__InfluenzaA__ABC50222

SEQ ID NO: 128648 - RNA, 1701 nt, Artificial Sequence; identical to SEQ ID NO: 128610
  derived and/or modified CDS sequence (opt3) from hemagglutinin__InfluenzaA__ABC50233

SEQ ID NO: 128649 - RNA, 1701 nt, Artificial Sequence; identical to SEQ ID NO: 128610
  derived and/or modified CDS sequence (opt3) from hemagglutinin__InfluenzaA__ABC50244

SEQ ID NO: 128650 - RNA, 1701 nt, Artificial Sequence; identical to SEQ ID NO: 128610
  derived and/or modified CDS sequence (opt3) from hemagglutinin__InfluenzaA__ABC50266

SEQ ID NO: 128651 - RNA, 1701 nt, Artificial Sequence; identical to SEQ ID NO: 128610
  derived and/or modified CDS sequence (opt3) from hemagglutinin__InfluenzaA__ABC50277

SEQ ID NO: 128652 - RNA, 1701 nt, Artificial Sequence
  derived and/or modified CDS sequence (opt3) from hemagglutinin__InfluenzaA__ABC50299
augaagaccaucauugcccugagcuacauacucugccuuguguucgcucagaaacugcccggcaacgacaauuccacagcaacuuuguguuuagggcaccaugccgucccuaacggaacgcugguuaagaccaucacaaaugaucaaauugaggugacuaacgcgaccgaauugguacagucuucaaguacagguagaaucugcgacagcccacaccagauucucgauggcgagaauuguacccugaucgacgcccuucugggggauccgcauugcgacggauuucagaacaaagaaugggauuuguucguggagagguccaaggcuuauucuaauuguuaccccuaugacgucccugauuacgugucgcuccggucacugguugcaagcaguggcacucuggaauuuaacaaugaguccuucaacuggacagguguggcccaaaaugggaccucuagcgcuugcaaacgccgauccgacaagucauuuuucagucgucucaacugguuacaccagcugaaguauaaauacccagcacuuaaugucacgaugcccaacaaugagaaguuugauaaauuguauauauggggagugcaucacccuggcacugacagcgaucagaucucucuguacgcccaggcuuccggcagaguaaccguuucaacaaagaggagccaacagacugugauuccaaacaucgggagucggcccuggguccgcggagugucuuccagaauuagcaucuacuggaccauagugaaaccuggugacauucuacucaucaacucgacaggcaaucugauugccccaaggggguauuucaagauccggucuggaaaguccucaaucaugcgcagugacgcgccgauuggcaaauguaacagcgaaugcauaacccccaaugguuccaucccuaacgauaagccauuucagaaugucaaccgaauuacguacggggcaugucccagauauguuaaacagaauacucuuaagcuggccacaggaaugaggaacgugccugagaaacaaacccggggcaucuucggcgcuauagccggguuuauugaaaauggaugggaggguaugauggacggcugguacggguuccgucaccagaacucugagggaacuggccaggcagcugaucuaaagagcacacaagccgcgaucaaucagaucaacgguaaacucaaucgccugauugaaaagaccaacgagaaguuucaucagaucgaaaaagaguucucagaaguagaggggaggauucaggacuuagagaaguauguggaagauacgaaaauagaccuguggaguuacaaugccgagcuccuugucgcacuggaaaaccaacacaccaucgauuugacagacuccgagaugaacaagcuauucgaaagaacuaaaaagcagcugcgggagaaugcugaggauaugggcaacggaugcuuuaagauuuaucauaaaugugacaaugccugcaucggcagcauccgaaacgggaccuacgaucacgacguguaccgcgacgaagcucucaauaacagauuccagauuaagggaguugagcugaaaucugguuauaaggauugggugcuuuggauaucauuugccacaaguugcuuccuguuguguaucguccuccugggcuuuauuaugugggcaugccagaaagggaauaucagguguaacauuugcaucuga

SEQ ID NO: 128653 - RNA, 1701 nt, Artificial Sequence; identical to SEQ ID NO: 128610
  derived and/or modified CDS sequence (opt3) from hemagglutinin__InfluenzaA__ABC50310

SEQ ID NO: 128654 - RNA, 1701 nt, Artificial Sequence
  derived and/or modified CDS sequence (opt3) from hemagglutinin__InfluenzaA__ABC50321
augaagaccaucauugcccugagcuacauacucugccuuguguucgcucagaaacugcccggcaacgacaauuccacagcaacuuuguguuuagggcaccaugccgucccuaacggaacgcugguuaagaccaucacaaaugaucaaauugaggugacuaacgcgaccgaauugguacagucuucaaguacagguagaaucugcgacagcccacaccagauucucgauggcgagaauuguacccugaucgacgcccuucugggggauccgcauugcgacggauuucagaacaaagaaugggauuuguucguggagagguccaaggcuuauucuaauuguuaccccuaugacgucccugauuacgugucgcuccggucacugguugcaagcaguggcacucuggaauuuaacaaugaguccuucaacuggacagguguggcccaaaaugggaccucuagcgcuugcaaacgccgauccgacaagucauuuuucagucgucucaacugguuacaccagcugaaguauaaauacccagcacuuaaugucacgaugcccaacaaugagaaguuugauaaauuguauauauggggagugcaucacccuggcacugacagcgaucagaucucucuguacgcccaggcuuccggcagaguaaccguuucaacaaagaggagccaacagacugugauuccaaacaucgggagucggcccuggguccgcggagugucuuccagaauuagcaucuacuggaccauagugaaaccuggugacauucuacucaucaacucgacaggcaaucugauugccccaaggggguauuucaagauccggucuggaaaguccucaaucaugcgcagugacgcgccgauuggcaaauguaacagcgaaugcauaacccccaaugguuccaucccuaacgauaagccauuucagaaugucaaccgaauuacguacggggcaugucccagauauguuaaacagaauacucuuaagcuggccacaggaaugaggaacgugccuggcaaacaaacccggggcaucuucggggcuauagccggauuuauugagaaugguugggaaggcaugauggacgggugguacggauuccgucaccagaacucugagggcacuggucaggcagcugaucuaaagagcacacaagccgcgaucaaucagaucaacgggaaacucaaucgccugauugagaagaccaacgaaaaguuucaucagaucgagaaagaguucucagaaguagaaggcaggauucaggacuuagagaaguauguggaggauacgaaaauagaccuguggaguuacaaugccgaacuccuugucgcacuggagaaccaacacaccaucgauuugacagacuccgaaaugaacaagcuauucgagagaacuaaaaagcagcugcgggaaaaugcugaggauaugggaaacggcugcuuuaagauuuaucauaaaugugacaaugccugcaucgggagcauccgaaacggaaccuacgaucacgacguguaccgcgacgaggcucucaauaacagauuccagauuaaggguguugaacugaaaucuggcuauaaggauugggugcuuuggauaucauuugccaucaguugcuuccuguuguguauuguccuccugggguuuaucaugugggcaugccagaaaggaaauauuagguguaacaucugcauauga

SEQ ID NO: 128655 - RNA, 1701 nt, Artificial Sequence
  derived and/or modified CDS sequence (opt3) from hemagglutinin__InfluenzaA__ABC50332
augaagaccaucauugcccugagcuacauacucugccuuguguucgcucagaaacugcccggcaacgacaauuccacagcaacuuuguguuuagggcaccaugccgucccuaacggaacgcugguuaagaccaucacaaaugaucaaauugaggugacuaacgcgaccgaauugguacagucuucaaguacagguagaaucugcgacagcccacaccagauucucgauggcgagaauuguacccugaucgacgcccuucugggggauccgcauugcgacggauuucagaacaaagaaugggauuuguucguggagagguccaaggcuuauucuaauuguuaccccuaugacgucccugauuacgugucgcuccggucacugguugcaagcaguggcacucuggaauuuaacaaugaguccuucaacuggacagguguggcccaaaaugggaccucuagcgcuugcaaacgccgauccgacaagucauuuuucagucgucucaacugguuacaccagcugaaguauaaauacccagcacuuaaugucacgaugcccaacaaugagaaguuugauaaauuguauauauggggagugcaucacccuggcacugacagcgaucagaucucucuguacgcccaggcuuccggcagaguaaccguuucaacaaagaggagccaacagacugugauuccaaacaucgggagucggcccuggguccgcggagugucuuccagaauuagcaucuacuggaccauagugaaaccuggugacauucuacucaucaacucgacaggcaaucugauugccccaaggggguauuucaagauccggucuggaaaguccucaaucaugcgcagugacgcgccgauuggcaaauguaacagcgaaugcauaacccccaaugguuccaucccuaacgggaagccauuucagaaugucaaccgaauuacguacggagcaugucccagauauguuaaacagaauacucuuaagcuggccacaggcaugaggaacgugccugagaaacaaacccggggcaucuucggggcuauagccggauuuauugaaaaugguugggagggcaugauggaugggugguacggauuccgucaccagaacucugagggcacuggucaggcagcugaccuaaagagcacacaagccgcgaucaaucagaucaacgggaaacucaaucgccugauugaaaagaccaacgagaaguuucaucagaucgaaaaagaguucucagaaguagagggcaggauucaggauuuagagaaguauguggaagacacgaaaauagaucuguggaguuacaaugccgagcuccuugucgcacuggaaaaccaacacaccaucgacuugacagauuccgagaugaacaagcuauucgaaagaacuaaaaagcagcugcgggagaaugcugaggacaugggaaacggcugcuuuaagauuuaucauaaaugugauaaugccugcaucgggagcauccgaaacggaaccuacgaccacgauguguaccgcgacgaagcucucaauaacagauuccagauuaaggguguugagcugaaaucuggcuauaaggacuggauacuuuggaucucauuugccauuaguugcuuccuguuguguaucgugcuccugggguuuauuaugugggcaugccagaaaggaaauaucagguguaacauaugcaucuga

SEQ ID NO: 128656 - RNA, 1701 nt, Artificial Sequence; identical to SEQ ID NO: 128610
  derived and/or modified CDS sequence (opt3) from hemagglutinin__InfluenzaA__ABC50343

SEQ ID NO: 128657 - RNA, 1701 nt, Artificial Sequence
  derived and/or modified CDS sequence (opt3) from hemagglutinin__InfluenzaA__ABC50354
augaagaccaucauugcccugagcuacauacucugccuuguguucgcucagaaacugcccggcaacgacaauuccacagcaacuuuguguuuagggcaccaugccgucccuaacggaacgcugguuaagaccaucacaaaugaucaaauugaggugacuaacgcgaccgaacuuguacagucuucaaguacagguagaaucugcgacagcccacaccagauucucgauggcgagaauuguacccugaucgacgcucuacugggggauccgcauugcgacggauuucagaacaaagaaugggauuuguucguggagagguccaaggccuauucuaauuguuaccccuaugacgucccugauuacgugucgcuccggucacugguugcaagcaguggcacucuggaauuuaacaaugaguccuucaacuggacagguguggcccaaaaugggaccucuagcuccugcaaacgccgaucagacaagagcuuuuucagucgucucaacugguuacaccagcugaaguauaaauacccagcucuuaaugucacgaugcccaacaaugagaaguuugauaaauuguauauauggggagugcaucacccuggcacugacucugaucagaucucccuguacgcacaggccucaggcagaguaaccguuagcacaaagaggagucaacagacugugauuccaaacaucgggucucggcccuggguccgcggaguguccagcagaauuucgaucuacuggaccauagugaaaccuggugacauucuacucaucaacucuacaggcaaucugauugcuccaaggggguauuucaagauccgguccggaaagucaaguaucaugcgcagcgacgccccgauuggcaaauguaacuccgaaugcauaacccccaaugguucuaucccuaacgauaagccauuucagaaugucaaccgaauuacguacggggcgugucccagauauguuaaacagaauacucuuaagcuggcaacaggaaugaggaacgugccugagaaacaaacccggggcaucuucggcgccauagcuggguuuauugaaaauggaugggaggguaugauggacggcugguacggguuccgucaccagaacagcgagggaacuggccaggccgcagauuugaagucaacacaagcugccaucaaucagaucaacgguaaacucaaucgccugauugaaaagaccaacgagaaguuucaucagaucgaaaaagaguucagugaaguagaggggaggauucaggacuuagagaaguauguggaagauacgaaaauagaccugugguccuacaaugcggagcuccuugucgcccuggaaaaccaacacaccaucgauuugacagacagcgagaugaacaagcuauucgaaagaacuaaaaagcagcugcgggagaaugcagaggauaugggcaacggaugcuuuaagauuuaucauaaaugugacaaugcuugcaucggcucuauccgaaacgggaccuacgaucacgacguguaccgcgacgaagcccucaauaacagauuccagauuaagggaguugagcugaaaucagguuauaaggauugggugcuuuggauaaguuuugcuaucagcugcuuccuguuguguauuguccuccugggcuuuaucaugugggccugccagaaagggaauauuagguguaacaucugcauauga

SEQ ID NO: 128658 - RNA, 1701 nt, Artificial Sequence
  derived and/or modified CDS sequence (opt3) from hemagglutinin__InfluenzaA__ABC50376
augaagaccaucauugcccugagcuacauacucugccuuguguucgcucagaaacugcccggcaacgacaauuccacagcaacuuuguguuuagggcaccaugccgucccuaacggaacgcugguuaagaccaucacaaaugaucaaauugaggugacuaacgcgaccgaauugguacagucuucaaguacagguagaaucugcgacagcccacaccagauucucgauggcgagaauuguacccugaucgacgcccuucugggggauccgcauugcgacggauuucagaacaaagaaugggauuuguucguggagagguccaaggcuuauucuaauuguuaccccuaugacgucccugauuacgugucgcuccggucacugguugcaagcaguggcacucuggaauuuaacaaugaguccuucaacuggacagguguggcccaaaaugggaccucuagcgcuugcaaacgccgauccgacaagucauuuuucagucgucucaacugguuacaccagcugaaguauaaauacccagcacuuaaugucacgaugcccaacaaugagaaguuugauaaauuguauauauggggagugcaucacccuggcacugacagcgaucagaucucucuguacgcccaggcuuccggcagaguaaccguuucaacaaagaggagccaacagacugugauuccaaacaccgggagucggcccuggguccgcggagugucuuccagaaucagcauuuacuggacaaucgugaaaccuggugacauacuacucauuaacucgaccggcaaucugaucgccccaaggggguauuucaagauucggucuggaaaguccucaaucaugcgcagugacgcgccgaucggcaaauguaacagcgaaugcauuacgcccaaugguuccauaccuaacgauaagccauuucagaaugucaaccgaaucacuuacggggcaugucccagauauguuaaacagaauacacuuaagcuggccaccggaaugaggaacgugccugagaaacaaacucggggcauuuucggcgcuaucgccggguuuauagaaaauggaugggaggguaugauggacggcugguacggguuccgucaccagaacucugagggaacaggccaggcagcugaucuaaagagcacccaagccgcgauuaaucagaucaacgguaaacucaaucgccugaucgaaaagacgaacgagaaguuucaucagauugaaaaagaguucucagaaguagaggggagaauccaggacuuagagaaguauguggaagauaccaaaauugaccuguggaguuacaaugccgagcuccuugucgcacuggaaaaccaacacacaauagauuugacugacuccgagaugaacaagcuauucgaaaggaccaaaaagcagcugcgggagaaugcugaggauaugggcaacggaugcuuuaagaucuaucauaaaugugacaaugccugcauuggcagcauccgaaacgggacauacgaucacgacguguaccgcgacgaagcucucaauaacagauuccagaucaagggaguugagcugaaaucugguuauaaggauugggugcuuuggauuucauuugccauaaguugcuuccuguuguguaucguccuccugggcuuuauuaugugggcaugccagaaagggaauaucagguguaacauuugcaucuga

SEQ ID NO: 128659 - RNA, 1701 nt, Artificial Sequence
  derived and/or modified CDS sequence (opt3) from hemagglutinin__InfluenzaA__ABC50387
augaagaccaucauugcccugagcuacauacucugccuuguguucgcucagaaacugcccggcaacgacaauuccacagcaacuuuguguuuagggcaccaugccgucccuaacggaacgcugguuaagaccaucacaaaugaucaaauugaggugacuaacgcgaccgaauugguacagucuucaaguacagguagaaucugcgacagcccacaccagauucucgauggcgagaauuguacccugaucgacgcccuucugggggauccgcauugcgacggauuucagaacaaagaaugggauuuguucguggagagguccaaggcuuauucuaauuguuaccccuaugacgucccugauuacgugucgcuccggucacugguugcaagcaguggcacucuggaauuuaacaaugaguccuucaacuggacagguguggcccaaaaugggaccucuagcgcuugcaaacgccgauccgacaagucauuuuucagucgucucaacugguuacaccagcugaaguauaaauacccagcacuuaaugucacgaugcccaacaaugagaaguuugauaaauuguauguguggggaguacaucacccuggcacugacagcgaucagauaucucuguacgcccaggcuuccggcagaguuaccgugucaacaaagaggagccaacagacugucaucccaaacauugggagucggcccugggugcgcggagugucuuccagaaucagcauuuacuggaccaucgucaaaccuggugacauacuacucauuaacucgacaggcaaucugaucgccccaaggggguauuucaagauucggucuggaaaguccucaaucaugcgcagugacgcgccgaucggcaaauguaacagcgaaugcauuacccccaaugguuccauaccuaacgauaagccauuucagaauguuaaccgaaucacguacggggcaugucccagauaugugaaacagaauacucuuaagcuggccacaggaaugaggaacguaccugagaaacaaacccggggcauuuucggcgcuaucgccggguuuauagaaaauggaugggaggguaugauggacggcugguacggguuccgucaccagaacucugagggaacuggccaggcagcugaucuaaagagcacacaagccgcgauuaaucagaucaacgguaaacucaaucgccugaucgaaaagaccaacgagaaguuucaucagauugaaaaagaguucucagaaguggaggggagaauccaggacuuagagaaguaugucgaagauacgaaaauugaccuguggaguuacaaugccgagcuccuuguggcacuggaaaaccaacacaccauagauuugacagacuccgagaugaacaagcuauucgaaaggacuaaaaagcagcugcgggagaaugcugaggauaugggcaacggaugcuuuaagaucuaucauaaaugugacaaugccugcauuggcagcauccgaaacgggaccuacgaucacgacguuuaccgcgacgaagcucucaauaacagauuccagaucaagggaguggagcugaaaucugguuauaaggauuggguccuuuggauuucauuugccauaaguugcuuccuguuguguaucgugcuccugggcuuuauuaugugggcaugccagaaagggaauaucagguguaacauuugcaucuga

SEQ ID NO: 128660 - RNA, 1701 nt, Artificial Sequence
  derived and/or modified CDS sequence (opt3) from hemagglutinin__InfluenzaA__ABC50409
augaagaccaucauugcccugagcuacauacucugccuuguguucgcucagaaacugcccggcaacgacaauuccacagcaacuuuguguuuagggcaccaugccgucccuaacggaacgaucguuaagaccauuacaaaugaucaaaucgaggugacuaacgcgaccgaacugguacagucuucaaguacagguggcauuugcgacagcccacaccagauccuagauggggagaauuguacccucauagacgcucugcuuggagauccgcagugcgacggcuuucaaaacaaaaagugggaucuguucguggaaagauccaaagccuauucuaauuguuaccccuaugacgucccugauuacgugucguugaggucacucguugcaagcagugguacucuggaguuuaacaaugaauccuucaacuggacaggggugacccagaauggaacgucuagcgccugcaagcggcgcuccaacaauucauuuuucagucgacugaacuggcucacucauuuaaaguuuaaauauccagcucugaaugucaccaugcccaacaacgagaaguucgacaaacuuuacaucuggggcgugcaccauccuggcacagauaaugaccagauuagcuuguaugcacaggccucugggcguaucacuguauccaccaagagaucacaacagacaguuauuccaaacaucggaagcaggccccgggugcgcgauauaccuaguagaauuucuaucuacuggaccauugucaaaccaggugacauccugcuaaucaauuccacgggcaaccucauugcuccgaggggguacuuuaagauacggagcggaaagucgucuaucaugcgcuccgacgcccccauuggcaaauguaauucagagugcaucacuccuaacgguaguauaccaaaugauaagcccuuccagaacgugaaucgaauuacauauggggcguguccuagauacgugaaacagaacacccugaaacuugcaacuggaaugaggaaugucccagaaaagcaaacacggggcaucuuuggcgccaucgcuggguucauugagaacggaugggaagguaugguugacggcugguauggguuucgucaccagaauagcgagggaaucggccaggccgcagaucugaaguccacccaagcugccauuaaccagauaaaugguaaauugaaccgccucaucgggaagacgaacgagaaguuccaccagauugaaaaagaguucucugaaguggagggcagaauccaggaccuggaaaaguacguagaggauaccaaaaucgacuuauggagcuauaaugcggagcugcucguggcccuugaaaaccaacauacaauugaucugacugacucagagaugaauaaguuguuugaaaggaccaaaaagcagcuacgggagaacgcagaagauaugggaaauggcugcuucaagauauaccacaaaugugacaacgcuugcaucgggaguauucgaaauggaacauaugaucaugacgucuaccgcgacgaggcccugaacaauagauuucagaucaaggguguggagcucaaauccggcuacaaggauuggauucuguggaucagcuucgcuauaucuugcuuucuucuguguguugccuugcucggguucaucaugugggcaugccagaaaggaaacauuagguguaauaucugcauuuga

SEQ ID NO: 128661 - RNA, 1701 nt, Artificial Sequence; identical to SEQ ID NO: 128660
  derived and/or modified CDS sequence (opt3) from hemagglutinin__InfluenzaA__ABC50420

SEQ ID NO: 128662 - RNA, 1701 nt, Artificial Sequence
  derived and/or modified CDS sequence (opt3) from hemagglutinin__InfluenzaA__ABC54668
augaagaccaucauugcccugagcuacauacucugccuuguguucgcucagaaacugcccggcaacgacaauuccacagcaacuuuguguuuagggcaccaugccgucccuaacggaacgcugguuaagaccaucacaaaugaucaaauugaggugacuaacgcgaccgaacuuguacagucuucaaguacagguagaaucugcgacagcccacaccagauucucgauggcgagaauuguacccugaucgacgcucuacugggggauccgcauugcgacggauuucagaacaaagaaugggauuuguucguggagagguccaaggccuauucuaauuguuaccccuaugacgucccugauuacgcaucgcuccggucacugguggccagcaguggcacucuggaauuuaacaaugaguccuucaacuggacagguguugcucaaaaugggaccucuagcgcaugcaaacgccgauccaacaagucauuuuucagucgucucaauugguuacaccagcugaaguauaaauacccagcccuuaacgugacgaugcccaauaacgagaaguuugacaaauuguauauauggggaguccaucacccuagcacugauucugaccagaucucccuguacgcucaggccucaggcagagugaccguaagcacaaagaggagucaacagacuguuauuccaaacaucggcucugggcccugggugcggggagucuccagccgcauuucgaucuacuggaccauagugaaaccuggugauauucuacucaucaauucuacaggcaaccugauugcgccaagaggguauuucaagaucagguccggaaagucaaguaucaugcggagcgacgcaccgauuggcaaauguaauuccgaaugcauaacccccaacgguucucuuccuaaugacaagccauuucagaacgugaaucgcaucacguacggggccuguccccgauaugucaaacagaacacucugaaguuggcuacaggaaugagaaauguuccugagaaacaaaccaggggcauuuucggcgccaucgcaggguuuauagaaaacggaugggaggguaugguggauggcugguacggguuccggcaccagaauagcgagggaacuggccaggcugccgaccucaagucaacacaagcggccauuaaccagaucaaugguaaacugaaccguuuaaucgaaaagaccaaugagaaguuucaucagauugaaaaagaguucagugaaguagaggggcgcauccaggaucuggagaaguauguggaagacacgaaaauugaucucugguccuacaacgcagagcuucuggucgcuuuggaaaaccaacacaccauagaccuaacagauagcgagaugaauaagcuguucgaaagaacuaaaaagcagcucagggagaacgccgaggacaugggcaauggaugcuuuaagaucuaucauaaaugugauaacgcuugcauuggcucuauccggaaugggaccuacgaccacgauguguaccgagacgaagcccugaacaaucgcuuccagaucaagggaguugagcuuaaaucagguuauaaggacuggauucuguggauaaguuuugcaaucagcugcuucuugcucugugugguccuguuaggcuuuauuaugugggccugccagaaagggaacaucagauguaauauuugcaucuga

SEQ ID NO: 128663 - RNA, 1701 nt, Artificial Sequence
  derived and/or modified CDS sequence (opt3) from hemagglutinin__InfluenzaA__ABC54679
augaagaccaucauugcccugagcuacauacucugccuuguguucgcucagaaacugcccggcaacgacaauuccacagcaacuuuguguuuagggcaccaugccgucccuaacggaacgaucguuaagaccauuacaaaugaucaaaucgaggugacuaacgcgaccgaacugguacagucuucaccaacagguggcauuugcgacaguccgcaccagauccuagauggggagaauuguacccucauagacgcucugcuuggagauccccagugcgacggcuuucaaaacaaaaagugggaucuguucaucgaaagaagcaaagccuauuccaauuguuacccuuaugacgugccagauuacgcaucuuugaggucgcucgucgccucaagcgguacucuggaguuuaacaaugaaaguuucaacuggacaggggugacccagaauggaacguccucugcuugcaagcggcgcagcaacaauuccuuuuucucacgacugaacuggcucacucauuuaaaguuuaaauaucccgcacugaauguuaccaugccuaacaacgagaaguucgacaaacuuuacauuuggggcgugcaccauccaggcacagauaaugaccagaucaguuuguaugcccaggcuagcgggcguauuacugucucuaccaagagaucccaacagacagugauccccaacguaggaucaaggccucggguucgcgauauaccaagcagaauuaguaucuacuggaccauugugaaaccgggugacauccugcuaaucaauucuacgggcaaccucauugcccccaggggguacuuuaagauacgguccggaaagagcucgaucaugcgcucugacgcgccuauuggcaaauguaauuccgagugcaucacuccaaacgguucaauacccaaugauaagccuuuccagaacgucaaucgaauuacauauggggcauguccaagauacgugaaacagaacacccugaagcuggccacuggaaugaggaaugugcccgaaaaacaaacacggggcaucuuuggcgcuaucgccggguucauugagaacggaugggaagguauggucgacggcugguauggguuucgucaccagaauagugagggaaucggccaggcagcugaucuuaagagcacccaagccgcgauuaaccagauaaaugguaaauugaaccgccucaucgggaagacgaacgagaaguuccaccagauugaaaaagaguucuccgaaguugagggcagaauccaggaccuggaaaaguacguggaggauaccaaaaucgacuuauggucuuauaaugccgagcugcucguagcacuugaaaaccaacauacaauugaucugacugacagcgagaugaauaaguuguuugaaaggaccaaaaagcagcuacgggagaacgcugaagauaugggaaauggcugcuucaagauauaccacaaaugugacaacgccugcaucgggucaauucgaaauggaacauaugaucaugacguguaccgcgacgaggcucugaacaauagauuucagaucaagggugucgagcucaaaaguggcuacaaggauuggauucuguggaucuccuucgccauaagcugcuuucuucuguguguggcauugcucggguucaucaugugggccugccagaaaggaaacauuagguguaauaucugcauuuga

SEQ ID NO: 128664 - RNA, 1701 nt, Artificial Sequence; identical to SEQ ID NO: 128564
  derived and/or modified CDS sequence (opt3) from hemagglutinin__InfluenzaA__ABC67319

SEQ ID NO: 128665 - RNA, 1701 nt, Artificial Sequence
  derived and/or modified CDS sequence (opt3) from hemagglutinin__InfluenzaA__ABC67454
augaagaccaucauugcccugagcuacauacucugccuuguguucgcucaggagcugcccggcaacgacaauuccacagcaacuuuguguuuagggcaccaugccgucccuaacggaacgcugguuaaaaccaucacaaaugaucaaauugaagugacuaacgcgaccgagcuaguacagucuucaaguacagguagaaucugcgacagcccacaccagauucucgauggcgaaaauuguacccugaucgacgcucugcuuggggauccgcauugcgacggauuucagaacaaggagugggauuuguucguggaaagguccaaagccuauucuaauuguuaccccuaugacgucccugauuacgugucgcuccggucacugguugcaagcaguggcacucuggaguuuaacaaugaguccuucaacuggacagguguggcccaaaaugggaccucuagcgcuugcaagcgccgauccgacaaaucauuuuucagucgucucaacugguuacaccagcugaaguauaaguacccagcacuuaaugucacgaugcccaacaaugaaaaauuugauaaguuguauauauggggagugcaucacccuggcacugacagcgaucagaucucucuguacgcccaggcuuccggcagaguaaccguuucaacaaaaaggagccaacagacugugauuccaaacaucgggagucggcccuggguccgcggagugucuuccagaauuagcaucuacuggaccauagugaagccuggugacauucuacucaucaacucgacaggcaaucugauugccccaaggggguauuucaaaauccggucuggaaaguccucaaucaugcgcagugacgcgccgauuggcaaguguaacagcgagugcauaacccccaaugguuccaucccuaacgauaaaccauuucagaaugucaaccgaauuacguacggggcaugucccagauauguuaagcagaauacucuuaaacuggccacaggaaugaggaacgugccugaaaagcaaacccggggcaucuucggcgcuauagccggguuuauugagaauggaugggaggguaugauggacggcugguacggguuccgucaccagaacucugaaggaacuggccaggcagcugauuugaaaagcacacaagccgcgaucaaucagaucaacgguaagcucaaucgccugauugagaaaaccaacgaaaaguuucaucagaucgagaaggaguucucagaaguagaggggaggauucaggacuuagaaaaauauguggaggauacgaagauagaccuguggaguuacaaugccgaacuccuugucgcacuggagaaccaacacaccaucgauuugacagacuccgaaaugaacaaacuauucgagagaacuaagaaacagcugcgggagaaugcugaagauaugggcaacggaugcuuuaagauuuaucauaagugugacaaugccugcaucggcagcauccgaaacgggaccuacgaucacgacguguaccgcgacgaggcucucaauaacagauuccagauuaaaggaguugaacugaagucugguuauaaagauugggugcuuuggauaucauuugccaucaguugcuuccuguuguguauuguccuccugggcuuuaucaugugggcaugccagaaggggaauauuagguguaacaucugcauauga

SEQ ID NO: 128666 - RNA, 1701 nt, Artificial Sequence; identical to SEQ ID NO: 128610
  derived and/or modified CDS sequence (opt3) from hemagglutinin__InfluenzaA__ABC67471

SEQ ID NO: 128667 - RNA, 1701 nt, Artificial Sequence
  derived and/or modified CDS sequence (opt3) from hemagglutinin__InfluenzaA__ABC67554
augaagaccaucauugcccugagcuacauacucugccuuguguucgcucagaaacugcccggcaacgacaauuccacagcaacuuuguguuuagggcaccaugccgucccuaacggaacgaucguuaagaccauuacaaaugaucaaaucgaggugacuaacgcgaccgaacugguacagucuucaaguacagguggcauuugcgacagcccacaccagauccuagauggggagaauuguacccucauagacgcucugcuuggagauccgcagugcgacggcuuucaaaacaaaaagugggaucuguucguggaaagauccaaagccuauucuaauuguuaccccuaugacgucccugauuacgcaucguugaggucacucaucgccagcagugguacucuggaguuuaacaaugaauccuucaacuggacaggggugacccagaauggaacgucuagcgcuugcaagcggcgcuccaacucaaguuucuucagccgacugaauuggcucacucauuuaaaguuuaaauauccagcacugaacguuaccaugcccaauaacgaggaguucgacaaacuuuacauuuggggcgugcaccauccuggcacagauaacgaccagaucucuuuguaugcccaggcuuccgggcguauuacugucucaaccaagagaagccaacagacagugaucccaaauauaggaaguaggccccggguacgcgauauuccuucuagaaucuccauuuacuggaccaucguuaagccaggugacauccugcuaauuaacagcacgggcaaucucauagccccgaggggguacuuuaaaauccggucgggaaagucuuccauuaugcgcucagacgcgcccaucgugaaguguaacagugaaugcauaacuccuaauggcagcauuccaaacgauaaacccuuccagaaugucaaccgaaucacauauggugcauguccuagauacgugaagcagaauacccugaaacuugccacugggaugaggaacgugccagagaagcaaacacggggaaucuuuggcgcuauugccggcuucaucgaaaaugggugggagggaauggucgacgguugguauggcuuucgucaccagaacuccgaggggauuggacaggcagcugaucugaaaucuacccaagccgcgauagaccagaucaauggcaaguugaaccgccucauugguaaaacgaaugaaaaguuccaccagaucgagaaggaauuuagcgagguugaagggagaauccaggaucuggagaaauacguggaggacaccaagauugauuuauggucauauaacgccgaacugcucguagcacuugagaaccaacauacaauagaccugacugauagugaaaugaauaaauuguuugagaggaccaagaaacagcuacgggaaaacgcugaggacaugggcaauggaugcuucaagaucuaccacaagugugauaacgccugcauuggcuccauccgaaaugggacauaugaccaugacguguaccgcgaugaggcucugaacaauagauuucagauuaaaggagucgaacucaagagcgguuacaaagacuggauccuguggauaucuuucgccaucucaugcuuucuucuguguguggcauugcucggcuucauuaugugggccugccagaaggggaacaucagguguaauauuugcaucuga

SEQ ID NO: 128668 - RNA, 1701 nt, Artificial Sequence
  derived and/or modified CDS sequence (opt3) from hemagglutinin__InfluenzaA__ABC67565
augaagaccaucauugcccugagcuacauauucugccucgugcuuggccaggacuuucccgggaacgauaauuccacagcuacucuguguuugggacaccaugcagucccuaacgguacguuaguuaaaaccaucacaaaugaccaaauugaggugacuaacgccaccgaacugguacagucuucaaguacaggcaagaucugcaauaacccacacaggauucuagaugggaucgacuguacccucauagaugcgcugcuuggagacccgcauugcgauggcuuccagaaugagacuugggaccuguuuguggaaagaagcaaggcuuucuccaacuguuaucccuacgaugucccugacuaugccucuuugcggucgcucguggcaucaagcgguacacuggaguuuaucaaugaaggguucaccuggacgggaguuacucagaacggcggcaguaaugccugcaaacgcgggccagauauuggauuuuucucccgacugaacuggcucuacaaaucugguagcaccuaucccguguuaaaugucacaaugccuaacaaugacaacuuugauaagcuguacaucuggggcgugcaccauccauccacugaccaagagcagaccucacuuuauguacaggcuagugggcguguuacagugagcaccaagagaucucagcaaacgauuauccccaacauaggauccaggccuuggguccggggcuugucaagccgcauuaguaucuacuggacuauugugaaaccaggugacauccuggugaucaauucuaacgggaaucuaauugcaccgagaggauacuucaagaugaggacaggcaaauccagcauaaugcggucggaugcccccaucggcaccuguauuucugagugcaucacuccuaacggguccauaccaaaugacaagcccuuucagaacgucaauaaaauuacauauggagcuuguccuaaguacguuaagcagaacacccucaaacuggccacggguaugcgcaaugugccagaaaagcagacccgaggccuuuucggggcgaucgcaggauuuaucgagaacggcugggaagguaugauugaugggugguauggcuucagacaccaaaauucagagggaacaggccaggccgcugaccugaaaaguacucaggccgcaaucgaucaaauuaacgggaaguugaauaggguaauagagaaaaccaacgaaaaguuccaccagaucgagaaagaauuuagcgagguggaaggacggauucaggaccucgagaaguacgucgaggauacaaagaucgaccugugguccuauaaugcugaauuacugguggcccucgagaaccagcauacuaucgaucuuaccgacucugaaaugaacaaacuguucgagaagacacgucgccaauugagagaaaaugcggaggauauggguaacggcugcuuuaaaauuuaccacaagugugacaaugccugcauagggagcaucaggaacggaaccuaugaccaugauguuuaccgggacgaggcacuaaauaaccgauuccagauuaaaggcguggaacugaagucagguuacaaggauuggauccucuggauuaguuuugcuaucuccugcuuccugcuuugugucgugcuguugggguuuauaaugugggccugccagaaaggcaauauccgcuguaacauuugcaucuga

SEQ ID NO: 128669 - RNA, 1701 nt, Artificial Sequence
  derived and/or modified CDS sequence (opt3) from hemagglutinin__InfluenzaA__ABC67576
augaagaccaucauugcccugagcuacauacucugccuuguguucgcucagaaacugcccggcaacgacaauuccauggcaacauuguguuuagggcaccaugccgucccuaacggaacucugguuaagacgaucaccaaugaucaaauugaggugacaaacgcgacugaacuuguacagucuucaaguaccgguagaaucugcgacagcccacacaggauucucgauggcgagaauuguacacugaucgacgcucuacugggggauccgcauugcgacggauuucagaacaaagaaugggauuuguucguggagcgguccaaggccuauucuaauuguuaccccuaugacgucccugauuacgcaucgcuccgcucacugguggccagcaguggcacccuggaauuuaacaaugaguccuucaacuggacugguguugcucagaaugggacaucuuaugcaugcaaacgacguagcauaaaguccuuuuucucaagacucaacugguuacaccaacugaaguacaaauauccagcccuuaaugugaccaugcccaacaaugacgaguuugauaaguuguacaucuggggaguccaucacccuaguacggacagcgaucagacuucucuguacgcucaggccuccggcagggugaccguaucaacaaaacggagccagcaaacuguuauuccaaacaucggcagucgccccugggugagaggggucucuuccaggauuagcaucuauuggaccauagugaagccuggagacauucuacucaucaacucgacagguaaucugauugcgccacggggcuacuucaaaauccgcucugggaaguccucaaucaugcgaagugacgcaccgauuggaaaguguaacagcgaaugcauaacccccaauggcuccaucccuaacgauaaaccauuucagaaugugaacagaauuacguauggugccugucccagguacgucaagcagaauacucuuaaacuggcuacagggaugcggaacguuccugagaagcagacccguggaaucuucggcgccauagcaggcuuuauugaaaaugggugggagggaaugguggacgguugguauggcuuccgccaccaaaacucugaggggacuggacaggcugccgauuugaaaagcacacaggcggccaucaaucaaaucaacggcaagcucaauagacugauugagaaaaccaacgaaaaguuucaucagaucgaaaaggaguucucagaaguagaggguaggauucaggacuuagagaaauacguggaagauacgaagauagaccuguggaguuauaaugcagagcuccuugucgcucuggaaaaccagcacaccaucgauuugacagacuccgagaugaacaaacuauucgaacggacucgaaagcaacugcgcgagaaugccgaggauauggggaacggcugcuuuaaaauuuaccauaagugugacaaugcuugcaucggaagcaucagaaacggcaccuacgaucacgacguguauagggacgaagcccucaauaaccgguuccagauuaaggggguugagcugaaaucuggauacaaggauuggauacuuuggaucucauuugcaauuaguugcuuccuguugugugugguccuccuggguuuuaucaugugggccugccagaaaggcaauauucgcuguaacaucugcauauga

SEQ ID NO: 128670 - RNA, 1701 nt, Artificial Sequence
  derived and/or modified CDS sequence (opt3) from hemagglutinin__InfluenzaA__ABC67587
augaagaccaucauugcccugagcuacauacucugccuuguguucgcucagaaacugcccggcaacgacaauuccacagcaacuuuguguuuagggcaccaugccgucccuaacggaacgaucguuaagaccauuacaaaugaucaaaucgaggugacuaacgcgaccgaacugguacagucuucaaguacagguggcauuugcgacagcccacaccagauccuagauggggagaauuguacccucauagacgcucugcuuggagauccgcagugcgacggcuuucaaaacaaaaagugggaucuguucguggaaagauccaaagccuauucuaauuguuaccccuaugacgucccugauuacgcaucguugaggucacucguggccagcagugguacucuggaguuuaacaaugaauccuucaacuggacagggguuacccagaauggaacgucuagcgcuugcaagcggcgcuccaacaauucauuuuucagucgacugaacuggcucacucauuuaaaguuuaaauauccagcacugaaugugaccaugcccaacaacgagaaguucgacaaacuuuacaucuggggcguccaccauccuggcacagauaaugaccagauuagcuuguaugcccaggcuucugggcguaucacuguguccaccaagagaucacaacagacaguaauuccaaacaucggaagcaggccccggguucgcgauauaccuaguagaauuucuaucuacuggaccauugugaaaccaggugacauccugcuaaucaauuccacgggcaaccucauugccccgaggggguacuuuaagauacggagcggaaagucgucuaucaugcgcuccgacgcgcccauuggcaaauguaauucagagugcaucacuccuaacgguaguauaccaaaugauaagcccuuccagaacgucaaucgaauuacauaugggccuuguccaagauacgugaaacagaacacccugaaacuugcaacuggaaugaggaaugugcccgaaaagcaaacacggggcaucuuuggcgccaucgcuggguucauugagaacggaugggaagguauggucgacggcugguauggguuucgucaccagaauagcgagggaaucggccaggccgcagaucugaaguccacccaagcugccauuaaccagauaaaugguaaauugaaccgccucaucgggaagacgaacgagaaguuccaccagauugaaaaagaguucucugaaguugagggcagaauccaggaccuggaaaaguacguggaggauaccaaaaucgacuuauggagcuauaaugcggagcugcucguagcccuugaaaaccaacauacaauugaucugacugacucagagaugaauaaguuguuugaaaggaccaaaaagcagcuacgggagaacgcagaagauaugggaaauggcugcuucaagauauaccacaaaugugacaacgcuugcaucgggaguauucgaaauggaacauaugaucaugacguguaccgcgacgaggcccugaacaauagauuucagaucaagggugucgagcucaaauccggcuacaaggauuggauucuguggaucagcuucgcuauaucuugcuuucuucuguguguggccuugcucggguucaucaugugggcaugccagaaaggaaacauuagguguaauaucugcauuuga

SEQ ID NO: 128671 - RNA, 1701 nt, Artificial Sequence; identical to SEQ ID NO: 128291
  derived and/or modified CDS sequence (opt3) from hemagglutinin__InfluenzaA__ABC67598

SEQ ID NO: 128672 - RNA, 1701 nt, Artificial Sequence; identical to SEQ ID NO: 128610
  derived and/or modified CDS sequence (opt3) from hemagglutinin__InfluenzaA__ABC67609

SEQ ID NO: 128673 - RNA, 1701 nt, Artificial Sequence; identical to SEQ ID NO: 128610
  derived and/or modified CDS sequence (opt3) from hemagglutinin__InfluenzaA__ABC67620

SEQ ID NO: 128674 - RNA, 1701 nt, Artificial Sequence; identical to SEQ ID NO: 128610
  derived and/or modified CDS sequence (opt3) from hemagglutinin__InfluenzaA__ABC67631

SEQ ID NO: 128675 - RNA, 1701 nt, Artificial Sequence; identical to SEQ ID NO: 128610
  derived and/or modified CDS sequence (opt3) from hemagglutinin__InfluenzaA__ABC67642

SEQ ID NO: 128676 - RNA, 1701 nt, Artificial Sequence
  derived and/or modified CDS sequence (opt3) from hemagglutinin__InfluenzaA__ABC67653
augaagaccaucauugcccugagcuacauacucugccuuguguucgcucagaaacugcccggcaacgacaauuccacagcaacuuuguguuuagggcaccaugccgucccuaacggaacgcugguuaagaccaucacaaaugaucaaauugaggugacuaacgcgaccgaauugguacagucuucaaguacagguagaaucugcgacagcccacaccagauucucgauggcgagaauuguacccugaucgacgcccuucugggggauccgcauugcgacggauuucagaacaaagaaugggauuuguucguggagagguccaaggcuuauucuaauuguuaccccuaugacgucccugauuacgugucgcuccggucacugguugcaagcaguggcacucuggaauuuaacaaugaguccuucaacuggacagguguggcccaaaaugggaccucuagcgcuugcaaacgccgauccgacaagucauuuuucagucgucucaacugguuacaccagcugaaguauaaauacccagcacuuaaugucacgaugcccaacaaugagaaguuugauaaauuguauauauggggagugcaucacccuggcacugacagcgaucagaucucucuguacgcccaggcuuccggcagaguaaccguuucaacaaagaggagccaacagacugugauuccaaacaucgggagucggcccuggguccgcggagugucuuccagaauuagcaucuacuggaccauagugaaaccuggugacauucuacucaucaacucgacaggcaaucugauugccccaaggggguauuucaagauccggucuggaaaguccucaaucaugcgcagugacgcgccgauuggcaaauguaacagcgaaugcauaacccccaaugguuccaucccuaacgauaagccauuucagaaugucaaccgaauuacguacggggcaugucccagauauguuaaacagaauacucuuaagcuggccacaggaaugaggaacgugccugagaaacaaacccggggcaucuucggcgcuauagccggguuuauugaaaauggaugggaggguaugauggacggcugguacggguuccgucaccagaacucugagggaacuggccaggcagcugaucuaaagagcacacaagccgcgaucaaucagaucaacgguaaacucaaucgccugauugaaaagaccaacgagaaguuucaucagaucgaaaaagaguucucagaaguagaggggaggauucaggacuuagagaaguauguggaagauacgaaaauagaccuguggaguuacaaugccgagcuccuugucgcacuggaaaaccaacacaccaucgauuugacagacuccgagaugaacaagcuauucgaaagaacuaaaaagcagcugcgggagaaugcugaggauaugggcaacggaugcuuuaagauuuaucauaaaugugacaaugccugcaucggcagcauccgaaacgggaccuacgaucacgacguguaccgcgacgaagcucucaauaacagauuccagauuaagggaguugagcugaaaucugguuauaaggauugggugcuuuggauaucauuugccaucaguugcuuccuguugugugucgugcuccugggcuuuauuaugugggcaugccagaaagggaauaucagguguaacauuugcaucuga

SEQ ID NO: 128677 - RNA, 1701 nt, Artificial Sequence
  derived and/or modified CDS sequence (opt3) from hemagglutinin__InfluenzaA__ABC67697
augaagaccaucauugcccugagcuacauacucugccuuguguucgcucagaaacugcccggcaacgacaauuccacagcaacuuuguguuuagggcaccaugccgucccuaacggaacgaucguuaagaccauuacaaaugaucaaaucgaggugacuaacgcgaccgaacugguacagucuucaaguacaggugagauuugcgacagcccacaccagauccuagauggcgaaaauuguacccucauagacgcucugcuuggggauccgcagugcgacggauuucaaaacaaagagugggaucuguucguggaaagauccaaggccuauucuaauuguuaccccuaugacgucccugauuacgcaucguugaggucacucguggccagcaguggcacucuggaguuuaacaaugaguccuucaacuggacagguguuacccagaaugggacgucuagcgcuugcaaacggcgcuccaacaauucauuuuucagucgacugaacuggcucacucauuuaaaguuuaaguauccagcacugaaugugaccaugcccaacaacgaaaaauucgacaaguuguacaucuggggaguccaccauccuggcacagauaaugaccagauuuuucuuuaugcccaggcuagcggccguaucacugugucuaccaaaagaucccaacagacaguaauuccaaacaucgggucaaggccccggguucgcaauauaccuagcagaauuaguaucuacuggaccauugugaagccaggagauauccugcuaaucaacucuacggguaaucucauugccccgaggggcuacuucaaaauacgguccggaaagagcucgaucaugcgcucugacgcgcccauugggaaguguaacuccgagugcaucacuccuaauggcucaauaccaaacgacaaacccuuucagaaugucaaccgaauuacauauggugcauguccuagauacgugaagcagaauacccugaaacuugccacugggaugaggaacgugccagaaaagcaaacacggggaaucuucggcgcuaucgccggcuuuauugagaaugggugggagggaauggucgaugguugguauggcuuccgucaccagaacagugaagggaucggacaggcagcugaccugaaaagcacccaagccgcgauuaaucagauaaacggcaaguugaaccgccucaucgguaaaacgaaugagaaguuccaccagauugaaaaggaguuuuccgaaguugaggggagaauccaggaucuggagaaauacguggaagacaccaagaucgauuuauggucuuauaacgccgagcugcucguagcacuugaaaaucaacauacaauugaccugacugauagcgagaugaacaaauuguucgaaaggaccaagaaacagcuacgggagaaugcugaggacaugggcaacggaugcuuuaagauauaccacaagugugauaaugccugcaucggcucaauucgaaacgggacauaugaccaugauguguaccgcgacgaagcucugaauaacagauuccagaucaaaggagucgagcucaagagugguuacaaagacuggauucuguggaucuccuuugccauaagcugcuuccuucuguguguggcauugcucggcuuuaucaugugggccugccagaaggggaauauuagguguaacaucugcauuuga

SEQ ID NO: 128678 - RNA, 1701 nt, Artificial Sequence
  derived and/or modified CDS sequence (opt3) from hemagglutinin__InfluenzaA__ABC67708
augaagaccaucauugcccugagcuacauacucugccuuguguucgcucagaaacugcccggcaacgacaauuccacagcaacuuuguguuuagggcaccaugccgucccuaacggaacgaucguuaagaccauuacaaaugaucaaaucgaggugacuaacgcgaccgaacugguacagucuucaaguacagguggcauuugcgacagcccacaccagauccuagauggggagaauuguacccucauagacgcucugcuuggagauccgcagugcgacggcuuucaaaacaaaaagugggaucuguucguggaaagauccaaagccuauucuaauuguuaccccuaugacgucccugauuacgcaucguugaggucacucguggccagcagugguacucuggaguuuaacaaugaauccuucaacuggacagggguuacccagaauggaacgucuagcgcuugcaagcggcgcuccaacaauucauuuuucagucgacugaacuggcucacucauuuaaaguuuaaauauccagcacugaaugugaccaugcccaacaacgagaaguucgacaaacuuuacaucuggggcguccaccauccuggcacagauaaugaccagaucuuuuuguaugcccaggcuagcgggcguauuacugugucuaccaagagaucccaacagacaguaauuccaaacaucggaucaaggccccggguucgcaauauaccuagcagaauuaguaucuacuggaccauugugaaaccaggugauauccugcuaaucaacucuacgggcaaucucauugccccgaggggguacuucaagauacgguccggaaagagcucgaucaugcgcucugacgcgcccauuggcaaauguaacuccgagugcaucacuccuaaugguucaauaccaaacgacaagcccuuucagaaugucaaccgaauuacauauggggcauguccuagauacgugaaacagaauacccugaagcuggccacuggaaugaggaacgugccagaaaaacaaacacggggcaucuucggcgcuaucgccggguuuauugagaauggaugggaagguauggucgauggcugguauggguuccgucaccagaacagugagggaaucggccaggcagcugaccuuaagagcacccaagccgcgauuaaucagauaaacgguaaauugaaccgccucaucgggaagacgaaugagaaguuccaccagauugaaaaagaguuuuccgaaguugagggcagaauccaggaucuggaaaaguacguggaggacaccaaaaucgauuuauggucuuauaacgccgagcugcucguagcacuugaaaaucaacauacaauugaccugacugauagcgagaugaacaaguuguucgaaaggaccaaaaagcagcuacgggagaaugcugaagacaugggaaacggcugcuuuaagauauaccacaaaugugauaaugccugcaucgggucaauucgaaacggaacauaugaccaugauguguaccgcgacgaggcucugaauaacagauuccagaucaagggugucgagcucaaaaguggcuacaaggacuggauucuguggaucuccuuugccauaagcugcuuccuucuguguguggcauugcucggguuuaucaugugggccugccagaaaggaaauauuagguguaacaucugcauuuga

SEQ ID NO: 128679 - RNA, 1701 nt, Artificial Sequence; identical to SEQ ID NO: 128678
  derived and/or modified CDS sequence (opt3) from hemagglutinin__InfluenzaA__ABC67719

SEQ ID NO: 128680 - RNA, 1701 nt, Artificial Sequence; identical to SEQ ID NO: 128678
  derived and/or modified CDS sequence (opt3) from hemagglutinin__InfluenzaA__ABC67733

SEQ ID NO: 128681 - RNA, 1701 nt, Artificial Sequence
  derived and/or modified CDS sequence (opt3) from hemagglutinin__InfluenzaA__ABC67806
augaagaccaucauugcccugagcuacauacucugccuuguguucgcucagaaacugcccggcaacgacaauuccacagcaacuuuguguuuagggcaccaugccgucccuaacggaacgaucguuaagaccauuacaaaugaucaaaucgaggugacuaacgcgaccgaacugguacagucuucaaguacagguggcauuugcgacagcccacaccagauccuagauggggagaauuguacccucauagacgcucugcuuggagauccgcagugcgacggcuuucaaaacaaaaagugggaucuguucguggaaagauccaaagccuauucuaauuguuaccccuaugacgucccugauuacgcaucguugaggucacucaucgccagcagugguacucuggaguuuaacaaugaauccuucaacuggacaggggugacccagaauggaacgucuagcgcuugcaagcggcgcuccaacucaaguuucuucagccgacugaauuggcucacucauuuaaaguuuaaauauccagcacugaacguuaccaugcccaauaacgaggaguucgacaaacuuuacauuuggggcgugcaccauccuggcacauauaacgaucagaucucuuuguacgcccaggcuuccgggcguauuacugucucaaccaagagaagccaacagacagugaucccaaauauaggaaguaggccccggguacgcgacauuccuucuagaaucuccauuuacuggaccaucguuaagccaggugauauccugcuaauuaacagcacgggcaaucucauagccccgaggggguauuuuaaaauccggucgggaaagucuuccauuaugcgcucagacgcgcccaucggcaaguguaacagugaaugcauaacuccuaaugguagcauuccaaacgacaaacccuuccagaaugugaaccgaaucacauacggggcauguccuagauaugucaagcagaauacccugaaacuugccacuggaaugaggaacgugccagagaagcaaacacggggcaucuuuggcgcuauugccggguucaucgaaaauggaugggaggguaugguggauggcugguacggguuucgucaccagaacuccgagggaauuggccaggcagcugaccugaaaucuacccaagccgcgauagaucagaucaaugguaaguugaaccgccucauugggaaaacgaaugaaaaguuccaccagaucgagaaggaauuuagcgaggucgaaggcagaauccaggaccuggagaaauauguugaggauaccaagauugacuuauggucauacaacgccgaacugcucguggcacuugagaaccaacauacaauagaucugacugacagugaaaugaauaaauuguuugagaggaccaagaaacagcuacgggaaaacgcugaggauaugggaaauggcugcuucaagaucuaucacaagugugacaacgccugcauuggguccauccgaaauggaacauacgaucaugacguauaccgcgacgaggcucugaacaauagauuucagauuaaagguguggaacucaagagcggcuauaaagauuggauccuguggauaucuuucgccaucucaugcuuucuucugugugucgcauugcucggguucauuaugugggccugccagaagggaaacaucagguguaauauuugcaucuga

SEQ ID NO: 128682 - RNA, 1701 nt, Artificial Sequence; identical to SEQ ID NO: 128564
  derived and/or modified CDS sequence (opt3) from hemagglutinin__InfluenzaA__ABC67817

SEQ ID NO: 128683 - RNA, 1701 nt, Artificial Sequence; identical to SEQ ID NO: 128678
  derived and/or modified CDS sequence (opt3) from hemagglutinin__InfluenzaA__ABC67828

SEQ ID NO: 128684 - RNA, 1701 nt, Artificial Sequence; identical to SEQ ID NO: 128542
  derived and/or modified CDS sequence (opt3) from hemagglutinin__InfluenzaA__ABC67839

SEQ ID NO: 128685 - RNA, 1701 nt, Artificial Sequence
  derived and/or modified CDS sequence (opt3) from hemagglutinin__InfluenzaA__ABC67850
augaagaccaucauugcccugagcuacauacucugccuuguguucgcucagaaacugcccggcaacgacaauuccacagcaacuuuguguuuagggcaccaugccgucccuaacggaacgcugguuaagaccaucacaaaugaucaaauugaggugacuaacgcgaccgaauugguacagucuucaaguacagguagaaucugcgacagcccacaccagauucucgauggcgagaauuguacccugaucgacgcccuucugggggauccgcauugcgacggauuucagaacaaagaaugggauuuguucguggagagguccaaggcuuauucuaauuguuaccccuaugacgucccugauuacgugucgcuccggucacugguugcaagcaguggcacucuggaauuuaacaaugaguccuucaacuggacagguguggcccaaaaugggaccucuagcgcuugcaaacgccgauccgacaagucauuuuucagucgucucaacugguuacaccagcugaaguauaaauacccagcacuuaaugucacgaugcccaacaaugagaaguuugauaaauuguauauauggggagugcaucacccuggcacugacagcgaucagaucucucuguacgcccaggcuuccggcagaguaaccguuucaacaaagaggagccaacagacugugauuccaaacaucgggagucggcccugggcccgcggagucucuuccagaauuagcauccacuggaccauagugaaaccuggugacauucuacucaucaacucgacaggcaaucugauugcgccaaggggguacuucaagauccggucuggaaaguccucaaucaugcgcagugacgcaccgauuggcaaauguaacagcgaaugcauaacccccaaugguuccaucccuaacgauaagccauuucagaaugugaaccgaauuacguauggggccugucccagauacgucaaacagaauacucuuaagcuggcuacaggaaugaggaacguuccugagaaacaaacccggggcaucuucggcgccauagcaggguuuauugaaaauggaugggaggguaugauggacggcugguauggguuccgucaucagaacucugagggaacuggccaggcugccgaucuaaagagcacacaagcggccaucaaucagaucaacgguaaacucaaucgccugauugaaaagaccaacgagaaguuucaccagaucgaaaaagaguucucagaaguggaggggaggauucaggacuuagagaaguacguagaagauacgaaaauagaccuguggaguuauaaugcagagcuccuuguggcucuggaaaaccaacauaccaucgauuugacagacuccgagaugaacaagcuauucgaaagaacuaaaaagcagcugcgggagaaugccgaggauaugggcaacggaugcuuuaagauuuaccacaaaugugacaaugcuugcaucggcagcauccgaaacgggaccuaugaucacgacgucuaccgcgacgaagcccucaauaacagauuccagauuaagggaguggagcugaaaucugguuacaaggauuggguucuuuggauaucauuugcaaucaguugcuuccuguuguguauugugcuccugggcuuuaucaugugggccugccagaaagggaauauuagguguaacaucugcauauga

SEQ ID NO: 128686 - RNA, 1701 nt, Artificial Sequence; identical to SEQ ID NO: 128542
  derived and/or modified CDS sequence (opt3) from hemagglutinin__InfluenzaA__ABC67861

SEQ ID NO: 128687 - RNA, 1701 nt, Artificial Sequence; identical to SEQ ID NO: 128610
  derived and/or modified CDS sequence (opt3) from hemagglutinin__InfluenzaA__ABC67883

SEQ ID NO: 128688 - RNA, 1701 nt, Artificial Sequence
  derived and/or modified CDS sequence (opt3) from hemagglutinin__InfluenzaA__ABC67894
augaagaccaucauugcccugagcuacauacucugccuuguguucgcucagaaacugcccggcaacgacaauuccacagcaacuuuguguuuagggcaccaugccgucccuaacggaacgcugguuaagaccaucacaaaugaucaaauugaggugacuaacgcgaccgaacuuguacagucuucaaguacagguagaaucugcgacagcccacaccagauucucgauggcgagaauuguacccugaucgacgcucuacugggggauccgcauugcgacggauuucagaacaaagaaugggauuuguucguggagagguccaaggccuauucuaauuguuaccccuaugacgucccugauuacgugucgcuccggucacugguugcaagcaguggcacucuggaauuuaacaaugaguccuucaacuggacagguguggcccaaaaugggaccucuagcgcuugcaaacgccgauccgacaagucauuuuucaguaagcucaacugguuacaccagcugaaauauaaguacccagcacuuaaugucacgaugcccaacaaugagaaauuugauaaguuguauauauggggagugcaucacccuggcacugacagcgaucagaucucucuguacgcccaggcuuccggccguguaaccguuucaacaaaaagaagccaacagacugugauuccaaacaucgggaguaggcccuggguccggggagugucuucccgcauuagcaucuacuggaccauagugaagccuggugacauucuacucaucaacucgacaggcaaucugauugccccaagaggguauuucaagaucaggucuggaaaauccucaaucaugcggagugacgcgccgauuggcaaguguaacagcgaaugcauaacccccaaugguuccaucccuaacgauaaaccauuucagaaugucaaccgcauuacguacggggcauguccccgauauguuaagcagaauacucuuaaacuggccacaggaaugagaaacgugccugagaagcaaaccaggggcaucuucggcgcuauagccggguuuauugaaaauggaugggaggguaugauggacggcugguacggguuccggcaccagaacucugagggaacuggccaggcagcugauuugaaaagcacacaagccgcgaucaaucagaucaacgguaagcucaaucgucugauugaaaagaccaacgagaaauuucaucagaucgaaaaggaguucucagaaguagaggggcgcauucaggacuuagagaaauauguggaagauacgaagauagaccuguggaguuacaaugccgagcuccuugucgcacuggaaaaccaacacaccaucgauuugacagacuccgagaugaacaaacuauucgaaagaacuaagaagcagcugagggagaaugcugaggauaugggcaacggaugcuuuaaaauuuaucauaagugugacaaugccugcaucggcagcauccggaacgggaccuacgaucacgacguguaccgagacgaagcucucaauaaccgcuuccagauuaaaggaguugagcugaagucugguuauaaagauugggugcuuuggauaucauuugccaucaguugcuuccuguuguguauuguccuccugggcuuuaucaugugggcaugccagaaggggaauauuagauguaacaucugcauauga

SEQ ID NO: 128689 - RNA, 1701 nt, Artificial Sequence; identical to SEQ ID NO: 128610
  derived and/or modified CDS sequence (opt3) from hemagglutinin__InfluenzaA__ABC67967

SEQ ID NO: 128690 - RNA, 1701 nt, Artificial Sequence; identical to SEQ ID NO: 128610
  derived and/or modified CDS sequence (opt3) from hemagglutinin__InfluenzaA__ABC67978

SEQ ID NO: 128691 - RNA, 1701 nt, Artificial Sequence
  derived and/or modified CDS sequence (opt3) from hemagglutinin__InfluenzaA__ABC67989
augaagaccaucauugcccugagcuacauacucugccuuguguucgcucagaaacugcccggcaacgacaauuccacagcaacuuuguguuuagggcaccaugccgucccuaacggaacgcugguuaagaccaucacaaaugaucaaauugaggugacuaacgcgaccgaacuuguacagucuucaaguacagguagaaucugcgacagcccacaccagauucucgauggcgagaauuguacccugaucgacgcucuacugggggauccgcauugcgacggauuucagaacaaagaaugggauuuguucguggagagguccaaggccuauucuaauuguuaccccuaugacgucccugauuacgugucgcuccggucacugguugcaagcaguggcacucuggaauuuaacaaugaguccuucaacuggacagguguggcccaaaaugggaccucuagcgcuugcaaacgccgauccgacaagucauuuuucagucgucucaacugguuacaccagcugaaguauaaauacccagcacuuaaggucacgaugcccaauaacgagaaauuugauaaguuguauauauggggagugcaucacccuggcacugacagcgaucagaucucucuguacgcccaggcuuccggcagaguaaccguuucaacaaaaaggagccaacagacugugauuccaaauaucgggagucggcccuggguccgcggagugucuuccagaauuagcaucuacuggaccauagugaagccuggugacauucuacucaucaacucgacaggcaaccugauugccccaaggggguauuucaagauccggucuggaaaauccucaaucaugcgcagugacgcgccgauuggcaaguguaauagcgaaugcauaacccccaacgguuccaucccuaaugauaaaccauuucagaacgucaaucgaauuacguacggggcaugucccagauauguuaagcagaacacucuuaaacuggccacaggaaugaggaaugugccugagaagcaaacccggggcaucuucggcgcuauagccggguuuauugaaaacggaugggaggguaugauggacggcugguacggguuccgucaccaaaauucugagggaacuggccaggcagcugauuugaaaagcacacaggccgcgaucaaccagaucaaugguaagcucaaccgccugauugaaaagaccaaugagaaauuucaucagaucgaaaaggaguucucagaaguagaggggaggauucaggacuuagagaaauauguggaagauacgaagauagaccuguggaguuacaacgccgagcuccuugucgcacuggaaaaucaacacaccaucgauuugacagacuccgagaugaacaaacuauucgaaagaacuaagaagcagcugcgggagaacgcugaggauaugggcaauggaugcuuuaaaauuuaucauaagugugacaacgugugcaucggcagcauccgaaaugggaccuacgaucacgacguuuaccgcgacgaagcccucaacaauagauuccagauuaaaggaguggagcugaagucugguuauaaagauuggguccuuuggauaucauuugcuaucaguugcuuccuguuguguauugugcuccugggcuuuaucaugugggccugccagaaggggaacauuagguguaauaucugcauauga

SEQ ID NO: 128692 - RNA, 1701 nt, Artificial Sequence; identical to SEQ ID NO: 128665
  derived and/or modified CDS sequence (opt3) from hemagglutinin__InfluenzaA__ABC68000

SEQ ID NO: 128693 - RNA, 1701 nt, Artificial Sequence
  derived and/or modified CDS sequence (opt3) from hemagglutinin__InfluenzaA__ABC68049
augaagaccaucauugcccugagcuacauacucugccuuguguucgcucagaaacugcccggcaacgacaauuccacagcaacuuuguguuuagggcaccaugccgucccuaacggaacgcugguuaagaccaucacagaugaccaaauugaggugacuaaugcgaccgaacuuguacagucuucaaguacagguagaaucugcgauagcccacaccagauucucgacggcgagaacuguacccugaucgaugcucuacugggggacccgcauugcgauggauuucagaauaaagaaugggacuuguucguggagagguccaaggccuauucuaacuguuaccccuaugaugucccugacuacgugucgcuccggucacugguugcaagcaguggcacucuggaauuuaauaacgaguccuucaauuggacagguguggcccaaaacgggaccucuagcgcuugcaaacgccgauccgauaagucauuuuucagucgucucaauugguuacaccagcugaaguauaaauacccagcacuuaacgucacgaugcccaauaacgagaaguuugacaaauuguauguguggggaguacaucacccuggcacugauagcgaccagauaucucuguacgcccaggcuuccggcagaguuaccgugucaacaaagaggagccaacagacugucaucccaaauauugggagucggcccugggugcgcggagugucuuccaaaaucagcauuuacuggaccaucgucaagccuggugacauacuacucauuaacucgacaggcaaccugaucgccccaagaggguauuucaagauuaggucuggaaaauccucaaucaugcggagugaugcgccgaucggcaaguguaauagcgaaugcauuacccccaacgguuccauaccuaaugacaaaccauuucagaacguuaaucgcaucacguacggggcauguccccgauaugugaagcagaacacucuuaaacuggccacaggaaugagaaauguaccugagaagcaaaccaggggcauuuucggcgcuaucgccggguuuauagaaaacggaugggaggguaugauggauggcugguacggguuccggcaccaaaauucugagggaacuggccaggcagcugacuugaaaagcacacaggccgcgauuaaccagaucaaugguaagcucaaccgucugaucgaaaagaccaaugagaaauuucaucagauugaaaaggaguucucagaaguggaggggcgcauccaggauuuagagaaauaugucgaagacacgaagauugaucuguggaguuacaacgccgagcuccuuguggcacuggaaaaucaacacaccauagacuugacagauuccgagaugaacaaacuauucgaaagaacuaagaagcagcugagggagaacgcugaggacaugggcaauggaugcuuuaaaaucuaucauaagugugauaacgccugcauuggcagcauccggaaugggaccuacgaccacgacguuuaccgagaugaagcucucaacaaucgcuuccagaucaaaggaguggagcugaagucugguuauaaagacuggguccuuuggauuucauuugccauaaguugcuuccuguuguguaucgugcuccugggcuuuauuaugugggcaugccagaaggggaacaucagauguaauauuugcaucuga

SEQ ID NO: 128694 - RNA, 1701 nt, Artificial Sequence; identical to SEQ ID NO: 128610
  derived and/or modified CDS sequence (opt3) from hemagglutinin__InfluenzaA__ABC68060

SEQ ID NO: 128695 - RNA, 1701 nt, Artificial Sequence
  derived and/or modified CDS sequence (opt3) from hemagglutinin__InfluenzaA__ABC68071
augaagaccaucauugcccugagcuacauacucugccuuguguucgcucagaaacugcccggcaacgacaauuccacagcaacuuuguguuuagggcaccaugccgucccuaacggaacgcugguuaagaccaucacaaaugaucaaauugaggugacuaacgcgaccgaauugguacagucuucaaguacagguagaaucugcgacagcccacaccagauucucgauggcgagaauuguacccugaucgacgcccuucugggggauccgcauugcgacggauuucagaacaaagaaugggauuuguucguggagagguccaaggcuuauucuaauuguuaccccuaugacgucccugauuacgugucgcuccggucacugguugcaagcaguggcacucuggaauuuaacaaugaguccuucaacuggacagguguggcccaaaaugggaccucuagcgcuugcaaacgccgauccgacaagucauuuuucagucgucucaacugguuacaccagcugaaguauaaauacccagcacuuaaugucacgaugcccaacaaugagaaguuugauaaauuguauauauggggagugcaucacccuggcacugacagcgaucagaucucucuguacgcccaggcuuccggcagaguaaccguuucaacaaagaggagccaacagacugugauuccaaacaucgggagucggcccuggguccgcggagugucuuccagaauuagcaucuacuggaccauagugaaaccuggugacauucuacucaucaacucgacaggcaaucugauugccccaaggggguauuucaagauccggucuggaaaguccucaaucaugcgcagugacgcgccgauuggcaaauguaacagcgaaugcauaacccccaaugguuccaucccuaacgauaagccauuucagaaugucaaccgaauuacguacggggcaugucccagauauguuaaacagaauacucuuaagcuggccacaggaaugaggaacgugccugagaaacaaacccggggcaucuucggcgcuauagccggguuuauugaaaauggaugggaggguaugauggacggcugguacggguuccgucaccagaacucugagggaacuggccaggcagcugaucuaaagagcacacaagccgcgaucaaucagaucaacgguaaacucaaucgccugauugaaaagaccaacgagaaguuucaucagaucgaaaaagaguucucagaaguagaggggaggauucaggacuuagagaaguauguggaagauacgaaaauagaccuguggaguuacaaugccgagcuccuugucgcacuggaaaaccaacacaccaucgauuugacagacuccgagaugaacaagcuauucgaaagaacuaaaaagcagcugcgggagaaugcugaggauaugggcaacggaugcuuuaagauuuaucauaaaugugacaaugccugcaucggcagcauccgaaacgggaccuacgaucacaauguguaccgcgacgaagcucucaacaauagauuccagauuaagggaguugagcugaaaucugguuauaaggacugggugcuuuggauaucauuugccaucaguugcuuccuguuguguauuguccuccugggcuuuaucaugugggcaugccagaaagggaacauuagguguaauaucugcauauga

SEQ ID NO: 128696 - RNA, 1701 nt, Artificial Sequence; identical to SEQ ID NO: 128678
  derived and/or modified CDS sequence (opt3) from hemagglutinin__InfluenzaA__ABC68082

SEQ ID NO: 128697 - RNA, 1701 nt, Artificial Sequence
  derived and/or modified CDS sequence (opt3) from hemagglutinin__InfluenzaA__ABC68093
augaagaccaucauugcccugagcuacauacucugccuuguguucgcucagaaacugcccggcaacgacaauuccacagcaacuuuguguuuagggcaccaugccgucccuaacggaacgcugguuaagaccaucacaaaugaucaaauugaggugacuaacgcgaccgaacuuguacagucuucaaguacaagcagaaucugcgacuccccacaccagauucucgauggugagaauuguacccugaucgacgcucuacugggcgauccgcauugcgacggguuucagaacaaagaaugggauuuguucguggagaggucuaaggccuauucgaauuguuaccccuaugacgucccugauuacgugucacuccggagccugguugcaaguuccggaacucuggaauuuaacaaugagucuuucaacuggacaggcguggcccaaaaugguaccagcuccgcuugcaaacgccgaucagacaagagcuuuuucagucgucucaacugguuacaccagcugaaguauaaauacccagcacuuaaugucacgaugcccaacaaugagaaguuugauaaauuguauauauggggagugcaucacccugggacugacucugaucagaucucccuguacgcccaggcuucaggcagaguaaccguuagcacaaagaggagucaacagacugugauuccaaacaucggcucucggcccuggguccgcgggguguccagcauuaucucgauauacuggaccauugugaaaccuggagacauccuacucauuaacucuacagguaaucugaucgccccaagaggcuauuucaagaucagguccgggaagucaaguauuaugcggagcgacgcgccgauaggaaaauguaacuccgaaugcaucacccccaauggcucuauuccuaacgguaagccauuucagaaugucaaccgcaucacguacggggcauguccccgauauguuaaacagaauacucuuaagcuggccacaggaaugagaaacgugccugagaaacaaaccaggggcauauucggcgcuauugccggguuuaucgaaaauggaugggaggguaugauggauggcugguacggguuccggcaccagaacagcgagggaacuggccaggcagcugacuugaagucaacacaagccgcgaucaaucagauuaacgguaaacucaaucgucugaucgaaaagaccaacgagaaguuucaucagauugaaaaagaguucagugaaguagaggggcgcauacaggauuuagagaaguauguggaagacacgaaaaucgaucugugguccuacaaugccgagcuccuugucgcacuggaaaaccaacacaccauugacuugacagauagcgagaugaacaagcuauucgaaagaacuaaaaagcagcugagggagaaugcugaggacaugggcaacggaugcuuuaagaucuaucauaaaugugauaaugccugcaucggcucuauucggaacgggaccuacgaccacgauguguaccgagacgaagcucucaauaaccgcuuccagauaaagggaguugagcugaaaucagguuauaaggacuggauccuuuggauuaguuuugccacaagcugcuuccuguuguguaucgugcuccugggcuuuauuaugugggcaugccagaaagggaauaucagauguaacauaugcaucuga

SEQ ID NO: 128698 - RNA, 1701 nt, Artificial Sequence
  derived and/or modified CDS sequence (opt3) from hemagglutinin__InfluenzaA__ABC68222
augaagaccaucauugcccugagcuacauacucugccuuguguucgcucagaaacugcccggcaacgacaauuccacagcaacuuuguguuuagggcaccaugccgucccuaacggaacgcugguuaagaccaucacaaaugaucaaauugaggugacuaacgcgaccgaacuuguacagucuucaaguacagguggcaucugcgacagcccacaccagauucucgauggggagaauuguacccugaucgacgcucuacugggagauccgcauugcgacggcuuucagaacaaagaaugggauuuguucguggagagauccaaggccuauucuaauuguuaccccuaugacgucccugauuacgcaucgcucaggucacugguggccagcagugguacucuggaauuuaacaaugaguccuucaacuggacagggguugcucaaaauggaaccucuagcgcaugcaaacggcgcuccaacaagucauuuuucagucgacucaauugguuacaccagcugaaguauaaauacccagcccuuaacgugacgaugcccaauaacgagaaguuugacaaauuguauauauggggcguccaucacccuagcacugauucugaccagaucucccuguacgcucaggccccaggccgugugaccguaucaacaaagagaagccaacagacuguuauucccaacaucgggaguaggccuugggugcggggagucucuucccgcauuagcaucuacuggaccauagugaaaccaggugauauucuacucaucaauuguacaggcaaccugauugcgccgagaggguauuucaagaucaggucgggaaagucuuccaucaugcggucagacgcaaguauuggcaaaugcaauagcgaauguauaacccccaacgguuccaucccuaaugacaagccauuucagaacgugaaucgcauuacguacggggccugcccccgauaugucaaacagaacacucuuaagcuggcuacaggaaugagaaauguuccugagaaacaaaccaggggcaucuucggcgccauagcaggguuuauugaaaacggaugggaggguaugguggauggcugguacggguuccggcaccagaauagcgagggaacuggccaggcugccgacuugaagucuacacaagcggccaucaaccagaucaaugguaaacucaaccgucugauugaaaagaccaaugagaaguuucaucagaucgaaaaagaguucucagaaguagaggggcgcauucaggauuuagagaaguauguggaagacacgaaaauagaucuguggaguuacaacgcagagcuccuugucgcucuggaaaaccaacacaccaucgacuugacagauuccgagaugaauaagcuauucgaaagaacuaaaaagcagcugagggagaacgccgaggacaugggcaauggauguuuuaagauuuaucauaaaugcgauaacgcuugcaucggcagcauccggaaugggaccuacgaccacgauguguaccgagacgaagcccucaacaaucgcuuccagauuaagggaguugagcugaaaucugguuauaaggacuggauacuuuggaucucauuugcaauuaguuguuuccuguugugcgugguccuccugggcuuuaucaugugggccugucagaaagggaacauuagaugcaauaucuguauauga

SEQ ID NO: 128699 - RNA, 1701 nt, Artificial Sequence; identical to SEQ ID NO: 128490
  derived and/or modified CDS sequence (opt3) from hemagglutinin__InfluenzaA__ABC68233

SEQ ID NO: 128700 - RNA, 1707 nt, Artificial Sequence
  derived and/or modified CDS sequence (opt3) from hemagglutinin__InfluenzaA__ABC72655
auggagaagaucgugcuccuguucgccauugucagccuuguuaaauccgaccagauaugcaucggcuaccacgcuaacaauucuaccgaacaaguggauacaauuauggagaagaacguaacugugacgcaugcacaggacauccuggaaaagacccacaaugggaaguugugugauuuagacggagucaaaccccugauucuaagagauugcucaguggccgguuggcuccugggcaacccuaugugugacgaguuuaucaauguuccagaauggaguuauauaguggagaagccgaaccccgcgaaugaucuuugcuacccuggggacuucaacgauuaugaggaacugaagcauuugcucagcaggaucaaucacuuugagaaaauucagaucauuccaaaguccucuuggucgucacaugaagcuagcgucggagugaguuccguaugucccuaccagggcaaaucuagcuucuuucggaacguuguguggcugaucaagaaaaauuccacauauccuacuauaaagcgcucauacaacaauaccaaccaagaggaccugcucgucuuaugggguauucaccacccaaaugaugccgcagagcagacaaagcuguaucagaaccccaccacuuacaucaguguggggacaagcacccuuaaccagcgauuggugccucguauugccacgagaucuaaagucaauggacaauccggcaggauggaguucuuuuggacuauccugaagccaaacgacgcuaucaauuucgaaucaaacggcaauuuuauugcaccggaauacgccuauaaaauaguuaagaaaggggauagcaccaucaugaagagugagcuagaauacggaaacugcaauacaaaaugucagacucccaugggugcuauuaacucuuccaugccuuuccauaauauccacccacucaccauaggcgagugccccaaguaugugaaaagcaaccggcugguacuugccacagggcugcgcaauucgccucagagagagaaaaggcggaagaaacgcggauuguuuggcgcgauugcagguuucaucgaagggggauggcagggcaugguggacggcugguacggguaucaucacucuaacgagcaaggauccgguuacgccgcugacaaggaaucaacccagaaagccaucgauggcgucacgaauaaggugaacaguauuaucgacaagaugaauacucaguuugaggcaguugggcgagaguucaacaaccucgaaagaaggauugagaaucugaacaaaaagauggaagauggauucuuagacguguggacauauaaugcugagcugcucguccuuauggaaaacgagcggacccuggauuuucacgacagcaaugugaaaaacuuguacgauaagguacgucuacaacugcgcgacaaugccaaagaacucggcaacgguuguuucgaguuuuaccauaagugcgauaaugaguguauggaauccguuagaaacgggacuuaugacuacccacaguauucugaggaagcgaggcugaagcgggaggagauaagcggcgugaaacuugaaucaaucggaauuuaccagauccugaguaucuauuccacagucgccagcucuuuggcacucgcuauuaugguggccggccugucauuauggaugugcaguaaugggagccugcagugccgaauauguaucuga

SEQ ID NO: 128701 - RNA, 1701 nt, Artificial Sequence; identical to SEQ ID NO: 128291
  derived and/or modified CDS sequence (opt3) from hemagglutinin__InfluenzaA__ABC84400

SEQ ID NO: 128702 - RNA, 1701 nt, Artificial Sequence; identical to SEQ ID NO: 128500
  derived and/or modified CDS sequence (opt3) from hemagglutinin__InfluenzaA__ABC84411

SEQ ID NO: 128703 - RNA, 1701 nt, Artificial Sequence
  derived and/or modified CDS sequence (opt3) from hemagglutinin__InfluenzaA__ABC84433
augaagaccaucauugcccugagcuacauacucugccuuguguucgcucagaaacugcccggcaacgacaauagaacagcaacuuuguguuuagggcaccaugccgucccuaacggaacgaucguuaagaccauuacaaaugaucaaaucgaggugacuaacgcgaccgaacugguacaguccucuucaacagguggcauuugcgacaguccacaccagauccuagauggggagaauuguacccucauagacgcucugcuuggagauccgcagugcgacggcuuucaaaacaaaaagugggaucuguucguggaaaggagcaaagccuauuccaauuguuaccccuaugacgucccugauuacgcaucuuugcggucgcucguggccucaagcgguacucuggaguuuaacaaugaaaguuucaacuggacagggguuacccagaauggaacguccucugcuugcaagcgccgaagcaacaauuccuuuuucucacgucugaacuggcucacucauuuaaaguuuaaauauccagcacugaaugugaccaugcccaacaacgagaaguucgacaaacuuuacaucuggggcguccaccauccuggcacaaauaacgaucagauuaguuuguaugcccaggcuagcgggagaaucacugugucuaccaagaggucccaacagacaguaauuccaaauaucggaucacggccccgcguuagagacauaccuagcaggauuaguaucuacuggaccauugugaaaccaggugauauccugcuaaucaacucuacgggcaaucucauugccccgcggggguacuuuaagauacgcuccggaaagagcucgaucaugcgaucugacgcgcccauuggcaaauguaacuccgagugcaucacuccuaaugguucaauaccaaacgacaagcccuuccagaaugucaacagaauuacauauggggcauguccuagguacgugaaacagaauacccugaagcuggccacuggaaugcggaacgugccagaaaaacaaacacguggcaucuuuggcgcuaucgccggguucauugagaauggaugggaagguauggucgauggcugguauggguuucgccaccagaacagugagggaaucggccaggcagcugaccuuaagagcacccaagccgcgauuaaucagauaaacgguaaauugaacagacucaucgggaagacgaaugagaaguuccaccagauugaaaaagaguucuccgaaguugagggcaggauccaggaucuggaaaaguacguggaggacaccaaaaucgauuuauggucuuauaacgccgagcugcucguagcacuugaaaaucaacauacaauugaccugacugauagcgagaugaacaaguuguuugaacggaccaaaaagcagcuacgagagaaugcugaagacaugggaaacggcugcuucaagauauaccacaaaugugauaaugccugcaucgggucaauucgcaacggaacauaugaccaugauguguacagagacgaggcucugaauaacagguuucagaucaagggugucgagcucaaaaguggcuacaaggacuggauucuguggaucuccuucgccauaagcugcuuucuucuguguguggcauugcucggguucaucaugugggccugccagaaaggaaauauucgguguaacaucugcauuuga

SEQ ID NO: 128704 - RNA, 1701 nt, Artificial Sequence; identical to SEQ ID NO: 128610
  derived and/or modified CDS sequence (opt3) from hemagglutinin__InfluenzaA__ABC84444

SEQ ID NO: 128705 - RNA, 1701 nt, Artificial Sequence; identical to SEQ ID NO: 128681
  derived and/or modified CDS sequence (opt3) from hemagglutinin__InfluenzaA__ABC84498

SEQ ID NO: 128706 - RNA, 1701 nt, Artificial Sequence; identical to SEQ ID NO: 128681
  derived and/or modified CDS sequence (opt3) from hemagglutinin__InfluenzaA__ABC84509

SEQ ID NO: 128707 - RNA, 1701 nt, Artificial Sequence
  derived and/or modified CDS sequence (opt3) from hemagglutinin__InfluenzaA__ABC84520
augaagaccaucauugcccugagcuacauacucugccuuguguucgcucagaaacugcccggcaacgacaauuccacagcaacuuuguguuuagggcaccaugccgucccuaacggaacgaucguuaagaccauuacaaaugaucaaaucgaggugacuaacgcgaccgaacugguacagucuucaaguacagguggcauuugcgacagcccacaccagauccuagauggggagaauuguacccucauagacgcucugcuuggagauccgcagugcgacggcuuucaaaacaaaaagugggaucuguucguggaaagauccaaagccuauucuaauuguuaccccuaugacgucccugauuacgcaucguugaggucacucguggccagcagugguacucuggaguuuaacaaugaauccuucaacuggacagggguuacccagaauggaacgucuagcgcuugcaagcggcgcuccaacaauucauuuuucagucgacugaacuggcucacucauuuaaaguuuaaauauccagcacugaaugugaccaugcccaacaacgagaaguucgacaaacuuuacaucuggggcguccaccauccuggcacagauaaugaccagaucuuuuuguaugcccaggcuagcgggcguauuacugugucuaccaagagaucccaacagacaguaauuccaaacaucggaucaaggccccggguucgcgauauaccuagcagaauuaguaucuacuggaccauugugaaaccaggugacauccugcuaaucaauucuacgggcaaccucauugccccgaggggguacuucaagauacgguccggaaagagcucgaucaugcgcucugacgcgcccauuggcaaauguaauuccgagugcaucacuccuaacgguucaauaccaaaugauaagcccuuucagaacgucaaucgaauuacauauggggcauguccuagauacgugaaacagaacacccugaagcuggccacuggaaugaggaaugugccagaaaaacaaacacggggcaucuucggcgcuaucgccggguuuauugagaacggaugggaagguauggucgacggcugguauggguuccgucaccagaauagugagggaaucggccaggcagcugaucuuaagagcacccaagccgcgauuaaccagauaaaugguaaauugaaccgccucaucgggaagacgaacgagaaguuccaccagauugaaaaagaguuuuccgaaguugagggcagaauccaggaccuggaaaaguacguggaggauaccaaaaucgacuuauggucuuauaaugccgagcugcucguagcacuugaaaaccaacauacaauugaucugacugacagcgagaugaauaaguuguucgaaaggaccaaaaagcagcuacgggagaacgcugaagauaugggaaauggcugcuuuaagauauaccacaaaugugacaacgccugcaucgggucaauucgaaauggaacauaugaucaugacguguaccgcgacgaggcucugaacaauagauuccagaucaagggugucgagcucaaaaguggcuacaaggauuggauucuguggaucuccuuugccauaagcugcuuccuucuguguguggcauugcucggguuuaucaugugggccugccagaaaggaaacauuagguguaauaucugcauuuga

SEQ ID NO: 128708 - RNA, 1701 nt, Artificial Sequence
  derived and/or modified CDS sequence (opt3) from hemagglutinin__InfluenzaA__ABC84531
augaagaccaucauugcccugagcuacauauucugccucguguuugcucagaaacuucccggcaacgacaauuccacagcaacucuguguuuggggcaccaugccgucccuaacggaacguuaguuaagaccaucacaaaugaucaaauugaggugacuaacgcgaccgaacugguacagucuucaaguacagguagaaucugcgacagcccacacaggauucuagauggcaaaaauuguacccucaucgacgcucugcuuggggauccgcauugcgacggauuccagaacgagaagugggaucuguuuguggaacgguccaaagccuucucuaauuguuaucccuacgacgucccugauuaugcaucguugcgcucacucguggccagcaguggcacucuggaguuuauaaacgaagguuucaauuggacagggguuacccaguccggaggcucuuacgcuugcaagcgaggcagcgugaacuccuuuuucucacgucugaauuggcucuaugagagugagagcaaguacccagcauuaaacgucacgaugcccaauaacgggagauuugacaaacuguauaucuggggagugcaccauccuucuacugauaaggaacaaaccaaucuuuacguaagggccgcuggucggguuacaguguccacuaaacgcucacagcagaccgucauuccaaacaucggcagcagacccugggugaggggguugaguucucggauuuccaucuacuggacaauagugaagccuggagacauucugcuaaucaacagcaccggcaaucucauugccccacgcgguuauuucaaaauccgaacggggaagucgucuaucaugagauccgaugcgccgauuggaacuuguucaagugagugcauaacacccaacggcagcaucccuaaugacaagccauuucagaacgucaauaaaauuaccuacggcgcaugucccagguauguuaagcaaaacacucugaaacuugccacagggaugcggaaugugccugaaaagcagacccguggaaucuucggugcuauagccggcuuuauugagaacgggugggagggaaugguagacggcugguacgguuuccgccaccaaaauuccgaagggacgggccaggcagcugaucugaaaucuacccaggccgcgaucgaccagaucaacggaaaguugaauagacucauugagaaaacaaacgaaaaguuccaccagaucgagaaggaauuuagcgagguggagggcaggauucaagaucuggaaaaauaugucgaggacacuaagauagauuuauggucauacaaugccgaacugcucguggcacuugagaaccagcauaccaucgaccugacagauagugaaaugaauaaauuguucgagaagacucggaaacagcuacgagagaacgcugaagacauggggaacggaugcuuuaagauuuaucacaagugugauaaugccugcaucgguuccauccgcaacggcaccuacgaccaugauguuuacagagacgaggcucugaauaacagguuccagauuaaagggguggaacucaagagcggauauaaagacuggauacuguggaucucuuuugccauuucaugcuuccuucugugugucguguugcucggcuuuaucaugugggcaugccaaaaggguaauauucgguguaacaucugcauauga

SEQ ID NO: 128709 - RNA, 1701 nt, Artificial Sequence; identical to SEQ ID NO: 128698
  derived and/or modified CDS sequence (opt3) from hemagglutinin__InfluenzaA__ABC84560

SEQ ID NO: 128710 - RNA, 1701 nt, Artificial Sequence
  derived and/or modified CDS sequence (opt3) from hemagglutinin__InfluenzaA__ABC84571
augaagaccaucauugcccugagcuacauacucugccuuguguucgcucagaaacugcccggcaacgacaauuccacagcaacuuuguguuuagggcaccaugccgucccuaacggaacgcugguuaagaccaucacaaaugaucaaauugaggugacuaacgcgaccgaacuuguacagucuucaaguacagguggcaucugcgacagcccacaccagauuaucgauggggagaauuguacccucauagacgcucugcuuggagauccgcauugcgacggcuuucagaacaaagaaugggaucuguucguggagagauccaaggccuauucuaauuguuaccccuaugacgucccugauuacgcaucguugaggucacucguggccagcagugguacucuggaauuuaacaaugaguccuucaacuggacagggguugcucaaaauggaaccucuagcgcaugcaaacggcgcuccaacaagucauuuuucagucgacugaauuggcuccaccaguuaaaguauaaauacccagcccugaacgugacgaugcccaauaacgagaaguuugacaaacuuuauaucuggggcguccaucacccuagcacugauucugaccagauuuccuuguacgcucaggccccaggccgugugaccguaucaacaaagagaagccaacagacuguuauccccaacauugggaguaggccuugggugcggggagucucuucccgcaucagcauauacuggaccauugugaaaccaggugauauccugcuaauuaauuguacaggcaaccucaucgcgccgagaggguauuucaagaucaggucgggaaagucuuccauuaugcggucagacgcaaguauaggcaaaugcaauagcgaauguaucacccccaacgguuccauuccuaaugacaagccauuucagaacgugaaucgcaucacguacggggccugcccccgauaugucaaacagaacacucugaagcuagcuacaggaaugagaaauguuccugagaaacaaaccaggggcauauucggcgccauugcaggguuuaucgaaaacggaugggaggguaugguggauggcugguacggguuccggcaccagaauagcgagggaacuggccaggcugccgaccugaagucuacacaagcggccaucaaccagauuaaugguaaauugaaccgucucaucgaaaagaccaaugagaaguuucaucagauugaaaaagaguucucagaaguagaggggcgcauacaggaucuggagaaguauguggaagacacgaaaaucgauuuauggaguuacaacgcagagcugcucgucgcucuugaaaaccaacacaccauugaccugacagauuccgagaugaauaaguuguucgaaagaacuaaaaagcagcuaagggagaacgccgaggacaugggcaauggauguuuuaagaucuaucauaaaugcgauaacgcuugcaucggcagcauucggaaugggaccuacgaccacgauguguaccgagacgaagcccugaacaaucgcuuccagauaaagggaguugagcucaaaucugguuauaaggacuggauccuguggauuucauuugcaaucaguuguuuccuucugugcguggucuugcucggcuuuauuaugugggccugucagaaagggaacaucagaugcaauauauguaucuga

SEQ ID NO: 128711 - RNA, 1701 nt, Artificial Sequence; identical to SEQ ID NO: 128698
  derived and/or modified CDS sequence (opt3) from hemagglutinin__InfluenzaA__ABC85754

SEQ ID NO: 128712 - RNA, 1701 nt, Artificial Sequence; identical to SEQ ID NO: 128678
  derived and/or modified CDS sequence (opt3) from hemagglutinin__InfluenzaA__ABC85765

SEQ ID NO: 128713 - RNA, 1701 nt, Artificial Sequence
  derived and/or modified CDS sequence (opt3) from hemagglutinin__InfluenzaA__ABC85776
augaagaccaucauugcccugagcuacauacucugccuuguguucgcucagaaacugcccggcaacgacaauuccacagcaacuuuguguuuagggcaccaugccgucccuaacggaacgcugguuaagaccaucacaaaugaucaaauugaggugacuaacgcgaccgaacuuguacagucuucaaguacagguggcaucugcgacagcccacaccagauucucgauggggagaauuguacccugaucgacgcucuacugggagauccgcauugcgacggcuuucagaacaaagaaugggauuuguucguggagagauccaaggccuauucuaauuguuaccccuaugacgucccugauuacgcaucgcucaggucacugguggccagcagugguacucuggaauuuaacaaugaguccuucaacuggacagggguugcucaaaauggaaccucuagcgcaugcaaacggcgcuccaacaagucauuuuucagucgacucaauugguuacaccagcugaaguauaaauacccagcccuuaacgugacgaugcccaauaacgagaaguuugacaaauuguauauauggggcguccaucacccuagcacugauucugaccagaucucccuguacgcucaggccccaggccgugugaccguaucaacaaagagaagccaacagacuguuauucccaacaucgggaguaggccuugggugcggggagucucuucccgcauuagcaucuacuggaccauagugaaaccaggugauauucuacucaucaauuucacaggcaaccugauugcgccgagaggguauuuuaagaucaggucgggaaagucuuccaucaugcggucagacgcaaguauuggcaaauguaauagcgaaugcauaacccccaacgguuccaucccuaaugacaagccauuccagaacgugaaucgcauuacguacggggccuguccccgauaugucaaacagaacacucuuaagcuggcuacaggaaugagaaauguuccugagaaacaaaccaggggcaucuuuggcgccauagcaggguucauugaaaacggaugggaggguaugguggauggcugguacggguuucggcaccagaauagcgagggaacuggccaggcugccgacuugaagucuacacaagcggccaucaaccagaucaaugguaaacucaaccgucugauugaaaagaccaaugagaaguuccaucagaucgaaaaagaguucucagaaguagaggggcgcauucaggauuuagagaaguauguggaagacacgaaaauagaucuguggaguuacaacgcagagcuccuugucgcucuggaaaaccaacacaccaucgacuugacagauuccgagaugaauaagcuauuugaaagaacuaaaaagcagcugagggagaacgccgaggacaugggcaauggaugcuucaagauuuaucauaaaugugauaacgcuugcaucggcagcauccggaaugggaccuacgaccacgauguguaccgagacgaagcccucaacaaucgcuuucagauuaagggaguugagcugaaaucugguuauaaggacuggauacuuuggaucucauucgcaauuaguugcuuucuguugugugugguccuccugggcuucaucaugugggccugccagaaagggaacauuagauguaauaucugcauauga

SEQ ID NO: 128714 - RNA, 1701 nt, Artificial Sequence; identical to SEQ ID NO: 128698
  derived and/or modified CDS sequence (opt3) from hemagglutinin__InfluenzaA__ABC85787

SEQ ID NO: 128715 - RNA, 1701 nt, Artificial Sequence; identical to SEQ ID NO: 128681
  derived and/or modified CDS sequence (opt3) from hemagglutinin__InfluenzaA__ABC85798

SEQ ID NO: 128716 - RNA, 1701 nt, Artificial Sequence; identical to SEQ ID NO: 128678
  derived and/or modified CDS sequence (opt3) from hemagglutinin__InfluenzaA__ABC85820

SEQ ID NO: 128717 - RNA, 1701 nt, Artificial Sequence; identical to SEQ ID NO: 128678
  derived and/or modified CDS sequence (opt3) from hemagglutinin__InfluenzaA__ABC85831

SEQ ID NO: 128718 - RNA, 1701 nt, Artificial Sequence; identical to SEQ ID NO: 128681
  derived and/or modified CDS sequence (opt3) from hemagglutinin__InfluenzaA__ABC85842

SEQ ID NO: 128719 - RNA, 1701 nt, Artificial Sequence; identical to SEQ ID NO: 128678
  derived and/or modified CDS sequence (opt3) from hemagglutinin__InfluenzaA__ABC85853

SEQ ID NO: 128720 - RNA, 1701 nt, Artificial Sequence; identical to SEQ ID NO: 128678
  derived and/or modified CDS sequence (opt3) from hemagglutinin__InfluenzaA__ABC85864

SEQ ID NO: 128721 - RNA, 1701 nt, Artificial Sequence; identical to SEQ ID NO: 128681
  derived and/or modified CDS sequence (opt3) from hemagglutinin__InfluenzaA__ABC85886

SEQ ID NO: 128722 - RNA, 1701 nt, Artificial Sequence; identical to SEQ ID NO: 128610
  derived and/or modified CDS sequence (opt3) from hemagglutinin__InfluenzaA__ABC85908

SEQ ID NO: 128723 - RNA, 1701 nt, Artificial Sequence
  derived and/or modified CDS sequence (opt3) from hemagglutinin__InfluenzaA__ABC85919
augaagaccaucauugcccugagcuacauacucugccuuguguucgcucagaaacugcccggcaacgacaauuccacagcaacuuuguguuuagggcaccaugccgucccuaacggaacgcugguuaagaccaucacaaaugaucaaauugaggugacuaacgcgaccgaauugguacagucuucaaguacagguagaaucugcgacagcccacaccagauucucgauggcgagaauuguacccugaucgacgcccuucugggggauccgcauugcgacggauuucagaacaaagaaugggauuuguucguggagagguccaaggcuuauucuaauuguuaccccuaugacgucccugauuacgugucgcuccggucacugguugcaagcaguggcacucuggaauuuaacaaugaguccuucaacuggacagguguggcccaaaaugggaccucuagcgcuugcaaacgccgauccgacaagucauuuuucagucgucucaacugguuacaccagcugaaguauaaauacccagcacuuaaugucacgaugcccaacaaugagaaguuugauaaauuguauauauggggagugcaucacccuggcacugacagcgaucagaucucucuguacgcccaggcuuccggcagaguaaccguuucaacaaagaggagccaacagacugugauuccaaacaucgggagucggcccuggguccgcggagugucuuccagaauuagcaucuacuggaccauagugaaaccuggugacauucuacucaucaacucgacaggcaaucugauugccccaaggggguauuucaagauccggucuggaaaguccucaaucaugcgcagugacgcgccgauuggcaaauguaacagcgaaugcauaacccccaaugguuccaucccuaacgauaagccauuucagaaugucaaccgaauuacguacggggcaugucccagauauguuaaacagaauacucuuaagcuggccacaggaaugaggaacgugccugagaaacaaacccggggcaucuucggcgcuauagccggguuuauugaaaauggaugggaggguaugauggacggcugguacggguuccgucaccagaacucugagggaacuggccaggcagcugaucuaaagagcacacaagccgcgaucaaucagaucaacgguaaacucaaucgccugauugaaaagaccaacgagaaguuucaucagaucgaaaaagaguucucagaaguagaggggaggauucaggacuuagagaaguauguggaagauacgaaaauagaccuguggaguuacaaugccgagcuccuugucgcacuggaaaaccaacacaccaucgauuugacagacuccgagaugaacaagcuauucgaaagaacuaaaaagcagcugcgggagaaugcugaggauaugggcaacggaugcuuuaagauuuaucauaaaugugacaaugccugcaucggcagcauccgaaacgggaccuacgaucacgacguguaccgcgacgaagcucucaauaacagauuccagauuaagggaguugagcugaaaucugguuauaaggauugggugcuuuggauaucauuugccaucaguugcuuccuguuguguauuguccucaugggcuuuaucaugugggcaugccagaaagggaauauuagguguaacaucugcauauga

SEQ ID NO: 128724 - RNA, 1701 nt, Artificial Sequence; identical to SEQ ID NO: 128610
  derived and/or modified CDS sequence (opt3) from hemagglutinin__InfluenzaA__ABC85930

SEQ ID NO: 128725 - RNA, 1701 nt, Artificial Sequence; identical to SEQ ID NO: 128659
  derived and/or modified CDS sequence (opt3) from hemagglutinin__InfluenzaA__ABC85941

SEQ ID NO: 128726 - RNA, 1701 nt, Artificial Sequence
  derived and/or modified CDS sequence (opt3) from hemagglutinin__InfluenzaA__ABC85952
augaagaccaucauugcccugagcuacauacucugccuuguguucgcucagaaacugcccggcaacgacaauuccacagcaacuuuguguuuagggcaccaugccgucccuaacggaacgcugguuaagaccaucacaaaugaucaaauugaggugacuaacgcgaccgaacuuguacagucuucaaguacagguagaaucugcgacagcccacaccagauucucgauggcgagaauuguacccugaucgacgcucuacugggggauccgcauugcgacggauuucagaacaaaaagugggauuuguucguggaaagguccaaagccuauucuaauuguuaccccuaugacgucccugauuacgugucgcuccggucacugguugcaagcaguggcacucuggaguuuaacaaugaauccuucaacuggacagguguggcccaaaaugggaccucuagcgcuugcaagcgccgauccgacaagucauuuuucagucgucucaacugguuacaccagcugaaauauaaguacccagcacuuaaugucacgaugcccaacaaugagaaauuugauaaguuguauauauggggagugcaucacccuggcacugacagcgaucagaucucucuguacgcccaggcuuccggcagaguaaccguuucaacaaaaaggagccaacagacugugauuccaaacaucgggagucggcccuggguccgcggagugucuuccagaauuagcaucuacuggaccauagugaagccuggugacauucuacucaucaacucgacaggcaaucugauugccccaaggggguauuucaagauccggucuggaaaauccucaaucaugcgcagugacgcgccgauuggcaaguguaacagcgagugcauaacccccaaugguuccaucccuaacgauaaaccauuucagaaugucaaccgaauuacguacggggcaugucccagauauguuaagcagaauacucuuaaacuggccacaggaaugaggaacgugccugaaaagcaaacccggggcaucuucggcgcuauagccggguuuauugagaauggaugggaagguaugauggacggcugguacggguuccgucaccauaacucugagggaacuggccaggcagcugauuugaaaagcacacaggccgcgaucaaucaaaucaacgguaagcucaaucgccugauugagaagaccaacgaaaaauuucaccagaucgagaaggaguucucagaaguagaagggaggauucaggacuuagagaaauauguggaggauacgaagauagaccuguggaguuacaaugccgaacuccuugucgcacuggagaaccagcauaccaucgauuugacagacuccgaaaugaacaaacuauucgagagaacuaagaagcaacugcgggaaaaugcugaggauaugggcaacggaugcuuuaaaauuuaucacaagugugacaaugccugcaucggcagcauccgaaacgggaccuacgaucacgacguguaccgcgacgaggcucucaauaacagauuccagauuaaaggaguugaacugaagucugguuauaaagauugggugcuuuggauaucauuugccaucaguugcuuccuguuguguauuguccuccugggcuuuaucaugugggcaugccagaaggggaauauuagguguaacaucugcauauga

SEQ ID NO: 128727 - RNA, 1701 nt, Artificial Sequence; identical to SEQ ID NO: 128610
  derived and/or modified CDS sequence (opt3) from hemagglutinin__InfluenzaA__ABC85974

SEQ ID NO: 128728 - RNA, 1701 nt, Artificial Sequence; identical to SEQ ID NO: 128610
  derived and/or modified CDS sequence (opt3) from hemagglutinin__InfluenzaA__ABC85985

SEQ ID NO: 128729 - RNA, 1701 nt, Artificial Sequence
  derived and/or modified CDS sequence (opt3) from hemagglutinin__InfluenzaA__ABC85996
augaagaccaucauugcccugagcuacauacucugccuuguguucgcucagaaacugcccggcaacgacaauuccacagcaacuuuguguuuagggcaccaugccgucccuaacggaacgaucguuaagaccauuacaaaugaucaaaucgaggugacuaacgcgaccgaacugguacagucuucaaguacagguggcauuugcgacagcccacaccagauccuagauggggagaauuguacccucauagacgcucugcuuggagauccgcagugcgacggcuuucaaaacaaaaagugggaucuguucguggaaagauccaaagccuauucuaauuguuaccccuaugacgucccugauuacgcaucguugaggucacucguggccagcagugguacucuggaguuuaacaaugaauccuucaacuggacagggguuacccagaauggaacgucuagcgcuugcaagcggcgcuccaacaauucauuuuucagucgacugaacuggcucacucauuuaaaguuuaaauauccagcacugaaugugaccaugcccaacaacgagaaguucgacaaacuuuacaucuggggcguccaccauccuggcacagauaaugaccagauuagcuuguaugcccaggcuucugggcguaucacuguguccaccaagagaucacaacagacaguaauuccaaacaucggaagcaggccccggguucgcgauauaccuaguagaauuucuaucuacuggaccauugugaaaccaggugacauccugcuaaucaauuccacgggcaaccucauugccccgaggggguacuuuaagauacggagcggaaagucgucuaucaugcgcuccgacgcgcccauuggcaaauguaauucagagugcaucacuccuaacgguaguauaccaaaugauaagcccuuccagaacgucaaucgaauuacauauggggcauguccuagauacgugaaacagaacacccugaaacuugccacuggaaugaggaaugugccagaaaagcaaacacggggcaucuuuggcgcuaucgccggguucauugagaacggaugggaagguaugauggacggcugguauggguuucgucaccagaauagcgagggaaucggccaggcagcugaucugaaguccacccaagccgcgauuaaccagauaaaugguaaauugaaccgccucaucgggaagacgaacgagaaguuccaccagauugaaaaagaguucucugaagucgagggcagaauccaggaccuggaaaaguacguugaggauaccaaaaucgacuuauggagcuauaaugccgagcugcucguggcacuugaaaaccaacauacaauugaucugacugacucagagaugaauaaguuguuugaaaggaccaaaaagcagcuacgggagaacgcugaagauaugggaaauggcugcuucaagauauaccacaaaugugacaacgccugcaucgggaguauucgaaauggaacauaugaucaugacguauaccgcgacgaggcucugaacaauagauuucagaucaaggguguggagcucaaauccggcuacaaggauuggauucuguggaucagcuucgccauaucuugcuuucuucugugugucgcauugcucggguucaucaugugggccugccagaaaggaaacauuagguguaauaucugcauuuga

SEQ ID NO: 128730 - RNA, 1701 nt, Artificial Sequence; identical to SEQ ID NO: 128291
  derived and/or modified CDS sequence (opt3) from hemagglutinin__InfluenzaA__ABC86007

SEQ ID NO: 128731 - RNA, 1701 nt, Artificial Sequence
  derived and/or modified CDS sequence (opt3) from hemagglutinin__InfluenzaA__ABC86018
augaagaccaucauugcccugagcuacauacucugccuuguguucgcucagaaacugcccggcaacgacaauuccacagcaacuuuguguuuagggcaccaugccgucccuaacggaacgaucguuaagaccauuacaaaugaucaaaucgaggugacuaacgcgaccgaacugguacagucuucaaguacagguggcauuugcgacagcccacaccagauccuagauggggagaauuguaccauaaucgacgcucuccugggagauccgcagugcgacggcuuucaaaacaaaaagugggaucuuuucguggaaagauccaaagccuauucuaauuguuaccccuaugacgucccugauuacgcaucgcugaggucauugguggccagcagugguacucucgaguuuaacaaugaauccuucaacuggacagggguuacccagaauggaacgucuagcgcuugcaagcggcgcuccaacaauucauuuuucagucgacugaacuggcugacucaucucaaguuuaaauauccagcauuaaaugugaccaugcccaacaacgagaaguucgacaaacuguacauuuggggcguccaccauccuggcacagauaaugaccagaucagccuuuaugcccaggcuucugggcguauuacuguguccaccaagagaucacaacagacaguaaucccaaacauaggaagcaggccccggguucgcgauauuccuaguagaaucucuauuuacuggaccaucgugaaaccaggugacaucuugcugauuaauuccacgggcaaccuaauagccccgaggggguacuuuaagauccggagcggaaagucgucuauuaugcgcuccgacgcgcccaucggcaaauguaauucagagugcauaacuccuaacgguaguauuccaaaugauaagcccuuccagaacgucaaucgaaucacauauggggcauguccuagauacgugaaacagaacacccucaagcuggccacuggaaugaggaaugugccagaaaaacaaacacggggcaucuuuggcgcuauugccggguucaucgagaacggaugggaagguauggucgacggcugguauggguuucgucaccagaauagcgagggaauuggccaggcagcugaucuuaaguccacccaagccgcgauaaaccagaucaaugguaaacugaaccgcuugauugggaagacgaacgagaaguuccaccagaucgaaaaagaguucucugaaguugagggcagaauccaggaccucgaaaaguacguggaggauaccaaaauugaccuguggagcuauaaugccgaguuacugguagcacucgaaaaccaacauacaauagaucuuacugacucagagaugaauaagcuguuugaaaggaccaaaaagcaguugcgggagaacgcugaagauaugggaaauggcugcuucaagaucuaccacaaaugugacaacgccugcauugggaguauccgaaauggaacauaugaucaugacguguaccgcgacgaggcucuaaacaauagauuucagauuaagggugucgagcugaaauccggcuacaaggauuggauccucuggaucagcuucgccauaucuugcuuucugcuuuguguggcacuguugggguucauuaugugggccugccagaaaggaaacaucagguguaauauuugcaucuga

SEQ ID NO: 128732 - RNA, 1701 nt, Artificial Sequence; identical to SEQ ID NO: 128291
  derived and/or modified CDS sequence (opt3) from hemagglutinin__InfluenzaA__ABC86029

SEQ ID NO: 128733 - RNA, 1701 nt, Artificial Sequence; identical to SEQ ID NO: 128330
  derived and/or modified CDS sequence (opt3) from hemagglutinin__InfluenzaA__ABC86040

SEQ ID NO: 128734 - RNA, 1701 nt, Artificial Sequence; identical to SEQ ID NO: 128564
  derived and/or modified CDS sequence (opt3) from hemagglutinin__InfluenzaA__ABC86124

SEQ ID NO: 128735 - RNA, 1701 nt, Artificial Sequence; identical to SEQ ID NO: 128641
  derived and/or modified CDS sequence (opt3) from hemagglutinin__InfluenzaA__ABC86137

SEQ ID NO: 128736 - RNA, 1701 nt, Artificial Sequence
  derived and/or modified CDS sequence (opt3) from hemagglutinin__InfluenzaA__ABC97374
augaagaccaucauugcccugagcuacauauucugccucgugcuuggccaggacuuucccgggaacgauaauuccacagcuacucuguguuugggacaccaugcagucccuaacgguacguuaguuaaaaccaucacaaaugaccaaauugaggugacuaacgccaccgaacugguacagucuucaaguacaggcaagaucugcaauaacccacacaggauucuagaugggaucgacuguacccucauagaugcgcugcuuggagacccgcauugcgauggcuuccagaaugagacuugggaccuguuuguggaaagaagcaaggcuuucuccaacuguuaucccuacgaugucccugacuaugccucuuugcggucgcucguggcaucaagcgguacacuggaguuuaucaaugaaggguucaccuggacgggaguuacucagaacggcggcaguaaugccugcaaacgcgggccagauuccggauuuuucucucgacugaacuggcucuacaaaagcgguuccaccuaucccguguuaaaugucacaaugccuaacaaugacaacuuugauaagcuguacauuuggggcgugcaccauccaucaacugaccaagagcagaccagucuuuauguacaggcuagcgggcguguuacagugucuaccaagagaucccagcaaacgaucauucccaacaucggaucaaggccuuggguccggggcuugagcagucgcauaucuauuuacuggacuaucgugaaaccaggugacauucuggugaucaauuccaacgggaaucuaaucgcaccgagaggauacuucaagaugaggacaggcaaaagcucgauuaugcggucugaugcccccauaggcaccuguaucuccgagugcauuacuccuaacgggucaaucccaaaugacaagcccuuucagaacgucaauaaaauaacauauggagcuuguccuaaguacguuaagcagaacacccucaaacuggccacggguaugcgcaaugugccagaaaagcagacccgaggccuuuucggggcgauugcaggauuuaucgagaacggcugggaagguaugguagaugggugguauggcuucagacaccaaaauagugagggaacaggccaggccgcugaccugaaaagcacucaggccgcaaucgaucaaauuaacgggaaguugaauagggugaucgagaaaaccaacgaaaaguuccaccagauugagaaagaauuuuccgaggucgaaggacggauacaggaccucgagaaguacguggaggauacaaagaucgaccuguggucuuauaaugcugaauuacugguugcccucgagaaccagcauacuauugaucuuaccgacagcgaaaugaacaaacuguucgagaagacacgucgccaauugagagaaaaugcggaggauauggguaacggcugcuuuaggaucuaccacaaaugugacaaugccugcaucgggucaauucggaacggaaccuaugaccaugauguguaccgagacgaggcacuaaauaaccgcuuccagauaaagggcgucgaacugaaaagugguuacaaggauuggauccucuggauuuccuuugcuaucagcugcuuccugcuuugugugguacuguugggguuuauuaugugggccugccagaagggcaauaucagauguaacauaugcaucuga

SEQ ID NO: 128737 - RNA, 1701 nt, Artificial Sequence; identical to SEQ ID NO: 128080
  derived and/or modified CDS sequence (opt3) from hemagglutinin__InfluenzaA__ABD15449

SEQ ID NO: 128738 - RNA, 1701 nt, Artificial Sequence
  derived and/or modified CDS sequence (opt3) from hemagglutinin__InfluenzaA__ABD15460
augaagaccaucauugcccugagcuacauacucugccuuguguucgcucagaaacugcccggcaacgacaauuccacagcaacuuuguguuuagggcaccaugccgucccuaacggaacgaucguuaagaccauuacaaaugaucaaaucgaggugacuaacgcgaccgaacugguacagauuucuucaacagguggcaucugcgacaguccauaucagauacuagauggggagaauuguacccucaucgacgcucugcuuggagauccgcagugcgacggcuuucaaaacaaaaagugggaucuguucguggaaagaagcaaagccuacuccaauuguuaucccuacgacgucccugauuaugcaucuuugaggucgcucguggccucaagcgguacucuggaguuuaacaaugaaaguuucgacuggacagggguuacccagaacggaacguccucugcuugcaagcggcgcagcaauaaguccuuuuucucacgacugaacuggcucacucacuuaaaauacaaguauccagcacugaaugugaccaugcccaacaaugagaaauuugauaaacuuuacauuuggggcguccaucacccuggcacagacagugaucagaucagcuuguacgcccaggcuucugggcguauuacuguguccaccaagagaucacaacagacaguaaucccaaacauaggaagcaggccccggguucgcgacgugaguucuagaauuuccaucuauuggaccauugucaagccuggugacauccugcuaaucaacagcacgggcaaucucauugccccaaggggguacuucaagauacggucgggaaaaucuuccaucaugcgcucagaugcgccgauuggcaaguguaacagugagugcaucacucccaaugguagcauaccuaacgacaaaccauuucagaaugugaaccgaauuacauauggggcaugucccagauacgugaagcagaauacccugaaacuugccacuggaaugaggaacgucccugaaaagcaaacacggggcaucuucggcgcuaucgccggguuuauugagaauggaugggaagguaugguugauggcugguauggguuccgucaucagaacuccgagggaaccggccaggcagcugaccugaaaucuacgcaagccgcgaucaaucagauuaacgguaaguugaaucgccucauagggaagaccaacgagaaauuucaccagaucgaaaaggaguucagcgaaguggagggcaggauucaggaucuggaaaaauacguagaggacacaaagaucgauuuauggucauauaaugccgagcugcucguggcacuugaaaaccaacacacuaucgaccugaccgauagugagaugaacaaauuguucgaaagaacaaagaagcagcuacgggagaaugcugaagacaugggaaacggcugcuuuaaaauuuaccauaagugugauaaugccugcauaggguccauccgaaacggaacuuacgaccacgacgucuaucgcgaugaggcucugaauaacagauuccagauuaaagguguggagcucaagagcggcuacaaagacuggauccuguggauuucuuuugccaucucaugcuuccuucuguguguugcauugcucggguuuauaaugugggccugccagaagggaaauaucagguguaacauuugcaucuga

SEQ ID NO: 128739 - RNA, 1701 nt, Artificial Sequence; identical to SEQ ID NO: 128080
  derived and/or modified CDS sequence (opt3) from hemagglutinin__InfluenzaA__ABD15471

SEQ ID NO: 128740 - RNA, 1701 nt, Artificial Sequence; identical to SEQ ID NO: 128080
  derived and/or modified CDS sequence (opt3) from hemagglutinin__InfluenzaA__ABD15482

SEQ ID NO: 128741 - RNA, 1701 nt, Artificial Sequence; identical to SEQ ID NO: 128738
  derived and/or modified CDS sequence (opt3) from hemagglutinin__InfluenzaA__ABD15493

SEQ ID NO: 128742 - RNA, 1701 nt, Artificial Sequence; identical to SEQ ID NO: 128291
  derived and/or modified CDS sequence (opt3) from hemagglutinin__InfluenzaA__ABD15526

SEQ ID NO: 128743 - RNA, 1701 nt, Artificial Sequence; identical to SEQ ID NO: 128500
  derived and/or modified CDS sequence (opt3) from hemagglutinin__InfluenzaA__ABD15537

SEQ ID NO: 128744 - RNA, 1701 nt, Artificial Sequence; identical to SEQ ID NO: 128500
  derived and/or modified CDS sequence (opt3) from hemagglutinin__InfluenzaA__ABD15548

SEQ ID NO: 128745 - RNA, 1701 nt, Artificial Sequence; identical to SEQ ID NO: 128518
  derived and/or modified CDS sequence (opt3) from hemagglutinin__InfluenzaA__ABD15559

SEQ ID NO: 128746 - RNA, 1701 nt, Artificial Sequence; identical to SEQ ID NO: 128500
  derived and/or modified CDS sequence (opt3) from hemagglutinin__InfluenzaA__ABD15570

SEQ ID NO: 128747 - RNA, 1701 nt, Artificial Sequence; identical to SEQ ID NO: 128518
  derived and/or modified CDS sequence (opt3) from hemagglutinin__InfluenzaA__ABD15581

SEQ ID NO: 128748 - RNA, 1701 nt, Artificial Sequence; identical to SEQ ID NO: 128500
  derived and/or modified CDS sequence (opt3) from hemagglutinin__InfluenzaA__ABD15592

SEQ ID NO: 128749 - RNA, 1701 nt, Artificial Sequence; identical to SEQ ID NO: 128500
  derived and/or modified CDS sequence (opt3) from hemagglutinin__InfluenzaA__ABD15603

SEQ ID NO: 128750 - RNA, 1701 nt, Artificial Sequence; identical to SEQ ID NO: 128500
  derived and/or modified CDS sequence (opt3) from hemagglutinin__InfluenzaA__ABD15614

SEQ ID NO: 128751 - RNA, 1701 nt, Artificial Sequence
  derived and/or modified CDS sequence (opt3) from hemagglutinin__InfluenzaA__ABD15625
augaagaccaucauugcccugagcuacauacucugccuuguguucgcucagaaacugcccggcaacgacaauuccacagcaacuuuguguuuagggcaccaugccgucccuaacggaacgaucguuaagaccauuacaaaugaucaaaucgaggugacuaacgcgaccgaacugguacagucuucaaguacagguggcauuugcgacagcccacaccagauccuagauggggagaauuguacccucauagacgcucugcuuggagauccgcagugcgacggcuuucaaaacaaaaagugggaucuguucguggaaagauccaaagccuauucuaauuguuaccccuaugacgucccugauuacgcaucguugaggucacucguggccagcagugguacucuggaguuuaacaaugaauccuucgacuggacagggguuacccagaacggaacgucuagcgcuugcaagcggcgcuccaauaagucauuuuucagucgacugaacuggcucacucauuuaaaauauaaguacccagcacugaaugugaccaugcccaacaaugagaaauuugauaaacuuuauaucuggggcguccaccauccuggcacagacagcgaucagauuucuuuguacgcccaggcuuccgggcguaucacugugucaaccaagagaagccaacagacaguaauuccaaacaucggaaguaggccccggguucgcgacgugucuucccagauaagcauuuacuggaccaucgucaagccuggugacauucugcuaaucaacucgacgggcaaucucaucgccccaagaggguauuucaagauuaggucuggaaaauccucaauaaugcggagugaugcgccgaucggcaaguguaacagcgagugcauuacucccaaugguuccaucccuaacgacaaaccauuucagaaugugaaccgcauaacauacggggcauguccccgauaugugaagcaaaauacccugaaacuugccacuggaaugagaaacgucccugaaaagcagacaaggggcauuuucggcgcuaucgccggguuuaucgagaauggaugggaagguaugguugauggcugguacggguuccggcaccagaacucugagggaaccggccaagcagcugaccugaaaagcacgcaggccgcgauuaaucagaucaacgguaaguugaaucgucucauugggaagaccaacgagaaauuucaccagauagaaaaggaguucucagaaguggagggccgcauccaagaucugguaaaauauguggaagacacaaagauugauuuauggaguuacaaugccgagcugcucgucgcacuugagaaccagcauacuaucgaccugaccgauuccgaaaugaacaaauuguucgagagaacaaagaagcagcuaagggaaaaugcugaggacaugggaaacggcugcuuuaaaaucuaucacaagugugauaaugccugcauugggagcauacggaacggaacuuacgaccaugacguguaccgagaugaagcucugaauaaccgcuuccagaucaaagguguugagcucaagucuggcuauaaagacuggauucuguggaucucauuugccauuaguugcuuccuucuguguguggcauugcucggguuuaucaugugggccugccaaaagggaaauauaagauguaacaucugcauuuga

SEQ ID NO: 128752 - RNA, 1701 nt, Artificial Sequence; identical to SEQ ID NO: 128518
  derived and/or modified CDS sequence (opt3) from hemagglutinin__InfluenzaA__ABD15636

SEQ ID NO: 128753 - RNA, 1701 nt, Artificial Sequence; identical to SEQ ID NO: 128698
  derived and/or modified CDS sequence (opt3) from hemagglutinin__InfluenzaA__ABD15680

SEQ ID NO: 128754 - RNA, 1701 nt, Artificial Sequence
  derived and/or modified CDS sequence (opt3) from hemagglutinin__InfluenzaA__ABD15691
augaagaccaucauugcccugagcuacauacucugccuuguguucgcucagaaacugcccgucaacgacaaguccacagcaacuuuguguuuaggccaccaugccguuccuaaugggacgcuggugaaaaccaucacaaacgaucacauugagguaacuaaugcgaccgaauuggugcaaucuucaccaacaggaagaaucugcgacaguccgcaucagauucucgauggugagaacuguacccugaucgacgcccuucugggcgauccccacugcgacggguuucagaauaaggaaugggauuuguucgucgagaggagcacugcuuauuccaacuguuacccuuaugacgugccagauuacgcaucucuccggucgcugguugccucaagcggaacacuggaauuuaauaacgagaguuucaauuggaccggcguggcucagaacgguacguccucugcaugcaaacgccgaagcauaaaguccuuuuucucacgucucaauugguuacaucaacugaaguauaaauaccccgcccuuaacgucacuaugccuaauaacgagaaguuugacaaauuguauaucuggggagugcaccacccaaguaccgauagcgaccagauuucucuguacgcucaggccuccgggagaguaacaguuucaacuaagaggagccagcaaaccgugauccccaauauuggcagucggccuuggguccgcggcgugucuuccagaaucagcauauacuggacaauugugaaaccaggggauauccuacucauuaacucgaccggaaaccugaucgcgccgagggguuauuucaagauccggucuggcaaguccucaauuaugcgcaguaaugcacccauagggaaauguaacagcgaaugcaucacgccuaauggauccauuccaaacgacaagcccuuucagaaugucaaccgaaucacuuacggcgccuguccuagauauguuaaacagaauacacuuaagcuggcuaccgguaugaggaacgugccagagaaacagacucgggggauauucggagccauugcaggcuuuaucgaaaauggcugggaggggaugguagacggaugguacgguuuccgucaucaaaacucugagggcacagggcaggcugccgaucuaaagagcacccaggcggccaucaaucaaauuaacggaaaacucaaucgccugaucgaaaagacgaacgagaaguuucaccagauugaaaaagaguucucagaaguggagggcagaauacaggacuuagagaaguaugucgaagauaccaaaaucgaccuguggaguuacaaugcagagcuccuuguggcucuggaaaaccagcauacaauugauuugacugacuccgagaugaacaagcuauucgaaaggacccggaaacaacugcgagagaaugccgaggauauggguaacgggugcuuuaagaucuaucacaagugugacaaugcuugcaucggcagcauucgcaacggaacauacgaucacgacguuuacagagaugaagcccucaauaacagguuccagauaaaaggcguggagcugaagucuggguauaaagacuggauccuuuggauuucauuugcaaucaguugcuuccuguugugugucgugcuccugggauuuauuaugugggccugccagaaggguaauauccgguguaacauaugcaucuga

SEQ ID NO: 128755 - RNA, 1701 nt, Artificial Sequence
  derived and/or modified CDS sequence (opt3) from hemagglutinin__InfluenzaA__ABD15702
augaagaccaucauugcccugagcuacauacucugccuuguguucgcucagaaacugcccggcaacgacaauuccacagcaacuuuguguuuagggcaccaugccgucccuaacggaacgcugguuaagaccaucacaaaugaucaaauugaggugacuaacgcgaccgaacuuguacagucuucaaguacagguggcaucugcgacagcccacaccagauucucgauggggagaauuguacccugaucgacgcucuacugggagauccgcauugcgacggcuuucagaacaaagaaugggauuuguucguggagagauccaaggccuauucuaauuguuaccccuaugacgucccugauuacgcaucgcucaggucacugguggccagcagugguacucuggaauuuaacaaugaguccuucaacuggacagggguugcucaaaauggaaccucuagcgcaugcaaacggcgcuccaacaagucauuuuucagucgacucaauugguuacaccagcugaaguauaaauacccagcccuuaacgugacgaugcccaauaacgagaaguuugacaaauuguauauauggggcguccaucacccuagcacugauucugaccagaccucccuguacgcucaggccccaggccgugugacaguaucaacuaagagaagccaacagaccguuauccccaacauugggaguaggccuugggugcggggagucucuucccgcaucagcauuuacuggacaaucgugaaaccaggugauauacuacucauuaauuguaccggcaaccugaucgcgccgagaggguauuucaagauuaggucgggaaagucuuccaucaugcggucagacgcaaguaucggcaaaugcaauagcgaauguauuacgcccaacgguuccauaccuaaugacaagccauuucagaacgugaaucgcaucacuuacggggccugcccccgauaugucaaacagaacacacuuaagcuggcuaccggaaugagaaauguuccugagaaacaaacuaggggcauuuucggcgccaucgcaggguuuauagaaaacggaugggaggguaugguggauggcugguacggguuccggcaccagaauagcgagggaacaggccaggcugccgacuugaagucuacccaagcggccauuaaccagaucaaugguaaacucaaccgucugaucgaaaagacgaaugagaaguuucaucagauugaaaaagaguucucagaaguagaggggcgcauccaggauuuagagaaguauguggaagacaccaaaauugaucuguggaguuacaacgcagagcuccuugucgcucuggaaaaccaacacacaauagacuugacugauuccgagaugaauaagcuauucgaaagaaccaaaaagcagcugagggagaacgccgaggacaugggcaauggauguuuuaagaucuaucauaaaugcgauaacgcuugcauuggcagcauccggaaugggacauacgaccacgauguguaccgagacgaagcccucaacaaucgcuuccagaucaagggaguugagcugaaaucugguuauaaggacuggauucuuuggauaucauuugcaaucaguuguuuccuguugugcgugguccuccugggcuuuauuaugugggccugucagaaagggaacaucagaugcaauauuuguaucuga

SEQ ID NO: 128756 - RNA, 1701 nt, Artificial Sequence
  derived and/or modified CDS sequence (opt3) from hemagglutinin__InfluenzaA__ABD15724
augaagaccaucauugcccugagcuacauacucugccuuguguucgcucagaaacugcccggcaacgacaauuccacagcaacuuuguguuuagggcaccaugccgucccuaacggaacgcugguuaagaccaucacaaaugaucaaauugaggugacuaacgcgaccgaacuuguacagucuucaaguacagguggcaucugcgacagcccacaccagauucucgauggggagaauuguacccugaucgacgcucuacugggagauccgcauugcgacggcuuucagaacaaagaaugggauuuguucguggagagauccaaggccuauucuaauuguuaccccuaugacgucccugauuacgcaucgcucaggucacugguggccagcagugguacucuggaauuuaacaaugaguccuucaacuggacagggguugcucaaaauggaaccucuagcgcaugcaaacggcgcuccaacaagucauuuuucagucgacucaauugguuacaccagcugaaguauaaauacccagcccuuaacguggcuaugcccaauaacgagaaguuugacaaauuguauauauggggcguccaucacccuagcacggauucugaccagaucucccuguacgcccaggcgccaggccgugugacuguaucaaccaagagaagccaacagacaguuauucccaacaucgggaguaggccuugggugcggggagucucuucccgcauuagcaucuacuggacuauagugaaaccaggugauauucuacucaucaauuguaccggcaaccugauugcaccgagaggguauuucaagaucaggucgggaaagucuuccaucaugcggucagacgccaguauuggcaaaugcaauagcgaauguauaacacccaacgguuccaucccuaaugacaagccauuucagaacgugaaucgcauuaccuacggggcuugcccccgauaugucaaacagaacacgcuuaagcuggccacuggaaugagaaauguuccugagaaacaaacaaggggcaucuucggcgcaauagcuggguuuauugaaaacggaugggaggguaugguggauggcugguacggguuccggcaccaaaauucugagggaaccggccaggccgcggacuugaaaagcacucaggccgcaaucaaccagaucaaugguaaacucaaccgucugauugaaaagacaaaugagaaguuucaucagaucgaaaaagaguucucagaaguagaggggcgcauucaggauuuagagaaguauguggaagacaccaaaauagaucuguggaguuacaacgcugagcuccuugucgcccuggaaaaccaacacacgaucgacuugaccgauuccgagaugaauaagcuauucgaaagaacaaagaagcagcugagggagaacgcugaggacaugggcaauggauguuuuaagauuuaucauaaaugcgauaacgccugcaucggcagcauccggaaugggacuuacgaccacgauguguaccgagacgaagcacucaacaaucgcuuccagauuaagggaguugagcugaaaucugguuauaaggacuggauacuuuggaucucauuugccauuaguuguuuccuguugugcgugguccuccugggcuuuaucaugugggcuugucagaaagggaacauuagaugcaauaucuguauauga

SEQ ID NO: 128757 - RNA, 1701 nt, Artificial Sequence
  derived and/or modified CDS sequence (opt3) from hemagglutinin__InfluenzaA__ABD15746
augaagaccaucauugcccugagcuacauacucugccuuguguucgcucagaaacugcccgucaacgacaauuccacagcaacuuuguguuuaggccaccaugccguuccuaacgggacgcuggugaagaccaucacaaaugaucacauugagguaacuaacgcgaccgaacuugugcaaucuucaaguacaggaagaaucugcgacagcccacaucagauucucgauggugagaauuguacccugaucgacgcucuacugggcgauccgcacugcgacggguuucagaacaaagaaugggauuuguucgucgagagguccacugccuauucuaauuguuaccccuaugacgugccugauuacgcaucgcuccggucacugguugccagcaguggaacacuggaauuuaacaaugaguccuucaacuggaccggcguggcucagaaugguacgucuagcgcaugcaagcgccgauccauaaaaucauuuuucagucgucucaacugguuacaucaacugaaguauaaguacccagcccuuaaugucacuaugcccaacaaugagaaauuugacaaguuguauaucuggggagugcaccacccuagcaccgauucugaccagauuucccuguacgcucaggccucagggagaguaacaguuagcacuaaaaggagucagcaaaccgugaucccaaacauuggcucucggcccuggguccgcggcaucuccagcagaauaucgauuuacuggacaaucgugaagccuggggauauucuacucaucaacucuaccggaaaucugaucgcgccaagggguuauuucaaaauucgguccggcaagucaaguauaaugcgcagcaacgcaccgaucgggaaguguaauuccgaaugcauuacgcccaacggaucuaucccuaaugacaaaccauuucagaacgugaaucgaauaacuuacggcgccugucccagauaugucaagcagaacacacuuaaacuggcuaccgguaugaggaauguuccugagaagcagacucgggggauuuucggagccaucgcaggcuuuaucgaaaacggcugggaggggaugguggacggaugguacgguuuccgucaucaaaauagcgagggcacagggcaggcugccgauuugaaaucaacccaggcggccauuaaccaaaucaauggaaagcucaaccgccugauugagaaaacgaaugaaaaguuucaccagauagaaaaggaguucagugaaguagagggcagaauccaggacuuagagaaauauguggaagauaccaagauugaccugugguccuacaacgcagagcuccuugucgcucuggaaaaccagcauacaaucgauuugacugacagcgagaugaauaaacuauucgaaaggacccggaagcaacugcgagagaacgccgaggaaauggguaaugggugcuuuaaaaucuaucacaagugugauaacgcuugcauuggcucuauacgcaauggaacauacgaccacgauguguacagagacgaggcccucaacaauagguuccagaucaagggcguugaacugaaaucaggguauaaggauuggauucuuuggaucaguuuugcaauuagcugcuuccuguugugugugguccuccugggauuuaucaugugggccugccagaaagguaacauacgguguaauaucugcauuuga

SEQ ID NO: 128758 - RNA, 1701 nt, Artificial Sequence
  derived and/or modified CDS sequence (opt3) from hemagglutinin__InfluenzaA__ABD15757
augaagaccaucauugcccugagcuacauacucugccuuguguucgcucagaaacugcccgucaacgacaauuccacagcaacuuuguguuuaggccaccaugccguuccuaacgggacgcuggugaagaccaucacaaaugaucacauugagguaacuaacgcgaccgaacuugugcaaucuucaaguacaggaagaaucugcgacagcccacaucagauucucgauggugagaauuguacccugaucgacgcucuacugggcgauccgcacugcgacggguuucagaacaaagaaugggauuuguucgucgagagguccacugccuauucuaauuguuaccccuaugacgugccugauuacgcaucgcuccggucacugguugccagcaguggaacacuggaauuuaacaaugaguccuucaacuggaccggcguggcucagaaugguacgucuagcgcaugcaagcgccgauccauaaaaucauuuuucagucgucucaacugguuacaucaacugaaguauaaguacccagcccuuaaugucacuaugcccaacaaugagaaauuugacaaguuguauaucuggggagugcaccacccuagcaccgauucugaccagauuucccuguacgcucaggccucagggagaguaacaguuagcacuaaaaggagucagcaaaccgugaucccaaacauuggcucucggcccuggguccgcggcguguccagcagaaucucgauauacuggacaauugugaagccuggggauauccuacucauuaacucuaccggaaaucugaucgcgccaagggguuauuucaaaauccgguccggcaagucaaguauuaugcgcagcaacgcaccgauagggaaguguaauuccgaaugcaucacgcccaacggaucuauuccuaaugacaaaccauuucagaacgucaaucgaaucacuuacggcgccugucccagauauguuaagcagaacacacuuaaacuggcuaccgguaugaggaaugugccugagaagcagacucgggggauauucggagccauugcaggcuuuaucgaaaacggcugggaggggaugguagacggaugguacgguuuccgucaucaaaauagcgagggcacagggcaggcugccgauuugaaaucaacccaggcggccaucaaccaaauuaauggaaagcucaaccgccugaucgagaaaacgaaugaaaaguuucaccagauugaaaaggaguucagugaaguggagggcagaauacaggacuuagagaaauaugucgaagauaccaagaucgaccugugguccuacaacgcagagcuccuuguggcucuggaaaaccagcauacaauugauuugacugacagcgagaugaauaaacuauucgaaaggacccggaagcaacugcgagagaacgccgaggaaauggguaaugggugcuuuaaaaucuaucacaagugugauaacgcuugcaucggcucuauucgcaauggaacauacgaccacgauguuuacagagacgaggcccucaacaauagguuccagauaaagggcguggaacugaaaucaggguauaaggauuggauccuuuggauuaguuuugcaaucagcugcuuccuguugugugucgugcuccugggauuuauuaugugggccugccagaaagguaacauccgguguaauauaugcaucuga

SEQ ID NO: 128759 - RNA, 1701 nt, Artificial Sequence; identical to SEQ ID NO: 128698
  derived and/or modified CDS sequence (opt3) from hemagglutinin__InfluenzaA__ABD15779

SEQ ID NO: 128760 - RNA, 1701 nt, Artificial Sequence; identical to SEQ ID NO: 128698
  derived and/or modified CDS sequence (opt3) from hemagglutinin__InfluenzaA__ABD15790

SEQ ID NO: 128761 - RNA, 1701 nt, Artificial Sequence; identical to SEQ ID NO: 128698
  derived and/or modified CDS sequence (opt3) from hemagglutinin__InfluenzaA__ABD16292

SEQ ID NO: 128762 - RNA, 1701 nt, Artificial Sequence; identical to SEQ ID NO: 128681
  derived and/or modified CDS sequence (opt3) from hemagglutinin__InfluenzaA__ABD16303

SEQ ID NO: 128763 - RNA, 1701 nt, Artificial Sequence; identical to SEQ ID NO: 128681
  derived and/or modified CDS sequence (opt3) from hemagglutinin__InfluenzaA__ABD16325

SEQ ID NO: 128764 - RNA, 1701 nt, Artificial Sequence
  derived and/or modified CDS sequence (opt3) from hemagglutinin__InfluenzaA__ABD16336
augaagaccaucauugcccugagcuacacacucugccuuguguucgcucagaaacugcccggcaacgacaauuccacugcaacguuguguuuagggcaccaugccgucccuaacggaaccauaguuaagacaaucacuaaugaucaaauugaggugaccaacgcgacagaacugguacagucuucaaguaccgguggcaucugcgacagcccacaccagauucuagauggggagaauuguacucucaucgacgcucugcuuggagauccgcagugcgacggcuuucaaaacaaaaagugggaucuguucguggaaagauccaaagccuauucuaauuguuaccccuaugacgucccugauuacgcaucguugaggucacucauagccagcagugguacacuggaguuuaacaaugaauccuucaacuggaccggggugacgcagaauggaacuucuagcgcuugcaagcggcgcuccaacucaaguuucuucagccgacugaauuggcucacccauuuaaaguuuaaauauccagcacugaacguuacaaugcccaauaacgaggaguucgacaaacuuuacaucuggggcgugcaccauccuggcacuuauaacgaucagauuucuuuguacgcccaggcuuccgggcguaucaccgucucaacaaagagaagccaacagaccgugauuccaaauaucggaaguaggccccggguacgcgacauaccuucuagaauuuccaucuacuggacgauuguuaagccaggugauauccugcuaaucaacagcacuggcaaucucauugccccgaggggguauuuuaaaauacggucgggaaagucuuccaucaugcgcucagacgcgcccauuggcaaguguaacagugaaugcaucacaccuaaugguagcauaccaaacgacaaacccuuccagaaugugaaccgaauuaccuacggggcauguccuagauaugucaagcagaauacucugaaacuugccacaggaaugaggaacgugccagagaagcaaacccggggcaucuuuggcgcuaucgccggguucauugaaaauggaugggaggguaugguggauggcugguacggguuucgucaccagaacuccgagggaaucggccaggcagcugaccugaaaucuacgcaagccgcgauugaucagauaaaugguaaguugaaccgccucaucgggaaaaccaaugaaaaguuccaccagauugagaaggaauuuagcgaggucgaaggcagaauccaggaccuggagaaauauguugaggauacaaagaucgacuuauggucauacaacgccgaacugcucguggcacuugagaaccaacauacuauugaucugaccgacagugaaaugaauaaauuguuugagaggacaaagaaacagcuacgggaaaacgcugaggauaugggaaauggcugcuucaagauauaucacaagugugacaacgccugcaucggguccauucgaaauggaacuuacgaucaugacguauaccgcgacgaggcucugaacaauagauuucagaucaaagguguggaacucaagagcggcuauaaagauuggauucuguggaucucuuucgccauaucaugcuuucuucugugugucgcauugcucggguucaucaugugggccugccagaagggaaacauuagguguaauaucugcauuuga

SEQ ID NO: 128765 - RNA, 1701 nt, Artificial Sequence; identical to SEQ ID NO: 128681
  derived and/or modified CDS sequence (opt3) from hemagglutinin__InfluenzaA__ABD16347

SEQ ID NO: 128766 - RNA, 1701 nt, Artificial Sequence
  derived and/or modified CDS sequence (opt3) from hemagglutinin__InfluenzaA__ABD16358
augaagaccaucauugcccugagcuacauacucugccuuguguucgcucagaaacugcccggcaacgacaauuccacagcaacuuuguguuuagggcaccaugccgucccuaacggaacgaucguuaagaccauuacaaaugaucaaaucgaggugacuaacgcgaccgaacugguacagucuucaaguacagguggcauuugcgacagcccacaccagauccuagauggggagaauuguacccucauagacgcucugcuuggagauccgcagugcgacggcuuucaaaacaaaaagugggaucuguucguggaaagauccaaagccuauucuaauuguuaccccuaugacgucccugauuacgcaucguugaggucacucaucgccagcagugguacucuggaguuuaacaaugaauccuucaacuggacaggggugacccagaauggaacgucuagcgcuugcaagcggcgcuccaacucaaguuucuucagccgacugaauuggcucacucauuuaaaguuuaaauauccagcacugaacguuaccaugcccaauaacgaggaguucgacaaacuuuacauuuggggcgugcaccauccuggcacauauaacgaucagaucucuuuguacgcccaggcuuccgggcguauuacugucucaaccaagagaagccaacagacagugaucccaaauauaggaaguaggccccggguacgcgacauuccuucuagaaucuccauuuacuggaccaucguuaagccaggugauauccugcuaauuaacagcacgggcaaucucauagccccgaggggguauuuuaaaauccggucgggaaagucuuccauuaugcgcucagacgcgcccaucggcaaguguaacagugaaugcauaacuccuaaugguagcauuccaaacgacaaacccuuccagaaugugaaccgaaucacauacggggcauguccuagauaugucaagcagaauacccugaaacuugccacuggaaugaggaacgugccagagaagcaaacacggggcaucuuuggcgcuauugccggguucaucgaaaauggaugggaggguaugguggauggcugguacggguuucgucaccagaacuccgagggaauuggccaggcagcugaccugaaaucuacccaagccgcgauagaucagaucaaugguaaguugaaccgccucauugggaaaacgaaugaaaaguuccaccagaucgagaaggaauuuagcgaggucgaaggcagaauccaggaccuggagaaauauguugaggauaccaagauugacuuauggucauacaacgccgaacugcucguggcacuugagaaccaacauacaauagaucugacugacuuggaaaugaauaaacuauuugagaggaccaagaaacagcugcgggaaaacgcugaggauaugggaaauggcugcuucaagaucuaucacaagugugacaacgccugcauugggaguauccgaaauggaacauacgaucaugacguauaccgcgacgaggcucucaacaauagauuucagauuaaagguguggaacugaaguccggcuauaaagauuggauccuuuggaucagcuucgccauaucuugcuuucuguugugugucgcacuccugggguucauuaugugggccugccagaagggaaacaucagguguaauauuugcaucuga

SEQ ID NO: 128767 - RNA, 1701 nt, Artificial Sequence; identical to SEQ ID NO: 128681
  derived and/or modified CDS sequence (opt3) from hemagglutinin__InfluenzaA__ABD16472

SEQ ID NO: 128768 - RNA, 1701 nt, Artificial Sequence; identical to SEQ ID NO: 128681
  derived and/or modified CDS sequence (opt3) from hemagglutinin__InfluenzaA__ABD16483

SEQ ID NO: 128769 - RNA, 1701 nt, Artificial Sequence; identical to SEQ ID NO: 128678
  derived and/or modified CDS sequence (opt3) from hemagglutinin__InfluenzaA__ABD16494

SEQ ID NO: 128770 - RNA, 1701 nt, Artificial Sequence; identical to SEQ ID NO: 128681
  derived and/or modified CDS sequence (opt3) from hemagglutinin__InfluenzaA__ABD16505

SEQ ID NO: 128771 - RNA, 1701 nt, Artificial Sequence
  derived and/or modified CDS sequence (opt3) from hemagglutinin__InfluenzaA__ABD16516
augaagaccaucauugcccugagcuacauacucugcaugguguucgcucagaaacuucccggcaacgacaauuccacagcaacucuguguuuggggcaccaugccgucccuaacggaacgaucguuaagaccauuacaaaugaucaaaucgaggugacuaacgcgaccgaauuaguacagucuucaaguacagguggcauuugcgacagcccacaccagauccuggauggggagaauuguacccuaauagacgcucuccugggagauccgcagugcgacggcuuucaaaacaaaaagugggaucuuuucaucgaaagauccaaagccuauucuaauuguuaccccuaugacgugccugauuacgcaucgcugaggucauuggucgccagcagugguacucucgaguuuaacaaugaauccuucaacuggacaggggugacccagaauggaacgucuagcgcuugcaagcggcgcuccaacaauucauuuuucagucgacugaacuggcugacucaucucaaguuuaaauauccagcauuaaauguuaccaugcccaacaacgagaaguucgacaaacuguacauuuggggcgugcaccauccuggcacagauaaugaccagaucagccuuuaugcccaggcuucugggcguauuacugucuccaccaagagaucacaacagacagugaucccaaacauaggaagcaggccccggguacgcgauauuccuaguagaaucucuauuuacuggaccaucguuaaaccaggugacaucuugcugauuaauuccacgggcaaccuaauagccccgaggggguacuuuaagauccggagcggaaagucgucuauuaugcgcuccgacgcgcccaucgauaaauguaauucagagugcauaacuccuaacggcaguauuccaaaugacaagcccuuccagaacgugaaucgaaucacauauggugcauguccuagauacgucaaacagaacacccucaagcuggccacugggaugaggaaugugccagaaaaacaaacacggggaaucuuuggcgcuauugccggcuucaucgagaacgggugggaaggaaugguggaugguugguauggcuuucgucaccagaauagcgaggggauuggacaggcagcugaccuuaaguccacccaagccgcgauaaaccagaucaauggcaaacugaaccgcuugauugguaagacgaacgagaaguuccaccagaucgaaaaagaguucucugaagucgaggggagaauccaggaucucgaaaaguacguugaggacaccaaaguggaucuguggagcuauaaugccgaguuacugguagcacucgaaaaccaacauacaauugaccuuacugauucagagaugaauaagcuguuugaaaggaccaaaaagcaguugcgggagaacgcugaagacaugggcaauggaugcuucaagauauaccacaaaugugauaacgccugcaucggcaguauucgaaaugggacauaugaccaugacguguaccgcgaugaggcucuaaacaauagauuucagaucaagggagucgagcugaaauccgguuacaaggacuggauucucuggaucagcuucgccauaucuugcuuucugcuuuguguggcacuguugggcuucaucaugugggccugccagaaagggaacauuagguguaauaucugcauuuga

SEQ ID NO: 128772 - RNA, 1701 nt, Artificial Sequence
  derived and/or modified CDS sequence (opt3) from hemagglutinin__InfluenzaA__ABD16527
augaagaccaucauugcccugagcuacauacucugccuuguguucgcucagaaacugcccgagaacgacaauuccacagcaacuuuguguuuaggccaccaugccgucccuaacgggacgaucguuaagaccauuacaaaugaucaaaucgaagugacuaacgcgaccgagcugguacagucuucaaguacaggagguauuugcgacagcccacaccagauccuagauggcgaaaauuguacccucauagacgcucugcuuggggauccgcagugcgacggauuucaaaacaaaaagugggaucuguucguggagagauccaaagccuauucuaauuguuaccccuaugacgucccugaucaugcaucguugaggucacucguggccagcaguggcacucuggaauuuaacaaugaguccuucgacuggacagguguuacccagaacgggacgucuagcgcuugcaagcggcgcuccaauaagucauuuuucagucgacugaacuggcucacucacuuaaaauacaaguauccagcacugaaugugaccaugcccaacaaugagaaauuugauaaacuuuacaucuggggaguccaucacccuggcacagacagcgaucagauuucuuuguaugcccaggcuuccggccguaucacugugucaaccaagagaagccaacagacaguaauuccaaacaucgggaguaggccccggguucgcgacgugucuuccagaauaagcauuuacuggaccaucgucaagccuggagacauucugcuaaucaacucgacggguaaucucaucgccccaaggggcuacuucaagauucggucugggaaauccucaauaaugcgcagugaugcgccgaucggaaaguguaacagcgaaugcauuacucccaauggcuccaucccuaacgacaaaccauuucagaaugugaaccgaauaacauauggugcaugucccagauacgugaagcagaauacccugaaacuugccacugggaugaggaacgucccugagaagcaaacacggggaauuuucggcgcuaucgccggcuuuaucgaaaaugggugggagggaaugguugaugguugguauggcuuccgucaccagaacucugaggggaccggacaggcagcugaccugaaaagcacgcaagccgcgauuaaucagaucaacggcaaguugaaucgccucauugguaagaccaacgaaaaauuucaucagauagagaaggaguucucagaaguggaagggagaauccaggaucuggagaaauacguagaggacacaaagauugauuuauggaguuauaaugccgaacugcucguggcacuugagaaccaacacacuaucgaccugaccgauuccgaaaugaacaaauuguucgagaggacaaagaagcagcuacgggaaaaugcugaggacaugggcaacggaugcuuuaaaaucuaccauaagugugauaaugccugcauuggcagcauacgaaacgggacuuaugaccacgacgucuaccgcgaugaggcucugaauaacagauuccagaucaaaggaguggaacucaagucugguuacaaagacuggauucuguggaucucauuugccauuaguugcuuccuucuguguguugcauugcucggcuuuaucaugugggccugccagaaggggaauauaaggugugauaucugcauuuga

SEQ ID NO: 128773 - RNA, 1701 nt, Artificial Sequence; identical to SEQ ID NO: 128564
  derived and/or modified CDS sequence (opt3) from hemagglutinin__InfluenzaA__ABD16538

SEQ ID NO: 128774 - RNA, 1701 nt, Artificial Sequence
  derived and/or modified CDS sequence (opt3) from hemagglutinin__InfluenzaA__ABD16549
augaagaccaucauugcccugagcuacauacucugccuuguguucgcucagaaacugcccggcaacgacaauuccacagcaacuuuguguuuagggcaccaugccgucccuaacggaacgaucguuaagaccauuacaaaugaucaaaucgaggugacuaacgcgaccgaacugguacagucuucaaguacagguggcauuugcgacagcccacaccagauccuagauggggagaauuguacccucauagacgcucugcuuggagauccgcagugcgacggcuuucaaaacaaaaagugggaucuguucguggaaagauccaaagccuauucuaauuguuaccccuaugacgucccugauuacgcaucguugaggucacucaucgccagcagugguacucuggaguuuaacaaugaauccuucaacuggacaggggugacccagaauggaacgucuagcgcuugcaagcggcgcuccaacucaaguuucuucagccgacugaauuggcucacucauuuaaaguuuaaauauccagcacugaacguuaccaugcccaauaacgaggaguucgacaaacuuuacauuuggggcgugcaccauccuggcacauauaacgaucagaucucuuuguacgcccaggcuuccgggcguauuacugucucaaccaagagaagccaacagacagugaucccaaauauaggaaguaggccccggguacgcgacauuccuucuagaaucuccauuuacuggaccaucguuaagccaggugauauccugcuaauuaacagcacgggcaaucucauagccccgaggggguauuuuaaaauccggucgggaaagucuuccauuaugcgcucagacgcgcccaucggcaaguguaacagugaaugcauaacuccuaaugguagcauuccaaacgacaaacccuuccagaaugugaaccgaaucacauacggggcauguccuagauaugucaagcagaauacccugaaacuugccacuggaaugaggaacgugccagagaagcaaacacggggcaucuuuggcgcuauugccggguucaucgaaaauggaugggaggguaugguggauggcugguacggguuucgucaccagaacuccgagggaauuggccaggcagcugaccugaaaucuacccaagccgcgauagaucagaucaaugguaaguugaaccgccucauugggaaaacgaaugaaaaguuccaccagaucgagaaggaauuuagcgaggucgaaggcagaauccaggaccuggagaaauauguugaggauaccaagauugacuuauggucauacaacgccgaacugcucguggcacuugagaaccaacauacaauagaucugacugacagugaaaugaauaaauuguuugagaggaccaagaaacagcuacgggaaaacgcugaggauaugggaaauggcugcuucaagaucuaucacaagugugacaacgccugcauuggguccauccgaaauggaacauacgaucaugacguauaccgcgacgaggcucugaacaauagauuucagauuaaagguguggaacucaagagcggcuauaaagauuggauccuguggauaucuuucgccaucucaugcuuucuucugugugucgcauugcucggguucauugugugggccugccagaagggaaacaucagguguaauauuugcaucuga

SEQ ID NO: 128775 - RNA, 1701 nt, Artificial Sequence; identical to SEQ ID NO: 128678
  derived and/or modified CDS sequence (opt3) from hemagglutinin__InfluenzaA__ABD16560

SEQ ID NO: 128776 - RNA, 1701 nt, Artificial Sequence
  derived and/or modified CDS sequence (opt3) from hemagglutinin__InfluenzaA__ABD16571
augaagaccaucauugcccugagcuacauauucugccucguggucgcucagaaacuucccggcaacgacaauuccacagcaacucuguguuuggggcaccaugccguuccuaacggaacgaucgugaagaccauuacaaaugaucaaaucgagguaacuaacgcgaccgaauuagugcagucuucaaguacagguagaauuugcaauagcccacacaggauccuggacggcaaaaacuguacccuaauagaugcucuccugggggacccgcauugcgauuccuuucagaauaaggagugggaccuuuucgucgaacggucuaaagccuauucgaacuguuaccccuaugaugugccugacuacgcaucacugcgcagcuugguugccaguuccggaacucucgaguuuaucaaugaagauuucaacuggacaggcguggcucagucuggugggagcuaugcaugcaagcgaggauccgucaauucauuuuucagucgucugaacuggcugcacgagagcgaguacaaguauccagcccucaaugugaccaugcccaacaauggcaaauuugacaaguuauacauuuggggcguacaucacccuucuacggauagagaacaaacuaaccuguacguuagggcuuccgggcgggugaccgucucaacaaaacgcagccagcagacugugaucccaaacauuggaaguagacccugggugaggggucuuucuucccggaucagcauauauuggaccauugucaagccuggcgacaucuugcugauuaauucgacagggaaccuaaucgccccacgcggauacuucaaaauccgaaccggcaagucuuccauuaugagaucagaugcgccgauagguacguguaguagcgagugcaucacucccaauggguccauuccuaacgacaagccauuucagaauguuaacaggaucacauauggagcauguccccgguacgugaaacaaaauacccucaagcuggccacuggcaugcguaacguaccugaaaaacagacacgcggcauauucggggcuauugccggauuuaucgagaaugguugggagggcaugguggacgggugguauggauucagacaccagaacucugaaggcaccggucaggcagcugaucuuaagagcacgcaagccgcgaucgaccagauuaaugggaaacugaacagguugaucgagaagaccaaugaaaaauuucaucagauugagaaggaguucucagaagucgagggccggauacaagaucucgaaaaguacguggaggacacaaaaaucgaucuguggaguuauaacgccgaauuacugguugcacucgagaaucagcacacuauugaccuuaccgauuccgaaaugaacaagcuguucgagaaaacacgaaagcaguugcgcgagaacgcugaagacaugggaaauggcugcuuuaaaaucuaccauaagugugauaacgccugcaucgggagcauuagaaauggaacuuacgaccacgauguguauagggacgaggcucuaaacaaucgguuccagauaaagggugucgaacugaaaucuggcuacaaggacuggauccucuggauuucauuugccaucaguugcuuccugcuuugugugguacuguugggguuuauuaugugggcaugccaaaaaggaaacauccgcuguaauauaugcaucuga

SEQ ID NO: 128777 - RNA, 1701 nt, Artificial Sequence
  derived and/or modified CDS sequence (opt3) from hemagglutinin__InfluenzaA__ABD16718
augaagaccaucauugcccugagcuacauauucugccucguguuugcucagaaacuucccggcaacgacaauuccacagcaacucuguguuuggggcaccaugccgucccuaacggaacguuaguuaagaccaucacaaaugaucaaauugaggugacuaacgcgaccgaacugguacagucuucaaguacagguagaaucugcgacagcccacacaggauucuagauggcaaaaauuguacccucaucgacgcucugcuuggggauccgcauugcgacggauuccagaacgagaagugggaucuguuuauagaacgguccaaagccuucucuaauuguuaucccuacgacgugccugauuaugcaucguugcgcucacucgucgccagcaguggcacucuggaguuuaucaacgaagguuucaauuggacaggggugacccaguccggaggcucuuacgcuugcaagcgaggcagcguuaacuccuuuuucucacgucugaauuggcucuaugagagugaguacaaguauccagcauuaaacgugacgaugcccaauaacgggaaauuugacaagcuguacauuuggggaguccaccauccuaucacugaaaaagagcaaaccaaucuuuacgugagagccagcgguaggguaacaguuucuacuaagcggucccagcagaccgugauuccaaacaucggcucacgccccugggucagaggguugagcaguaggauaucuauuuauuggacaaucgugaaaccuggagauauucugcuaaucaacuccaccggcaaucucaucgcuccacgggguuacuucaagauucgcacgggaaagagcucgauaaugcgaucugacgccccgaucgggacuuguuccucagaaugcauuacacccaacggcaguaucccuaaugauaaaccauuucagaacgugaauaagauaaccuauggcgcgugucccagauacgucaaacaaaacacucugaaacuugcaacagggaugaggaauguuccugagaagcagacccggggaauuuucggugccaucgcuggcuuuaucgagaacgggugggaaggaaugguggacggcugguaugguuuccgucaccagaauagcgaggggacgggccaggccgcagaccugaaguccacccaagcugccauugaucagaucaacggaaaauugaaucgccucauugaaaagacaaacgagaaguuccaccagauagaaaaagaguuuucugagguagaaggcagaauccaagaccuggagaaguacguggaagauacuaaaauugacuuauggagcuauaaugcggagcugcucgucgcccuugaaaaccagcauaccaucgaucugacagacucagagaugaauaaguuguucgagaaaacuaggaagcagcuacgggaaaacgcagaggauauggggaacggaugcuuuaagaucuaccacaaaugugacaaugcuugcauugguaguauacgaaacggcaccuacgaucaugacguguaucgcgaugaagcccugaauaacagauuccagaucaaggggguugagcucaaauccggauacaaggacuggauucuguggaucagcuuugcuauuucuugcuuccuucuguguguggucuugcucggcuuuaucaugugggccugccaaaaagguaauauaagguguaacaucugcauuuga

SEQ ID NO: 128778 - RNA, 1701 nt, Artificial Sequence
  derived and/or modified CDS sequence (opt3) from hemagglutinin__InfluenzaA__ABD16729
augaagaccaucauugcccugagcuacauauucugccucguguuugcucagaaacuucccggcaacgacaauuccacagcaacucuguguuuggggcaccaugccgucccuaacggaacguuaguuaagaccaucacaaaugaucaaauugaggugacuaacgcgaccgaacugguacagucuucaaguacagguagaaucugcgacagcccacacaggauucuagauggcaaaaauuguacccucaucgacgcucugcuuggggauccgcauugcgacggauuccagaacgagaagugggaucuguuuguggaacgguccaaagccuucucuaauuguuaucccuacgacgucccugauuaugcaucguugcgcucacucguggccagcaguggcacucuggaguuuauaaacgaagguuucaauuggacagggguuacccagaacggaggcuccuacacgugcaagcgaggcucugugaauagcuuuuucucccgucugaacuggcucuaugagucagagaguaaguacccagucuuaaaugugacuaugcccaacaaugggaaauuugacaagcuguauaucuggggaguacaccauccuagcaccgauaaagaacaaacaaaccuuuacguuagagcuucugguaaggugacugucuccaccaaaaggucacagcagacagugauuccaaacaucggcagccggcccugggugcgcggguugaguucuagaauuuccaucuacuggaccauagucaagccuggagacauucugcuaaucaauagcacgggcaaccucauugcaccaagggguuauuucaagauccggacugggaaaucgucuaucaugcgcuccgaugccccgauuggaacauguucaagugagugcauaacccccaauggcagcaucccuaacgacaagccauuucagaauguuaacaaaauuacuuacggcgcuuguccccgauaugugaagcaaaauacacugaaacuugccaccgggaugagaaacguaccugaaaagcagacgaggggaaucuucggugcgauagcaggcuuuauugagaaugggugggagggaaugguggacggcugguacgguuuccggcaccagaacuccgaagggaccggccaggccgcugaucugaaaucuacacaagccgcaaucgaccagaucaauggaaaguugaaccgucucauugagaagacuaaugaaaaauuccaccagaucgagaaggaauuuagcgaggucgagggccgcauucaagaucuggaaaaauauguggaggacaccaagauagauuuauggucauacaacgcugaacugcucguugcccuugagaaucagcauacaaucgaccugacugauagugaaaugaacaaauuguucgagaagaccagaaagcagcuaagggagaacgcggaagacauggggaauggaugcuuuaaaauuuaucacaagugugauaacgccugcaucgguuccauccggaauggcacauacgaccaugauguguaccgagacgaggcacugaacaaucgcuuccagauuaaaggggucgaacucaagagcggauauaaagacuggauacuguggaucucuuuugcuauuucaugcuuccuucugugugugguauugcucggcuuuaucaugugggccugccaaaaggguaacauuagauguaauaucugcauauga

SEQ ID NO: 128779 - RNA, 1701 nt, Artificial Sequence
  derived and/or modified CDS sequence (opt3) from hemagglutinin__InfluenzaA__ABD16751
augaagaccaucauugcccugagcuacauauucugccucguguuugcucaggaccuucccggcaacgauaauuccacagcaacucuguguuuggggcaccaugccgucccuaacggaacguuaguuaaaaccaucacaaaugaccaaauugaggugacuaacgcgaccgaacugguacacucuucaaguacagguaagaucugcgauaauccacauagaauacuagacggcaucaacuguacccucauagaugcucugcuuggggacccgcacugcgauggauuccagaaugagaaaugggaccuguuuguggaaaggagcaaggccuucuccaacuguuaucccuacgaugucccugacuaugcaucuuugcggucgcucguggccucaagcggcacucuggaguuuaucaaugaagguuucaacuggacagggguuacccagaauggaggcaguuccgcuugcaaacgcggcccagauaacggguuuuucucucgacugaauuggcucuacaagagcggauccacguaucccgugcagaacgucacuaugccuaauaacgacaacucagauaaguuauacauuuggggugugcaucacccaaguaccgacaaagagcaaacagaccuguauguacaggcaagcggcaagguuacugugucuaccaaacguucccagcagacagucauccccaauguggggucaagaccuugggugaggggacuuagcagucgggucucuauuuacuggaccaucguuaagccaggcgauauauuggugauuaacuccaaugguaaccugaucgccccgcgcggguacuuuaaaaugagaacgggaaagagcucgauuaugaggucugacgcucccaucggcacuuguuccucagagugcaucacaccuaauggcaguauuccaaacgauaagcccuuccaaaauguaaacaaaauaaccuauggggccuguccuaaguacgugaaacagaauacucuaaagcucgcgacaggaaugcggaacgucccagaaaaacagacccgcgguaucuuuggcgcaauugccggguucaucgagaauggaugggaaggcaugauagacgguugguauggguuucgacaccagaacagcgagggcacgggacaagcugccgaucugaaguccacccaggcagcuauugaccagaucaauggcaaacuuaacagagugaucgagaagacaaaugaaaaguuccaucaaauugagaaagaguucucugaaguugaagggaggauccaggaucuggagaaguacguggaggacacuaaaauugauuuguggagcuauaacgccgaacuccuggucgcguuagagaaccagcacaccauagaccugacagauucagaaaugaauaagcucuuugagaaaacucggcgucagcuucgcgaaaacgccgaggacaugggaaaugguugcuucaagaucuaccauaagugugacaacgcaugcauuggcaguaucagaaaugggaccuaugaucacgacguguacagggaugaggcucugaacaaucgguuucaaaucaaaggaguagaauugaaguccggcuacaaagacuggauucuauggauuagcuucgccaucucuugcuuucugcucuguguugugcugcuugguuucauuaugugggcuugccagaaggggaacauccgauguaauauuugcaucuga

SEQ ID NO: 128780 - RNA, 1701 nt, Artificial Sequence; identical to SEQ ID NO: 128641
  derived and/or modified CDS sequence (opt3) from hemagglutinin__InfluenzaA__ABD16762

SEQ ID NO: 128781 - RNA, 1701 nt, Artificial Sequence; identical to SEQ ID NO: 128353
  derived and/or modified CDS sequence (opt3) from hemagglutinin__InfluenzaA__ABD17323

SEQ ID NO: 128782 - RNA, 1701 nt, Artificial Sequence; identical to SEQ ID NO: 128610
  derived and/or modified CDS sequence (opt3) from hemagglutinin__InfluenzaA__ABD38134

SEQ ID NO: 128783 - RNA, 1698 nt, Artificial Sequence; identical to SEQ ID NO: 128349
  derived and/or modified CDS sequence (opt3) from hemagglutinin__InfluenzaA__ABD60779

SEQ ID NO: 128784 - RNA, 1701 nt, Artificial Sequence
  derived and/or modified CDS sequence (opt3) from hemagglutinin__InfluenzaA__ABD60790
augaagaccaucauugcccugagcuacauauucugccucgugcuuggccaggacuuucccgggaacgauaauuccacagcuacucuguguuugggacaccaugcagucccuaacgguacguuaguuaaaaccaucacaaaugaccaaauugaggugacuaacgccaccgaacugguacagucuucaaguacaggcaagaucugcaauaacccacacaggauucuagaugggaucgacuguacccucauagaugcgcugcuuggagacccgcauugcgauggcuuccagaaugagacuugggaccuguuuguggaaagaagcaaggcuuucuccaacuguuaucccuacgaugucccugacuaugccucuuugcggucgcucguggcaucaagcgguacacuggaguuuaucaaugaaggguucaccuggacgggaguuacucagaacggcggcaguaaugccugcaaacgcgggccagauuccggauuuuucucucgacugaacuggcucuacaaaagcgguuccaccuaucccguguuaaaugucacaaugccuaacaaugacaacuuugauaagcuguacauuuggggcgugcaccauccaucaacugaccaagagcagaccagucuuuauguacaggcuagcgggcguguuacagugucuaccaagagaucccagcaaacgaucauucccaacaucggaucaaggccuuggguccggggcuugagcagucgcauaucuauuuacuggacuaucgugaaaccaggugacauucugaucaucaauuccaacgggaaucuaauugcaccgagaggauacuucaagaugaggacaggcaaaagcucgauaaugcggucugaugcccccaucggcaccuguauuuccgagugcaucacuccuaacgggucaauaccaaaugacaagcccuuucagaacgugaauaaaauuacauauggagcuuguccuaaguacgucaagcagaacacccucaaacuggccacggguaugcgcaauguuccagaaaagcagacccgaggcaucuucggggcgaucgcaggauuuauugagaacggcugggaagguaugaucgaugggugguauggcuucagacaccaaaauagugagggaacaggccaggccgcugaccuuaaaagcacucaggccgcaauugaucaaauaaacgggaagcugaauaggaucauugagaaaaccaacgaaaaguuccaccagaucgagaaagaauuuuccgagguggaaggacggauccaggacuuggagaaguacguagaggauacaaagauugaccucuggucuuauaaugcugaacuguuaguggcccuggagaaccagcauacuauagaucucaccgacagcgaaaugaacaaacuuuucgagaagacacgucgccaacugagagaaaaugcggaggauauggguaacggcugcuuuaaaaucuaccacaagugugacaaugccugcauugggucaaucaggaacggaaccuaugaccaugaugucuaccgggacgaggcauugaauaaccgauuccagauuaaaggcguggaacuaaagagugguuacaaggauuggauccuguggauauccuuugcuaucagcugcuuccuccuguguguugugcuucugggguuuauuaugugggccugccagaaaggcaauauccgcuguaacauuugcaucuga

SEQ ID NO: 128785 - RNA, 1701 nt, Artificial Sequence
  derived and/or modified CDS sequence (opt3) from hemagglutinin__InfluenzaA__ABD60801
augaagaccaucauugcccugagcuacauacucugccuuguguucgcucagaaacugcccggcaacgacaauuccacagcaacuuuguguuuagggcaccaugccgucccuaacggaacgcugguuaagaccaucacaaaugaucaaauugaggugacuaacgcgaccgaacuuguacagucuucaaguacagguagacucugcgacagcccacacaggauccuggauggcaaaaauuguacccuuauugacgcucuguugggggauccgcauugcgacggauuucagaacaaggagugggaucucuucguggaacgguccaaagccuauucuaauuguuaccccuaugacgucccugauuacgcaucgcugcgcucacugguggccagcaguggcacucucgaguuuaucaacgaagacuucaauuggacagguguugcucaggaugggggauccuaugcaugccgacguggcucugugaacagcuuuuucuccagauuaaauuggcugcacaagcuagaguacaaguauccagccuugaacgucaccaugcccaauaacggcaaauuugacaagcuguacauauggggagugcaucacccuucaacggauagugaccaaacuagccuauacguaagggcuucugggcggguuaccguguccacaaaacgcucacagcagacugucaucccaaauauugguagcagacccugggugaggggccagaguucucggauguccaucuauuggaccauugugaagccuggggacauccuccugauaaacagcacaggaaaccuuauugccccacgcggcuacuucaaaauccgaaaugguaagucgucuauuaugagauccgaugcgccgaucgggaacuguucaagugagugcaucacccccaauggaagcauuccuaacgacaagccauuucaaaaugucaacaggauaacguauggcgcauguccccgguacguuaaacagcacacucugaaguuggccacaggcaugcguaaugugccugaaaaacagacccgcgggaucuucggagcuauugccgguuuuaucgagaacggcugggaagggaugguagauggaugguauggcuucagacaucaaaauuccgaggguacugggcaggcagcugaccucaagucuacacaggccgcgauagaucagauuaacggcaaacugaauagguuaaucgagaagaccaacgaaaaauuucaccaaaucgagaaggaguucagcgaaguggaaggacggauucaggaccuggagaaguacgucgaggauacgaaaaucgaccucuggucauauaaugccgaacuucugguggcauuggagaaccagcauaccauugaucuaacagacagugaaaugaauaagcuguucgagcgaacucgcaaacagcucagagaaaacgcugaggauaugggcaacgggugcuuuaagauauaccacaaaugugacaaugccugcaucggauccauuaggaacgguaccuacgaccacgauguuuaucgggacgaggcucugaauaaccgcuuccaaaucaagggcguggaacuuaagagcggguacaaagauuggauccuguggauuucuuuugccauaucaugcuucuugcucugugucgugcuguuaggauuuaucaugugggcaugccagaagggcaauauuagauguaacaucugcauuuga

SEQ ID NO: 128786 - RNA, 1701 nt, Artificial Sequence
  derived and/or modified CDS sequence (opt3) from hemagglutinin__InfluenzaA__ABD60812
augaagaccaucauugcccugagcuacauacucugccuuaucuucgcucagaaacugcccggcaacgacaauuccacagcaacuuuguguuuagggcaccaugccgugccuaacggaacgauugucaagaccaucacaaaugaucaaauugagguuacuaacgcgaccgaacuggugcagucuucaaguacagguggcaucugcgacagcccacaccagauacuagauggggagaauuguacccucaucgacgcucugcuuggagauccgcagugcgacggcuuucaaaacaaaaagugggaucuguucguagaaagauccaaagccuauucuaauuguuaccccuaugacgugccugauuacgcaucguugaggucacucgucgccagcagugguacucuggaguuuaacaaugaauccuucaacuggacaggggugacccagaauggaacgucuagcgcuugcaagcggcgcuccaacaauucauuuuucagucgacugaacuggcucacucauuuaaaguuuaaauauccagcacugaauguuaccaugcccaacaacgagaaguucgacaaacuuuacauuuggggcgugcaccauccuggcacagauaaugaccagaucuuuuuguaugcccaggcuagcgggcguauuacugucucuaccaagagaucccaacagacagugaucccaucaauaggaagcaggccccggguacgcaacauuccuaguagaaucucuauuuacuggaccaucguuaaaccaggugauauccugcuaauuaauuccacgggcaaccucauagccccgaggggguacuucaagauccggagcggaaagucgucuauuaugcgcuccgacgcgcccaucggcaaauguaauucagagugcauaacuccuaacgguaguauuccaaaugacaagcccuuucagaacgugaaucgaaucacauauggggcauguccuagauacgucaaacagaacacccugaaacuugccacuggaaugaggaaugugccagaaaagcaaacacggggcaucuucggcgcuauugccggguuuaucgagaacggaugggaagguaugguggauggcugguauggguuccgucaccagaauagcgagggaauuggccaggcagcugaccugaaguccacccaagccgcgauaaaccagaucaaugguaaauugaaccgccucauugggaagacgaacgagaaguuccaccagaucgaaaaagaguuuucugaagucgagggcagaauccaggaucuggaaaaguacguugaggacaccaaaauugauuuauggagcuauaaugccgagcugcucguggcacuugaaaaccaacauacaauagaccugacugauucagagaugaauaaguuguucgaaaggaccaaaaagcagcuacgggagaacgcugaagacaugggaaauggcugcuuuaagaucuaccacaaaugugauaacgccugcauugggaguauccgaaauggaacauaugaccaugauguauaccgcgacgaggcucugaacaauagauuccagauuaaggguguggagcucaaauccggcuacaaggacuggauccuguggaucagcuuugccauaucuugcuuccuucugugugucgcauugcucggguuuauuaugugggccugccagaaaggaaacaucagguguaauauuugcaucuga

SEQ ID NO: 128787 - RNA, 1701 nt, Artificial Sequence; identical to SEQ ID NO: 128681
  derived and/or modified CDS sequence (opt3) from hemagglutinin__InfluenzaA__ABD60823

SEQ ID NO: 128788 - RNA, 1701 nt, Artificial Sequence
  derived and/or modified CDS sequence (opt3) from hemagglutinin__InfluenzaA__ABD60845
augaagaccaucauugcccugagcuacauacucugccuuguguucgcucagaaacugcccgucaacgacaauuccacagcaacuuuguguuuaggccaccaugccguuccuaacgggacgcuggugaagaccaucacaaaugaucacauugagguaacuaacgcgaccgaacuugugcaaucuucaaguacaggaagaaucugcgacagcccacaucagauucucgauggugagaauuguacccugaucgacgcucuacugggcgauccgcacugcgacggguuucagaacaaagaaugggauuuguucgucgagagguccacugccuauucuaauuguuaccccuaugacgugccugauuacgcaucgcuccggucacugguugccagcaguggaacacuggaauuuaacaaugaguccuucaacuggaccggcguggaccagaaugguacgucuagcgcuugcaagcgccgauccacuaaaucauuuuucagucgucucaacugguuacaucaacugaaguauaaguacccagcacuuaaugucaccaugcccaacaaugagaaauuugauaaguuguauauauggggagugcaccacccuagcacagacucugaucagaucucccuguacgcccaggcuucagggagaguaacuguuagcaccaaaaggagucagcaaacagugaccccaaacauuggcucucggcccuggguccgcggcguguccagcagaaucucgauuuacuggacgaucgugaagccuggggacauacuacucauuaacucuacuggaaaucugaucgccccaagggguuauuucaaaauucgguccggcaagucaaguaucaugcgcagcaacgcgcuuaucgggaaguguaauuccgaaugcauuacaccgaacggaucuauacccaaugacaaaccuuuucagaacgucaaucgaaucaccuacggcgcauguccaagauauguuaagcagaacacucugaaauuggccacagguaugaggaaugugcccgagaagcagacccgggggauuuucggagcuaucgccggcuuuauagaaaacggcugggaggggaugguagauggaugguacgguuuccgucaucaaaauagcgagggcacggggcaggcagcugaccucaaaucaacccaggccgcgauuaaccaaaucaauggaaagcugaaccgcuuaaucgagaaaacaaaugaaaaguuucaccagauugaaaaggaguucagugaaguggagggcagaauccaggaucuggagaaauaugucgaagacacuaagauugaucucugguccuacaacgccgagcuucugguggcauuggaaaaccagcauaccauagaccuaacagauagcgagaugaauaaacuguucgaaaggacucggaagcaacuccgagagaacgcugaggacauggguaaugggugcuuuaaaaucuaucacaagugugauaacgccugcauuggcucuauccgcaauggaaccuacgaccacgauguuuacagagacgaagcucugaacaauagguuccagaucaagggcguggagcuuaaaucaggguauaaggacuggauucuguggauaaguuuugccaucagcugcuucuugcucugugucgugcuguuaggauuuauuaugugggcaugccagaaagguaacauccgguguaauauuugcaucuga

SEQ ID NO: 128789 - RNA, 1698 nt, Artificial Sequence
  derived and/or modified CDS sequence (opt3) from hemagglutinin__InfluenzaA__ABD60878
augaaggugaaacugcucguccuucugugcaccuucacagccacuuacgcugacacgaucuguauuggcuaucacgcaaacaauagcaccgauacaguugacacuguguuggagaagaacguaaccgugacacauuccgucaauuuacuggaagauucucacaacgggaaacuaugccuccugaagggaauagcgccccuucagcuggguaauuguucaguggccggcuggaucuuggggaacccugagugcgaacuccugauuaguaaagagagcugguccuacaucguugaaaccccaaauccggagaacggaacuuguuaucccggcuacuuugcugacuaugaggaacugagagagcaacucucuucggugagcucauucgaaagguuugagauuuucccuaaggagaguuccuggccaaaucauacagucaccggugugucugccagcugcucccacaacgggaagucaaguuuuuaccggaauuuacuguggcuuacgggaaagaacggcuuguaucccaaucugagcaagucuuacgcaaacaauaaagaaaaggagguucuaguacucuggggcgugcaucacccuccaaacaucggggaucagaaagcccuguaccacacugaaaacgcuuaugucuccguggugucaagccauuacagucgccgauucacccccgagauagcaaagcguccuaaggucagagaccaggaaggaaggaucaauuauuacuggacacuucuggagccaggugauacuauuaucuuugaggccaacggcaauuugauugcuccgcgguaugccuucgcgcucucucgcggguuuggauccggcaucauaaccagcaacgcacccauggacgaaugugaugccaaaugccagacaccucaaggugcuauuaauucgucucugccauuccagaacguucaccccgugaccaucggggaguguccuaaguacguaagauccgccaaauuaaggauggugacgggacugcggaauauuccaucaauccagagucgcggccucuuuggcgcaaucgcuggguucauugaaggagguuggacuggcauggucgacgggugguauggauaccaucaccagaacgagcaaggcagcgguuacgccgcggaucagaaguccacacagaaugccauaaacgggaucaccaauaaagugaacucuguuauugaaaagaugaauacucaguuuacagcagugggcaaagaguucaacaaacuugagcgaagaauggaaaaucugaacaagaaagucgacgauggauucuuggacaucuggaccuauaacgcugagcuacuggugcuccuggaaaaugagaggacgcuugacuuucacgauagcaacguaaagaaucuguacgaaaaaguuaagucacaauugaaaaacaaugccaaggagauaggcaacgggugcuucgaguuuuaucauaaguguaauaacgaaugcauggagagugugaaaaauggaaccuacgacuaucccaaguacuccgaagagagcaaacucaaccgggagaagauugauggugucaaacuggaaucuaugggcguguaucagaucuuagcuaucuacucaacagucgccaguagccuggugcuacucguuucccugggggcaauuucuuucuggaugugcucgaauggaagccuucagugucguaucugcauuuga

SEQ ID NO: 128790 - RNA, 1698 nt, Artificial Sequence
  derived and/or modified CDS sequence (opt3) from hemagglutinin__InfluenzaA__ABD60889
augaaggugaaacugcucguccuucugugcaccuucacagccacuuacgcugacacgaucuguauuggcuaucacgcaaacaauagcaccgauacaguugacacuguguuggagaagaacguaaccgugacacauuccgucaauuuacuggaagauucucacaacgggaaacuaugccuccugaagggaauagcgccccuucagcuggguaauuguucaguggccggcuggaucuuggggaacccugagugcgaacuccugauuaguaaagagagcugguccuacaucguugaaaccccaaauccggagaacggaacuuguuaucccggcuacuuugcugacuaugaggaacugagagagcaacucucuucggugagcucauucgaaagguuugagauuuucccuaaggagaguuccuggccaaaucauacagucaccggugugucugccagcugcucccacaacgggaagucaaguuuuuaccggaauuuacuguggcuuacgggcaaaaacggauuguaucccaaucugagcaagucuuacgcaaacaauaaagaaaaggagguucuaguacucuggggcgugcaucacccuccaaacaucggggaucagcgcgcccuguaccacacugaaaacgcuuaugucuccguggugucaagccauuacagucgacguuucacccccgagauagcaaaaagaccuaaggucagggaccaggaaggacggaucaauuauuacuggacacuucuggagccaggugauacuauuaucuuugaggccaacggcaauuugauugcuccgcgcuaugccuucgcgcucucuagaggguuuggauccggcaucauaaccagcaacgcacccauggacgaaugugaugccaagugccagacaccucaaggugcuauuaauucgucucugccauuccagaacguucaccccgugaccaucggggaguguccuaaauacguaagguccgccaaguuacggauggugacgggacugcgcaauauuccaucaauccagagucgaggccucuuuggcgcaaucgcuggguucauugaaggagguuggacuggcauggucgacgggugguauggauaccaucaccagaacgagcaaggcagcgguuacgccgcggaucagaaauccacacagaaugccauaaacgggaucaccaauaaggugaacucuguuauugaaaagaugaauacucaguuuacagcagugggcaaagaguucaacaaacuugagagaaggauggaaaaucugaacaagaaggucgacgauggauucuuggacaucuggaccuauaacgcugagcuacuggugcuccuggaaaaugagcggacgcuugacuuucacgauagcaacguuaaaaaucuguacgaaaagguaaaaucacaauugaagaacaaugccaaagagauaggcaacgggugcuucgaguuuuaucauaaguguaauaacgaaugcauggagagugugaagaauggaaccuacgacuaucccaaauacuccgaagagagcaagcucaaccgugagaaaauugauggugucaagcuggaaucuaugggcguguaucagaucuuagcuaucuacucaacagucgccaguagccuggugcuacucguuucccugggggcaauuucuuucuggaugugcucgaauggaagccuucagugucgcaucugcauuuga

SEQ ID NO: 128791 - RNA, 1698 nt, Artificial Sequence
  derived and/or modified CDS sequence (opt3) from hemagglutinin__InfluenzaA__ABD60900
augaaggugaaaagacugguccuccuuugcaccuucacagccacuuacgcugacacgaucuguauuggcuaucacgcaaacaauagcaccgauacaguugacacugugcuggagaagaacguaaccgugacacauuccgucaauuuguuagaagauucucacaacgggaaacugugccuacucaagggaauagcgccccugcagcuugguaauuguucaguggccggcuggauccuggggaacccugagugcgaauugcucauuaguaaagagagcugguccuacaucguugaaaccccaaauccggagaacggaacuuguuaucccggcuacuuugcugacuaugaggaacugagggagcaacugucuucggugagcucauucgaacgguuugagauuuucccuaaggagaguuccuggccaaaucauacagucaccggugugucugccagcugcucccacaacgggaagucaaguuuuuaccgcaaucucuuauggcugacgggcaaaaacggacuuuaucccaauuugagcaagucuuacgcaaacaauaaagaaaaggagguacugguucuauggggcgugcaucacccuccaaacaucggggaucagaaagcccucuaccacacugaaaacgcuuaugucuccguggugucaagccauuacagucgacguuucacccccgagauagcaaagagaccuaaggucagggaccaggaaggacggaucaauuauuacuggacacugcuugagccaggugauacuauuaucuuugaggccaacggcaaucugauugcuccgcgcuaugccuucgcguugucuagaggguuuggauccggcaucauaaccagcaacgcacccauggacgaaugugaugccaaaugccagacaccucaaggugcuauuaauucgucucucccauuccagaacguucaccccgugaccaucggggaguguccuaaguacguaagguccgccaaacugcggauggugacgggauuacgcaauauuccaucaauccagagucgaggccuguuuggcgcaaucgcuggguucauugaaggagguuggacuggcauggucgacgggugguauggauaccaucaccagaacgagcaaggcagcgguuacgccgcggaucagaaguccacacagaaugccauaaacgggaucaccaauaaagugaacucuguuauugaaaagaugaauacucaguuuacagcagugggcaaagaguucaacaagcucgagagaaggauggaaaaucuuaacaagaaagucgacgauggauuccuggacaucuggaccuauaacgcugaguugcuagugcugcucgaaaaugagcggacgcuggacuuucacgauagcaacguaaagaaucuuuacgaaaaaguuaagucacaacugaaaaacaaugccaaggagauaggcaacgggugcuucgaguuuuaucauaaguguaauaacgaaugcauggagagugugaaaaauggaaccuacgacuaucccaaguacuccgaagagagcaaauugaaccgugagaagauugauggugucaaacucgaaucuaugggcguguaucagauccuggcuaucuacucaacagucgccaguagcuuagugcugcuaguuucccucggggcaauuucuuucuggaugugcucgaauggaagccugcagugucgcaucugcauuuga

SEQ ID NO: 128792 - RNA, 1698 nt, Artificial Sequence
  derived and/or modified CDS sequence (opt3) from hemagglutinin__InfluenzaA__ABD60911
augaaggccaaacugauggugcuccuuugcaccuucacagcuacuuacgcagacacgaucuguauuggcuaucacgccaacaauagcaccgauacagucgacacuguucuggagaagaacgugaccguaacacauuccgugaauuuguuagaagauucucacaacgggaaacugugccuacucaagggaauagcgccccugcagcuugguaauuguucagucgcuggcuggauccuggggaacccugagugcgaauugcucauuaguaaagagagcugguccuacaucguggaaaccccaaauccggagaacggaacuuguuaucccggcuacuuugccgacuaugaggaacugagagagcaacugucuucgguuagcucauucgaaagguuugagauuuucccuaaggagaguuccuggccaaaucauacagugaccggugucucugcaagcugcucccacaacgggaagucaaguuuuuaccggaaucucuuauggcugacgggcaaaaacggacuuuaucccaauuugagcaagucuuacgccaacaauaaagaaaaggaggugcugguacuauggggcguucaucacccuccaaacaucggggaucagcgcgcucucuaccacacugaaaacgcauauguguccgucgugucaagccauuacagucgacguuucacccccgagauagccaaaagaccuaaggugagggaccaggaaggacggaucaauuauuacuggacacugcuugagccaggugauacuauuaucuuugaggcuaacggcaaucugauugccccgugguaugcguucgcauugucucgcggguuuggauccggcaucauaaccagcaacgcccccaugggugaaugugacgcuaagugccagacaccucaaggggccauuaauucgucucucccauuccagaacguccaccccguuaccaucggagaguguccuaaauacgugagauccgcaaagcugaggaugguaacgggcuuacggaauauuccaucaauccagagucgcggccuguuuggggcuaucgccggauucauugaagguggcuggacugggaugguggauggaugguauggcuaccaucaccagaacgagcaagguagcggguacgcggccgaccagaaauccacacagaaugcaauagauggcaucaccaacaaggucaauucuauuaucgaaaagaugaacacucaguuuacagcugugggaaaagaguucaauaaacucgagcgaagaauggaaaaccuuaauaagaagguugacgauggcuuccuggacauauggaccuauaacgccgaguugcuagugcugcucgaaaacgagaggacgcuggacuuucacgauagcaaugucaaaaaccuuuacgaaaaggugaaaucacaacugaagaauaacgcuaaagagauugggaauggaugcuucgaguuuuaucauaaguguaacaaugaaugcauggagaguguaaagaacgguaccuacgacuaucccaaauacuccgaagagagcaaguugaaucgggagaaaaucgauggcguuaagcucgaaucuauggggguguaucagauccuggccauuuacucaacagucgcaaguagcuuagugcugcuagucucccucggagccaucucuuucuggaugugcucgaacggcagccugcagugucguauuugcauauga

SEQ ID NO: 128793 - RNA, 1701 nt, Artificial Sequence; identical to SEQ ID NO: 128080
  derived and/or modified CDS sequence (opt3) from hemagglutinin__InfluenzaA__ABD60922

SEQ ID NO: 128794 - RNA, 1701 nt, Artificial Sequence
  derived and/or modified CDS sequence (opt3) from hemagglutinin__InfluenzaA__ABD60933
augaaggccaaacugcucgugcuucugugcgcuuugagcgcaaccgacgccgauacaaucuguauuggcuaccacgcgaacaauuccacugacacggucgauaccguuuuagagaagaacgugacaguaacucauucugugaaucugcuagaagacucacacaacgggaaacucugcagacugaagggaauagcuccccuucagcuggguaaauguaguaucgccggcuggauuuuggggaauccugagugcgaaagccucgucuccaagaagucuuggucguauaucgcagagaccccaaacucagaaaauggaacauguuacccgggcuauuucgccgauuacgaggagcugagggaacaacugagcaguguguccucuuuugagcgguucgaaauuuuucccaaagagcgcagcuggccuaagcauaacguuacccgaggugugacugcuuccugcucacacaaagggaagaguagcuucuaucguaaucucuuauggcugacagagaaaaacggaucuuacccaaaucuuuccaagucauaugucaacaauaaggaaaaagagguguugguacuguggggcguucaucaccccagcaacaucgaagaccagaagaccauauacagaaaagagaaugcauacgugagugucgugucuuccaacuauaacaggcgguuuacgccugaaaucgccgagcgcccaaaggugagaggccaggcugggaggauuaauuacuauuggacucuacucgagcccggagauaccaucauuuucgaagccaacgguaaucugaucgcgccuuggcacgcauuugcccuuaaccggggcuucgggagcggaauaauuacaucgaaugcuucuauggacgagugugauacuaaaugccagaccccacaaggcgccaucaacuccucacugccguuucagaauauucaucccgucacaaucggugaauguccuaaguacguucgcaguaccaaauugcgaauggugacggggcucagaaacaucccaagcauucaguccaggggacuguucggcgcaauagcuggcuuuaucgaagggggauggacugguaugauugacggcugguauggguaccaccaucagaaugaacaaggaucuggcuaugccgcggaucaaaagagcacacagaacgccaucaaugguauaaccaacaagguaaauucagugauugagaaaaugaacacucaguucacagcagucgggaaggaguuuaauaaauuagaaaagcggauggagaaccugaacaaaaagguggacgauggcuuccucgacaucuggaccuacaaugcugaacuucugguuuugcuagagaacgaacguacgcuggacuuccacgauaguaaugugaagaaccucuacgagaaagucaagucccagcugaaaaauaacgccaaggagaucggaaauggcugcuuugaguucuaucacaaauguaacaaugagugcauggaaagcgugaagaacgggaccuacgacuaucccaaguacucugaggagucaaaacuuaaucgcgaaaagauugauggaguaaaacuggagaguauggguguuuaucagaucuuggcuauuuacagcacaguggccuccucucucguccuguuagugucgcugggcgcaaucagcuuuuggaugugcuccaacgggucacuacaguguagaauaugcauuuga

SEQ ID NO: 128795 - RNA, 1701 nt, Artificial Sequence
  derived and/or modified CDS sequence (opt3) from hemagglutinin__InfluenzaA__ABD60944
augaaggccaaacugcucgugcuucugugcgcuuugagcgcaaccgacgccgauacaaucuguauuggcuaccacgcgaacaauuccacugacacggucgauaccguuuuagagaagaacgugacaguaacucauucugugaaucugcuagaagacucacacaacgggaaacucugcagacugaagggaauagcuccccuucagcuggguaaauguaguaucgccggcuggauuuuggggaauccugagugcgaaagccucuucuccaagaagucuuggucguauaucgcagagaccccaaacucagaaaauggaacauguuacccgggcuauuuugccgauuacgaggagcugagggaacaacugagcagugucuccucuuucgagcgguuugaaauuuuccccaaagagcgcagcuggccuaagcauaacgugacccgagguguuacugcuuccugcucacacaaagggaagaguagcuuuuaucguaaucucuuauggcugacagagaaaaacggaucuuacccaaaucuuuccaagucauaugugaacaauaaggaaaaagaggucuuggugcuguggggcguacaucaccccagcaacaucgaagaccagaagaccauauacagaaaagagaaugcauacguuaguguggucucuuccaacuauaacaggcgguucacgccugaaaucgccgagcgcccaaaggugagaggccaggcugggaggauuaauuacuauuggacucuacucgagcccggagauaccaucauuuuugaagccaacgguaaucugaucgcgccuugguacgcauucgcccuuagccggggcuuugggucgggaauaauuacaucuaacgcuuccauggacgagugugauacuaaaugccagaccccacaaggcgccaucaauucaagucugccguuccagaacgugcaccccgucacaauuggugaauguccuaaguauguucgcagcaccaaauugcgaauggugacggggcucagaaauaucccauccauccagucuaggggacuguuuggcgcaauugcuggcuucauagaagggggauggacugguaugaucgacggcugguacggguaucaucaccagaacgagcaaggaagcggcuacgccgcggaucagaagucaacacagaaugccauuaacgguaucaccaauaagguaaacagugugauagagaaaaugaauacucaguuuacagcagucgggaaggaguucaacaaauuagaaaagcggauggagaaucugaacaaaaagguggacgauggcuuccucgacauuuggaccuacaacgcugaacuucugguuuugcuagagaaugaacguacgcuggacuuucaugauuccaacgugaagaaucucuaugagaaagucaagagccaacugaaaaacaaugccaaggagaucggaaacggcugcuucgaauuuuaccacaaauguaauaacgagugcauggaaucugugaagaaugggaccuaugacuaccccaaguauucagaggagaguaaacuuaaccgcgaaaagaucgauggaguaaaacuggagagcauggguguuuaccagauuuuggcuaucuauuccacaguggccucuucgcucguccuguuagugagccugggcgcaauuuccuucuggaugugcucaaaugggagucuacaguguagaauaugcaucuga

SEQ ID NO: 128796 - RNA, 1701 nt, Artificial Sequence
  derived and/or modified CDS sequence (opt3) from hemagglutinin__InfluenzaA__ABD60955
augaaggccaaacugcucgugcuucugugcgcuuucaccgcaacauacgccgacacuaucuguauuggcuaucacgcgaacaauagcacggauaccgucgacacaguuuuggagaagaacgugacuguaacccauuccgugaauuuacuggaagauucucacaacgggaaacuaugcagacucaagggaauagcuccccugcagcuugguaauuguucagucgccggcuggauccuggggaacccuaaaugcgagaguuuguuuagcaaggaauccuggucuuacauugcagagacaccaaauccggaaaacggaaccuguuaucccggcuacuucgccgacuaugaggagcucagggaacaacugucgucagugagcaguuuugagcgguucgaaaucuuuccuaaggaguccucuuggccaaaucauacuguuacaaaaggugugaccacgagcugcucccacaacgggaagucaaguuucuaccgcaaucugcucugguuaacugagaaaaacggacuguaucccaaucuuagcaagucuuacgucaacaauaaagaaaaggagguguugguacuguggggcguucaucacccuuccaacauucgagaucagcgugcuaucuaccacaccgaaaacgcauaugugucagucgugagcagucauuacucuagaagguuuacaccagagauagccaagcggcccaaagugcgcgaccaggaaggcagaaucaauuauuacuggacucuacucgagccuggggauaccauuaucuucgaggcuaacggaaaucugauugccccaugguaugcguuugcacuuuccagggguuucggcagcgggaucauaacaucgaacgccucuauggacgaaugugaugcuaagugccagaccccgcaaggagccauuaauuccucacugcccuuucagaacguccacccuguuacgaucggcgaguguccaaaauacgugcggaguacuaaguugcgcaugguaacaggucuccgaaauauucccagcauccaguccagagggcuguucggagcaaucgcuggcuuuauugaaggcggguggaccggaaugauagacgguugguauggcuaccaucaccagaacgagcaagggucuggauacgccgcggaucagaaaagcacucagaaugccaucaacggcauuacaaauaaggugaacucagucaucgaaaagaugaauacccaguucacggcaguggguaaggaguucaacaaguuagagaggcggauggaaaaucugaacaaaaagguugacgauggguuucucgacauauggaccuauaacgcugagcuucugguguugcuagaaaauggccguacacuggacuuccacgauaguaacgucaaaaaucucuacgagaaggugaaaucccaacugaagaacaaugccaaggaaauuggaaacggcugcuuugaguucuaucauaaauguaauaacgagugcauggaaagcguaaagaaugggacuuacgacuauccuaaauacucugaggaaucaaaacuuaaccgcggaaaaaucgaugguguuaagcuggagaguaugggcguguaucagaucuuggcuauuuacagcaccgucgccuccucucucgugcuguuagucucgcugggggcaaucagcuuuuggaugugcuccaauggaucacuacaguguagaauuugcauauga

SEQ ID NO: 128797 - RNA, 1701 nt, Artificial Sequence; identical to SEQ ID NO: 128080
  derived and/or modified CDS sequence (opt3) from hemagglutinin__InfluenzaA__ABD61260

SEQ ID NO: 128798 - RNA, 1701 nt, Artificial Sequence; identical to SEQ ID NO: 128080
  derived and/or modified CDS sequence (opt3) from hemagglutinin__InfluenzaA__ABD61271

SEQ ID NO: 128799 - RNA, 1701 nt, Artificial Sequence; identical to SEQ ID NO: 128334
  derived and/or modified CDS sequence (opt3) from hemagglutinin__InfluenzaA__ABD61282

SEQ ID NO: 128800 - RNA, 1701 nt, Artificial Sequence; identical to SEQ ID NO: 128564
  derived and/or modified CDS sequence (opt3) from hemagglutinin__InfluenzaA__ABD61293

SEQ ID NO: 128801 - RNA, 1701 nt, Artificial Sequence; identical to SEQ ID NO: 128786
  derived and/or modified CDS sequence (opt3) from hemagglutinin__InfluenzaA__ABD61304

SEQ ID NO: 128802 - RNA, 1701 nt, Artificial Sequence; identical to SEQ ID NO: 128698
  derived and/or modified CDS sequence (opt3) from hemagglutinin__InfluenzaA__ABD61315

SEQ ID NO: 128803 - RNA, 1701 nt, Artificial Sequence; identical to SEQ ID NO: 128120
  derived and/or modified CDS sequence (opt3) from hemagglutinin__InfluenzaA__ABD61337

SEQ ID NO: 128804 - RNA, 1701 nt, Artificial Sequence
  derived and/or modified CDS sequence (opt3) from hemagglutinin__InfluenzaA__ABD61348
augaagaccaucauugcccugagcuacauacucugccuuguguucgcucagaaacugcccgucaacgacaauuccacagcaacuuuguguuuaggccaccaugccguuccuaacgggacgcuggugaagaccaucacaaaugaucacauugagguaacuaacgcgaccgaacuugugcaaucuucaaguacaggaagaaucugcgacagcccacaucagauucucgauggugagaauuguacccugaucgacgcucuacugggcgauccgcacugcgacggguuucagaacaaagaaugggauuuguucgucgagagguccacugccuauucuaauuguuaccccuaugacgugccugauuacgcaucgcuccggucacugguugccagcaguggaacacuggaauuuaacaaugaguccuucaacuggaccggcguggcucagaaugguacgucuagcgcaugcaagcgccgauccauaaaaucauuuuucagucgucucaacugguuacaucaacugaaguauaaguacccagcccuuaaugucacuaugcccaacaaugagaaauuugacaaguuguauaucuggggagugcaccacccuagcaccgauucugaccagauuucccuguacgcucaggccucagggagaguaacaguuagcacuaaaaggagucagcaaaccgugaucccaaacauuggcucucggcccuggguccgcggcguguccagcagaaucucgauauacuggacaauugugaagccuggggauauccuacucauuaacucuaccggaaaucugaucgcgccaagggguuauuucaaaauccgguccggcaagucaaguauuaugcgcagcaacgcaccgauagggaaguguaauuccgaaugcaucacgcccaacggaucuauuccuaauaacaaaccauuucagaaugucaaccgaaucacuuacggcgccugucccagauauguuaagcagaauacacuuaaacuggcuaccgguaugaggaacgugccugagaagcagacucgggggauauucggagccauugcaggcuuuaucgaaaauggcugggaggggaugguagacggaugguacgguuuccgucaucaaaacagcgagggcacagggcaggcugccgacuugaaaucaacccaggcggccaucaaucaaauuaacggaaagcucaaucgccugaucgagaaaacgaacgaaaaguuucaccagauugaaaaggaguucagugaaguggagggcagaauacaggauuuagagaaauaugucgaagacaccaagaucgaucugugguccuacaacgcagagcuccuuguggcucuggaaaaucagcauacaauugacuugacugauagcgagaugaacaaacuauucgaaaggacccggaagcaacugcgagagaaugccgaggacauggguaacgggugcuuuaaaaucuaucacaagugugauaaugcuugcaucggcucuauucgcaacggaacauacgaccacgauguuuacagagacgaagcccucaauaacagguuccagauaaagggcguggagcugaaaucaggguauaaggauuggauccuuuggauuaguuuugcaaucagcugcuuccuguugugugucgugcuccugggauuuauuaugugggccugccagaaagguaauauccgguguaacauaugcaucuga

SEQ ID NO: 128805 - RNA, 1701 nt, Artificial Sequence; identical to SEQ ID NO: 128120
  derived and/or modified CDS sequence (opt3) from hemagglutinin__InfluenzaA__ABD61359

SEQ ID NO: 128806 - RNA, 1701 nt, Artificial Sequence; identical to SEQ ID NO: 128758
  derived and/or modified CDS sequence (opt3) from hemagglutinin__InfluenzaA__ABD61370

SEQ ID NO: 128807 - RNA, 1701 nt, Artificial Sequence; identical to SEQ ID NO: 128698
  derived and/or modified CDS sequence (opt3) from hemagglutinin__InfluenzaA__ABD61381

SEQ ID NO: 128808 - RNA, 1701 nt, Artificial Sequence
  derived and/or modified CDS sequence (opt3) from hemagglutinin__InfluenzaA__ABD61392
augaagaccaucauugcccugagcuacauacucugccuuguguucgcucagaaacugcccggcaacgacaauuccacagcaacuuuguguuuagggcaccaugccgucccuaacggaacgcugguuaagaccaucacaaaugaucaaauugaggugacuaacgcgaccgaacuuguacagucuucaaguacagguggcaucugcgacagcccacaccagauucucgauggggagaauuguacccugaucgacgcucuacugggagauccgcauugcgacggcuuucagaacaaagaaugggauuuguucguggagagauccaaggccuauucuaauuguuaccccuaugacgucccugauuacgcaucgcucaggucacugguggccagcagugguacucuggaauuuaacaaugaguccuucaacuggacagggguugcucaaaauggaaccucuagcgcaugcaaacggggcuccaacaagucauuuuucagucgccucaauugguuacaccagcugaaguauaaauacccagcccuuaacgugacgaugcccaauaacgagaaguuugacaaauuguauauauggggcguccaucacccuagcacugauucugaccagaucucccuguacgcucaggccccagggcgagugaccguaucaacaaagcguagccaacagacuguuauucccaacaucggaaguagaccuugggugaggggugucucuucccggauuagcaucuacuggaccauagugaaaccaggcgauauucuacucaucaauuguacagggaaccugauugcgccgcgcggauauuucaagaucagaucgggcaagucuuccaucaugaggucagacgcaaguauugguaaaugcaauagcgaauguauaacccccaacggguccaucccuaaugacaagccauuucagaacgugaaucggauuacguacggagccugcccccgcuaugucaaacagaacacucuuaagcuggcuacaggcaugcgaaauguuccugagaaacaaaccagaggcaucuucggggccauagcaggauuuauugaaaacgguugggagggcaugguggaugggugguacggauucaggcaccagaauagcgagggcacuggucaggcugccgacuugaagucuacacaagcggccaucaaccagaucaaugggaaacucaaccggcugauugaaaagaccaaugagaaguuucaucagaucgaaaaagaguucucagaaguagagggccguauucaggauuuagagaaguauguggaagacacgaaaauagaucuguggaguuacaacgcagagcuccuugucgcucuggaaaaccaacacaccaucgacuugacagauuccgagaugaauaagcuauucgaacgcacuaaaaagcagcugagagagaacgccgaggacaugggaaauggcuguuuuaagauuuaucauaaaugcgauaacgcuugcaucgggagcaucaggaauggaaccuacgaccacgauguguaccgggacgaagcccucaacaaucgauuccagauuaaggguguugagcugaaaucuggcuauaaggacuggauacuuuggaucucauuugcaauuaguuguuuccuguugugcgugguccuccugggguuuaucaugugggccugucagaaaggaaacauucgcugcaauaucuguauauga

SEQ ID NO: 128809 - RNA, 1701 nt, Artificial Sequence; identical to SEQ ID NO: 128788
  derived and/or modified CDS sequence (opt3) from hemagglutinin__InfluenzaA__ABD61403

SEQ ID NO: 128810 - RNA, 1701 nt, Artificial Sequence
  derived and/or modified CDS sequence (opt3) from hemagglutinin__InfluenzaA__ABD61529
augaagaccaucauugcccugagcuacauauucugccucguguuugcucagaaacuucccggcaacgacaauuccacagcaacucuguguuuggggcaccaugccgucccuaacggaacguuaguuaagaccaucacaaaugaucaaauugaggugacuaacgcgaccgaacugguacagucuucaaguacagguagaaucugcgacagcccacacaggauucuagauggcaaaaauuguacccucaucgacgcucugcuuggggauccgcauugcgacggauuccagaacgagaagugggaucuguuuguggaacgguccaaagccuucucuaauuguuaucccuacgacgucccugauuaugcaucguugcgcucacucguggccagcaguggcacucuggaguuuauaaacgaagguuucaauuggacagggguuacccaguccggaggcucuuacgcuugcaagcgaggcagcgugaacuccuuuuucucacgucugaauuggcucuaugagagugagagcaaguacccagucuuaaacgugacgaugcccaauaacgggaaauuugacaagcuguauaucuggggaguacaccauccuucuacugauaaagaacaaaccaaucuuuacguuagagcauccgguagggugacagucucaacuaagcggagccagcagaccgugauuccaaacaucggcagucgccccugggugagaggguugucuuccaggauuagcaucuacuggacaauagucaaaccuggagacauucugcuaaucaacucgaccggcaaucucauugccccacgggguuauuucaagauccgcacggggaagucuuccaucaugcgaucagaugcuccgauuggaacuuguaguagcgagugcauaacacccaacggcuccaucccuaaugacaaaccauuucagaacguuaauaagauuaccuacggcgccugucccagauaugugaaacaaaacacucugaagcuggcgacagggaugaggaauguaccugaaaaacagacccggggaaucuucggugcaauagccggcuuuauugagaacgggugggagggaaugguggacggcugguacgguuuccgucaccaaaauucugaagggacgggccaggcugccgaucuuaagagcacccaggcagcuaucgaccagaucaacggacgcuugaauagacucauugagaaaacaaacgaaaaguuccaccagaucgagaaggaauuuucagaggucgagggcaggauucaagaucuggaaaaauauguggaggacacuaagauagauuuauggaguuacaaugccgaacugcucguugcgcuugagaaccagcauaccaucgaccugacagauuccgaaaugaauaaauuguucgagaagacucggaaacagcuacgagagaacgccgaagacauggggaacggaugcuuuaagauuuaucacaagugugauaaugcaugcaucgguagcauccgcaacggcaccuacgaccaugauguguacagagacgaggcucugaauaacagguuccagauuaaaggggucgaacucaagucuggauauaaagacuggauacuguggaucucauuugccauuaguugcuuccuucugugugugguauugcucggcuuuaucaugugggcuugccaaaaggguaauauucgguguaacaucugcauauga

SEQ ID NO: 128811 - RNA, 1698 nt, Artificial Sequence; identical to SEQ ID NO: 128789
  derived and/or modified CDS sequence (opt3) from hemagglutinin__InfluenzaA__ABD61540

SEQ ID NO: 128812 - RNA, 1701 nt, Artificial Sequence
  derived and/or modified CDS sequence (opt3) from hemagglutinin__InfluenzaA__ABD61757
augaagaccaucauugcccugagcuacauauucugccucguguuugcucaggaccuucccggcaacgauaauuccacagcaacucuguguuuggggcaccaugccgucccuaacggaacguuaguuaaaaccaucacaaaugaccaaauugaggugacuaacgcgaccgaacugguacagucuucaaguacagguaagaucugcgauaauccacacagaauacuagacggcaucaacuguacccucauagaugcucugcuuggggacccgcauugcgauggauuccagaaugagaaaugggaccuguuuguggaaaggagcaaggccuucuccaacuguuaucccuacgaugucccugacuaugcaucuuugcggucgcucguggccucaagcggcacucuggaguuuaucaaugaagguuucaacuggacagggguuacccagaauggaggcaguuccgcuugcaaacgcggcccagauaacggguuuuucucucgacugaauuggcucuacaagagcggauccacguaucccgugcaaaacgucacuaugccuaauaacgacaacucagauaaguuauacauuuggggugugcaccauccaaguaccgacaaagagcagacagaccuguauguacaggcaagcggcaagguuacugugucuaccaaacguucccagcaaacagucauccccaauguggggucaagaccuugggugaggggacuuagcagucgggucucuauuuacuggaccaucguuaagccaggcgauauauuggugauuaacuccaaugguaaccugaucgccccgcgcggguacuuuaaaaugagaacgggaaagagcucgauuaugaggucugacgcucccaucggcacuuguuccucagagugcaucacaccuaauggcaguauuccaaacgauaagcccuuccagaauguaaacaaaauaaccuauggggccuguccuaaguacgugaaacagaauacucuaaagcucgcgacaggaaugcggaacgucccagaaaaacagacccgcgguaucuuuggcgcaauugccggguucaucgagaauggaugggaaggcaugauagacgguugguauggguuucgacaccaaaacagcgagggcacgggacaggcugccgaucugaaguccacccaggcagcuauugaccaaaucaauggcaaacuuaacagagugaucgagaagacaaaugaaaaguuccaccagauugagaaagaguucucugaaguugaagggaggauccaggaucuggagaaguacguggaggacacuaaaauugauuuguggagcuauaacgccgaacuccuggucgcguuagagaaccagcauaccauagaccugacagauucagaaaugaauaagcucuuugagaaaacucggcgucaacuucgcgaaaacgccgaggacaugggaaaugguugcuucaagaucuaccacaagugugacaacgcaugcauuggcaguaucagaaaugggaccuaugaucaugacguguacagggaugaggcucugaacaaucgguuucagaucaaaggaguagaauugaaguccggcuacaaagacuggauucuauggauuagcuucgccaucucuugcuuucugcucuguguugugcugcuugguuucauuaugugggcuugccagaaggggaacauccgauguaauauuugcaucuga

SEQ ID NO: 128813 - RNA, 1701 nt, Artificial Sequence
  derived and/or modified CDS sequence (opt3) from hemagglutinin__InfluenzaA__ABD61777
augaagaccaucauugcccugagcuacauauucugccucggcuuugcucagaaacuucccgggaacgacaauuccacagcaacucuguguuugggacaccaugccgugccuaacgguacguuagucaagaccaucacaaaugaucaaauugagguuacuaacgcgaccgaacuggugcagucuucaaguacaggcagaaucugcgacagcccacacaggauucuagaugggaaaaauuguacccucaucgacgcucugcuuggagauccgcauugcgacggcuuccagaacgagaagugggaucuguuuguagaacgguccaaagccuucucuaauuguuaucccuacgacgugccugauuaugcaucguugcgcucacucgucgccagcagugguacucuggaguuuauaaacgaaggguucaauuggacaggagugacccaguccggcggcucuuacgcuugcaagcgagggagcguuaacuccuuuuucucacgucugaauuggcucuaugagagugagagcaaguacccagcauuaaacgugacgaugcccaauaacggaaaauuugacaagcuguauaucugggguguccaccauccuucuacugauaaagaacaaaccaaucuuuacgugagagccuccggcaggguaacaguuucaacuaagcggagccagcagaccgugauuccaaacaucgggagucgccccugggucagaggauugucuuccaggauuagcaucuacuggacaauagugaaaccuggcgacauucugcuaaucaacucgaccgguaaucucauugcuccacggggguauuucaagauccgcacgggaaagucuuccaucaugcgaucagaugccccgauuggcacuuguaguagcgagugcauaacacccaacggcuccaucccuaaugacaaaccauuucagaacgugaauaagauuaccuacggggcgugucccagauaugucaaacaaaacacucugaagcuggcaacaggaaugaggaauguuccugaaaaacagacccgggguaucuucggcgccauagcuggguuuauugagaacggaugggagggcaugguggacgguugguacggguuccgucaccaaaauucugaaggcacgggacaggccgcagaucuuaagagcacccaggcugccaucgaccagaucaacggcaaauugaaucgccucauugagaagacaaacgaaaaguuccaccagaucgagaaagaauuuucagagguagaggggaggauucaagaucuggaaaaguauguggaggacacuaaaauagauuuauggaguuacaaugcggaacugcucgucgcccuugagaaccagcauaccaucgaccugacagauuccgaaaugaauaaguuguucgagaaaacuagaaagcagcuacgggagaacgcagaagacaugggaaacgguugcuuuaagauuuaucacaaaugugauaaugcuugcaucggcagcauccgaaacgggaccuacgaccaugauguguaccgcgacgaggcccugaauaacagauuccagauuaagggaguugaacucaaaucuggcuauaaggacuggauacuguggaucucauuugcuauuaguugcuuccuucuguguguggucuugcucgguuuuaucaugugggccugccaaaaagggaauauuagguguaacaucugcauauga

SEQ ID NO: 128814 - RNA, 1701 nt, Artificial Sequence
  derived and/or modified CDS sequence (opt3) from hemagglutinin__InfluenzaA__ABD77598
augaagaccaucauugcccugagcuacauacucugccuuguguucgcucagaaacugcccgucaacgacaauuccacagcaacuuuguguuuaggccaccaugccguuccuaacgggacgcuggugaagaccaucacaaaugaucacauugagguaacuaacgcgaccgaacuugugcaaucuucaccaacaggaagaaucugcgacaguccgcaucagauucucgauggugagaauuguacccugaucgacgcucuacugggcgauccccacugcgacggguuucagaacaaagaaugggauuuguucgucgagaggagcacugccuauuccaauuguuacccuuaugacgugccagauuacgcaucucuccggucgcugguugccucaagcggaacacuggaauuuaacaaugagaguuucaacuggaccggcguggcucagaaugguacguccucugcaugcaagcgccgaagcauaaaauccuuuuucucacgucucaacugguuacaucaacugaaguauaaguaccccgcccuuaaugucacuaugccuaacaaugagaaauuugacaaguuguauaucuggggagugcaccacccaaguaccgauagcgaccagauuucucuguacgcucaggccuccgggagaguaacaguuucaacuaaaaggagccagcaaaccgugauccccaacauuggcagucggccuuggguccgcggcgugucuuccagaaucagcauauacuggacaauugugaagccaggggauauccuacucauuaacucgaccggaaaucugaucgcgccgagggguuauuucaaaauccggucuggcaaguccucaauuaugcgcaguaacgcacccauagggaaguguaauagcgaaugcaucacgccuaacggauccauuccaaaugacaaacccuuucagaacgucaaucgaaucacuuacggcgccuguccuagauauguuaagcagaacacacuuaaacuggcuaccgguaugaggaaugugccagagaagcagacucgggggauauucggagccauugcaggcuuuaucgaaaacggcugggaggggaugguagacggaugguacgguuuccgucaucaaaauucugagggcacagggcaggcugccgauuugaaaagcacccaggcggccaucaaccaaauuaauggaaagcucaaccgccugaucgagaaaacgaaugaaaaguuucaccagauugaaaaggaguucucagaaguggagggcagaauacaggacuuagagaaauaugucgaagauaccaagaucgaccuguggaguuacaacgcagagcuccuuguggcucuggaaaaccagcauacaauugauuugacugacuccgagaugaauaaacuauucgaaaggacccggaagcaacugcgagagaacgccgaggauauggguaaugggugcuuuaaaaucuaucacaagugugacaacgcuugcaucggcagcauucgcaauggaacauacgaucacgacguuuacagagaugaagcccucaacaauagguuccagauaaagggcguggagcugaaaucuggguauaaggacuggauccuuuggauuucauuugcaaucaguugcuuccuguugugugucgugcuccugggauuuauuaugugggccugccagaaagguaacauccgguguaauauaugcaucuga

SEQ ID NO: 128815 - RNA, 1701 nt, Artificial Sequence; identical to SEQ ID NO: 128698
  derived and/or modified CDS sequence (opt3) from hemagglutinin__InfluenzaA__ABD77609

SEQ ID NO: 128816 - RNA, 1701 nt, Artificial Sequence; identical to SEQ ID NO: 128698
  derived and/or modified CDS sequence (opt3) from hemagglutinin__InfluenzaA__ABD77620

SEQ ID NO: 128817 - RNA, 1701 nt, Artificial Sequence; identical to SEQ ID NO: 128698
  derived and/or modified CDS sequence (opt3) from hemagglutinin__InfluenzaA__ABD77631

SEQ ID NO: 128818 - RNA, 1701 nt, Artificial Sequence; identical to SEQ ID NO: 128698
  derived and/or modified CDS sequence (opt3) from hemagglutinin__InfluenzaA__ABD77642

SEQ ID NO: 128819 - RNA, 1701 nt, Artificial Sequence; identical to SEQ ID NO: 128698
  derived and/or modified CDS sequence (opt3) from hemagglutinin__InfluenzaA__ABD77653

SEQ ID NO: 128820 - RNA, 1698 nt, Artificial Sequence; identical to SEQ ID NO: 128789
  derived and/or modified CDS sequence (opt3) from hemagglutinin__InfluenzaA__ABD77708

SEQ ID NO: 128821 - RNA, 1698 nt, Artificial Sequence
  derived and/or modified CDS sequence (opt3) from hemagglutinin__InfluenzaA__ABD77719
augaaggugaaacugcucguccuucugugcaccuucacagccacuuacgcugacacgaucuguauuggcuaucacgcaaacaauagcaccgauacaguugacacuguguuggagaagaacguaaccgugacacauuccgucaauuuacuggaagauucucacaacgggaaacuaugccuccugaagggaauagcgccccuucagcuggguaauuguucaguggccggcuggaucuuggggaacccugagugcgaacuccugauuaguaaagagagcugguccuacaucguugaaaccccaaauccggagaacggaacuuguuaucccggcuacuuugcugacuaugaggaacugagagagcaacucucuucggugagcucauucgaaagguuugagauuuucccuaaggagaguuccuggccaaaucauacagucaccggugugucugccagcugcucccacaacgggaagucaaguuuuuaccggaauuuacuguggcuuacgggcaaaaacggauuguaucccaaucugagcaagucuuacgcaaacaauaaagaaaaggaggugcuaguucucuggggcgugcaucacccuccaaacaucggggaucagcgcgcccuguaccacacugaaaacgcuuaugucuccguggugucaagccauuacagucgacguuucacccccgagauagcaaaaagaccuaaggucaggaaucaggaaggacggaucaacuauuacuggacacuucuggagccaggugacacuauuaucuuugaggccaauggcaacuugauugcuccgcgcuaugccuucgcgcucucuagaggguuuggauccggcaucauaaccagcaaugcacccauggaugaaugugacgccaagugccagacaccucaaggugcuauuaacucgucucugccauuccagaauguucaccccgugaccaucggggaguguccuaaauacguaagguccgccaaguuacggauggugacgggacugcgcaacauuccaucaauccagagucgaggccucuuuggcgcaaucgcuggguucauugaaggagguuggacuggcauggucgaugggugguauggauaccaucaccagaaugagcaaggcagcgguuacgccgcggaccagaaauccacacagaacgccauaaaugggaucaccaacaagguaaauucuguuauugaaaagaugaacacucaguuuacagcagugggcaaagaguucaauaaacuugagagaaggauggaaaaccugaacaagaaggucgaugacggauucuuggauaucuggaccuauaaugcugagcuacuggugcuccuggaaaacgagcggacgcuugacuuucacgacagcaauguuaaaaaccuguacgaaaagguaaaaucacaauugaagaauaacgccaaagagauaggcaaugggugcuucgaguuuuaucauaaguguaacaaugaaugcauggagagugugaagaacggaaccuacgauuaucccaaauacuccgaagagagcaagcucaaucgugagaaaauugacggugucaagcuggaaucuaugggcguguaucagaucuuagcuaucuacucaacagucgccaguagccuggugcuacucguuucccugggggcaauuucuuucuggaugugcucgaacggaagccuucagugucgcaucugcauuuga

SEQ ID NO: 128822 - RNA, 1698 nt, Artificial Sequence; identical to SEQ ID NO: 128789
  derived and/or modified CDS sequence (opt3) from hemagglutinin__InfluenzaA__ABD77730

SEQ ID NO: 128823 - RNA, 1701 nt, Artificial Sequence; identical to SEQ ID NO: 128698
  derived and/or modified CDS sequence (opt3) from hemagglutinin__InfluenzaA__ABD77752

SEQ ID NO: 128824 - RNA, 1701 nt, Artificial Sequence; identical to SEQ ID NO: 128698
  derived and/or modified CDS sequence (opt3) from hemagglutinin__InfluenzaA__ABD77763

SEQ ID NO: 128825 - RNA, 1701 nt, Artificial Sequence
  derived and/or modified CDS sequence (opt3) from hemagglutinin__InfluenzaA__ABD77774
augaagaccaucauugcccugagcuacauacucugccuuguguucgcucagaaacugcccgucaacgacaauuccacagcaacuuuguguuuaggccaccaugccguuccuaacgggacgcuggugaagaccaucacaaaugauaacauugagguaacuaaugcgaccgaacuugugcaaucuucaaguacaggaagaaucugcgacagcccacaccagauucucgauggugagaacuguacccugaucgacgcucuacugggcgauccgcauugcgacggguuucagaauaaagaaugggauuuguucgucgagagguccacugccuauucuaacuguuaccccuaugacgugccugauuacgcaucgcuccggucacugguugccagcaguggaacacuggaauuuaauaacgaguccuucaauuggaccggcguggaccagaacgguacgucuagcgcuugcaagcgccgauccaauaaaucauuuuucagucgucucaacugguuacaccaacugaaguauaaguacccagcacuuaaugucacuaugcccaacaacgagaaauuugauaaguuguauauauggggagugcaucacccuagcaccgacucugaucagaucucccuguacgcccaggcuucagggagaguaacaguuagcacuaaaaggagucagcaaaccgugauuccaaauaucggcucucggcccuggguccgcggcguguccagcagaauuucgaucuacuggacaauagugaagccuggggacauucuacucaucaacucuaccggaaaucugauugccccaagggguuauuucaaaauccgguccggcaagucaaguaucaugcgcagcaacgcgccgauugggaaguguaauuccgaaugcauaacgcagaacggaucuauccccaaugacaaaccuuuucagaacgucaaucgaauuacuuacggcgcauguccaagauauguuaagcagaacacacuuaaacuggccaccgguaugaggaaugugcccgagaagcaaacucgggggaucuucggagcuauagccggcuuuauugaaaacggcugggaggggaugguagauggaugguacgguuuccgucaccagaauagcgagggcacagggcaggcagcugacuugaaaucaacccaagccgcgaucaaccagaucaauggaaagcucaaccgccugauugagaaaacgaacgaaaaguuucaucagaucgaaaaggaguucagugaaguggagggcaggauucaggauuuagagaaauaugucgaagacaccaagauagaucugugguccuacaaugccgagcuccuuguggcacuggaaaaccaacacacaaucgacuugacugauagcgagaugaauaaacuauucgaaagaacccggaagcagcugcgagagaacgcugaggacauggguaaugggugcuuuaaaauuuaucauaagugugauaacgccugcaucggcucuauccgcaauggaacauacgaccacgauguuuacagagacgaagcucucaacaauagguuccagauuaagggcguggagcugaaaucaggguauaaggacuggauacuuuggaucaguuuugccauuagcugcuuccuguugugugucgugcuccugggauuuaucaugugggcaugccagaaagguaacauucgguguaauaucugcauauga

SEQ ID NO: 128826 - RNA, 1701 nt, Artificial Sequence; identical to SEQ ID NO: 128825
  derived and/or modified CDS sequence (opt3) from hemagglutinin__InfluenzaA__ABD77785

SEQ ID NO: 128827 - RNA, 1701 nt, Artificial Sequence
  derived and/or modified CDS sequence (opt3) from hemagglutinin__InfluenzaA__ABD77807
augaaggccaaacugcucauccuucugugcgcuuugagcgcaaccgacgccgauacaauuuguauaggcuaccacgcgaacaauuccacugacacgguggauaccgucuuagagaagaacguuacagugacucauucuguaaaucugcuagaagacucacacaacgggaaacucugcagacugaagggaaucgcuccccuucagcuggguaaauguaauauugccggcuggaucuuggggaacccugagugcgaaagucuccugagcaagagguccuggucuuauauugcagagaccccaaauucggaaaacggaacauguuacccgggcgauuucgccgacuaugaggagcugcgggaacaacucucaagcgugaguuccuuugagcgcuucgaaaucuuucccaaggagcgaucuuggccuaaacauaauauaacccguggugucacugcugcaugcagccacgccgggaaguccucauucuacaaaaacuuacuguggcuuacagagaccaauggaaguuauccaaaguugagcaaaucuuacgugaacaauaaggaaaaggagguucuggugcuauggggcguccaucaccccuccaacaucgaagaucagaaaacgcucuauagaaaggagaaugcuuacgugucaguaguuagcaguaacuacaacaggcgguuuacuccugaaauugccgagcgcccaaaagugagaggccaggcggggaggaugaauuauuacuggacccugcuugagcccggagacacaaucauuuucgaagcaaacgguaaucugaucgccccuugguaugcuuuugccuugucucggggcuucggguccggaauaauuacuagcaacgcaucgauggaugagugugacaccaagugccagacaccacaaggcgcuaucaauucuucccucccguuucagaacauucaccccgucaccaucggugaauguccuaaauacgugaagucaacgaaacugcgcauggugacuggguuacgaaauaucccaaguauucagagcagaggacuguucggcgccauagcgggcuuuaucgaagggggauggacagguaugauugauggcugguauggguaccaucaccagaacgaacaaggauccggcuaugccgcagaccagaagucuacccagaaugcuaucaacgguauaacuaauaaggucaacagcguuauugagaaaaugaauacacaguucaccgccguggggaaggaguuuaacaaacucgaaaagaggauggagaaucuuaacaaaaagguagaugacggcuuccuggacaucuggacguacaacgcugaauugcuagugcugcucgagaaugaacggacccuggauuuccaugacucaaacgucaagaaucuuuacgagaaagugaagaaccaacugcguaauaacgccaaagagaucggaaauggcugcuuugaguucuaucacaaguguaacaaugagugcauggaaaguguuaaaaacgggacauacgauuaucccaaguacuccgaggagagcaaguugaaucgcgagaaaauugacggagugaagcucgaaucuaugggugucuaucagauccuggcaauuuacucaacuguggccaguagcuuaguacugcuaguuucccucggcgcuauaucuuuuuggaugugcucgaacgggagccugcaguguagaaucugcauuuga

SEQ ID NO: 128828 - RNA, 1701 nt, Artificial Sequence
  derived and/or modified CDS sequence (opt3) from hemagglutinin__InfluenzaA__ABD77818
augaaggccaaacugcucgugcuucugugcgcuuugagcgcaaccgacgccgauacaaucuguauuggcuaccacgcgaacaauuccacugacacggucgauaccguuuuagagaagaacgugacaguaacucauucugugaaucugcuagaagacucacacaacgggaaacucugcagacugaagggaauagcuccccuucagcuggguaaauguaguaucgccggcuggauuuuggggaauccugagugcgaaagccucuucuccaagaagucuuggucguauaucgcagagaccccaaacucagaaaauggaacauguuacccgggcuauuuugccgauuacgaggagcugagggaacaacugagcagugucuccucuuucgagcgguuugaaauuuuccccaaagagagcuccuggccuaagcauaccgugacucgcgguguuacagcuucaugcagucacaaagggaaaagcucuuuuuaucgaaaccucuuauggcugaccgagaaaaauggauccuacccaaaccuuucaaagagcuaugugaauaacaaggaaaaagaggucuuggugcuguggggcguacaucaccccaguaauaucgaagaccagaagacgauauaccguaaagagaacgcauacguuucuguggucuccagccacuauaauagaagguucacuccugaaaucgccaagcggccaaaagugcgcgaucaggagggcagaauuaacuacuauuggacccuacucgagcccggggacacaaucauuuuugaagcuaacggaaaucugaucgccccuugguacgcguucgcacuuucgagggguuuuggcucugggauaauuacuuccaacgccucaauggaugagugugacgcuaagugccagaccccacaaggagccaucaauaguagccugccguuccagaacgugcaucccgucacaauuggcgaauguccuaaauauguucgguccaccaaguugcgcauggugacgggucuccgaaauaucccaucuauccagagcagagggcuguuuggagcaauugcuggcuucauagagggcggguggacuggaaugaucgaugguugguacggcuaucaccaucagaacgaacaagggucaggauacgccgcggaccagaagaguacacagaaugccauuaacggcaucaccaauaaaguaaacuccgugauagagaagaugaauacucaguuuacagcagucgguaaagaguucaacaaguuagaaaagaggauggagaaucugaacaagaagguggaugacggguuccucgacauuuggaccuacaaugcugaacuucugguuuugcuagagaacgaacggacgcuggauuuucacgacagcaacgugaaaaaucucuaugagaaggucaaaucucaacugaagucaaacgccaaagagaucggcaauggaugcuucgaauuuuaccacaaguguaacaaugagugcauggaaagugugaagaacggcaccuaugauuaccccaaauauagcgaggaguccaaacuuaaucgugaaaagaucgacgggguaaagcuggagucuaugggaguuuaccagauuuuggcuaucuauucgacaguggccagcucccucguccuguuagugucacugggugcaauuaguuucuggaugugcucuaacggcagccuacagugucgcauaugcaucuga

SEQ ID NO: 128829 - RNA, 1701 nt, Artificial Sequence
  derived and/or modified CDS sequence (opt3) from hemagglutinin__InfluenzaA__ABD77829
augaagaccaucauugcccugagcuacauacucuaucuuguguucgcucagaaacugcccggcaacgacaauuccacagcaacuuugugcuuagggcaccaugccgucccuaacggaacgcugguuaagaccaucacaaaugaucaaauugaggugacuaacgcgaccgagcuaguacagucuucaaguacagguagacucugugacagcccacacaggauccuggauggcaaaaauugcacccuuauugacgcucuguugggggauccgcauugugacggauuucagaacaaggaaugggaucucuucguggaacgguccaaagccuacucugacugcuaucccuacgaugucccugacuaugcaucgcugcgcucacugguggccagcaguggcacucucgaguuuacaaaugaagguuucaacuggaccgggguugcucagaauggaacguccuacgcauguaagcgaggcucugugaaguccuuuuucucccguuuaaacuggcugcacaaacuugaguauaaguacccagccuugaaugucacuaugcccaacaaugauaaauuugacaagcuguacaucuggggcgugcaucacccuucaaccgauagugaccaaacaagccuauauguacaggcuucugggagaguuacuguguccaccaaaaggucacagcagacagucauaccaaacaucggaagccggcccugggugcgcggugugaguucuagaauuuccaucuacuggaccauugucaagccuggcgacauccuccugauaaauagcacggggaaccuuauugccccaaggggauauuucaagauccggucgggcaaaucuuccauuaugcgcucagaugcgccgaucgguaacugcaauagugaguguaucacucccaacgggagcauuccuaaugacaagccauuucaaaacguuaaucgaauaacauacggagcaugccccagauaugugaaacagaacacccugaaguuggccacuggcaugaggaauguaccugaaaaacagacacggggcaucuucggggcuauugccggauuuaucgagaacgguugggaaggcaugguggaugggugguacggauuccgucaccagaauagcgagggcaccggucaagcagcugaccucaagucuacgcaggccgcgauaaaccagauuaaugggaaacugaaccgcuuaaucgagaagaccaaugaaaaguuucaucaaaucgagaaagaguucagcgaagucgaaggcaggauucaggaucuggagaaguauguggaggacacaaaaaucgaucucuggucauacaacgccgaacuucugguugcauuggagaaucagcacacuauugaccuaaccgauagugaaaugaacaagcuguucgagagaacacggaaacagcuccgagaaaacgcugaggacaugggaaauggcuguuuuaagauauaccauaagugcgauaacgccuguaucggguccauucgcaauggaacuuaugaccacgacguguacagagaugaggcucugaacaauagguuccaaaucaaaggugucgaacuuaagagcggcuauaaagacuggauccuguggauuucuuuugccauaucaugcuucuugcucugcgugguacuguuaggguuuaucaugugggcaugucagaagggaaacauucggugcaauaucuguauuuga

SEQ ID NO: 128830 - RNA, 1701 nt, Artificial Sequence
  derived and/or modified CDS sequence (opt3) from hemagglutinin__InfluenzaA__ABD77862
augaagaccaucauugcccugagcuacauacucugccuuguguucgcucagaaacugcccggcaacgacaauuccacagcaacuuuguguuuagggcaccaugccgucccuaacggaacgcugguuaagaccaucacaaaugaucaaauugaggugacuaacgcgaccgaacuuguacagucuucaaguacagguagaaucugcgacagcccacacaggauucucgauggcaaaaauuguacccugaucgacgcucuacugggggauccgcauugcgacggauuucagaacaaggagugggauuuguucguggaacgguccaaagccuauucugacuguuaccccuaugaugucccugacuacgcaucgcuccgcucacugguggccagcaguggcacucuggaguuuacaaaugaagguuucaacuggaccgggguugcucaggauggaacguccuaugcaugcaagcgaggcucugucaagagcuuuuucucccgucucaauugguuacacaaacuggaguacaaguauccagcccuuaacgugacuaugcccaauaacgacaaauuugauaaguuguacauauggggcgugcaucacccuucaaccgacagugaccaaacaagcaucuacguacaggcuucugggagaguuacuguguccaccaaaaggucacagcagacagucauuccaaauaucggaagccggcccugggugcgcggugugaguucuagaauuuccaucuauuggaccauagucaagccuggcgauauucugcuaaucaacagcacggggaaucucauugccccaaggggauacuucaagauccggucgggcaaaucuuccaucaugcgcucagacgcgccgauugguaacuguaacagugagugcauaacucccaaugggagcaucccuaacgauaagccauuucaaaauguuaaccgaauuacauauggagcaugucccagauacgugaaacagaauacccugaaacuugccacuggcaugaggaacguaccugaaaagcagacacggggcaucuucggggcuauagccggauuuauugagaaugguugggaaggcaugguggacgggugguauggauuccgucaccagaacuccgagggcaccggucaagcagcugaucugaagucuacgcaggccgcgaucaaucagaucaacgggaaauugaaucgccucauugagaagaccaacgaaaaguuucaucaaaucgagaaagaguucagcgaagucgaaggcaggauucaggaccuggagaaguacguggaggauacaaaaauagacuuauggucauauaaugccgaacugcucguugcacuugagaaccagcacacuaucgaucugaccgacagugaaaugaauaaguuguucgagagaacacggaaacagcuacgagaaaacgcugaggauaugggaaacggcugcuuuaagauuuaccauaagugugacaaugccugcaucggguccauccgcaacggaacuuacgaccacgauguguauagagacgaggcucugaauaacagguuccaaauuaaaggugucgaacucaagagcggcuacaaagauuggauacuguggaucucuuuugccauuucaugcuuccuucugugugugguauugcucggguuuaucaugugggcaugccagaagggaaauauucgguguaacaucugcauauga

SEQ ID NO: 128831 - RNA, 1701 nt, Artificial Sequence
  derived and/or modified CDS sequence (opt3) from hemagglutinin__InfluenzaA__ABD77884
augaagaccaucauugcccugagcuacauacucugccuuguguucgcucagaaacugcccggcaacgacaauuccacagcaacuuuguguuuagggcaccaugccgucccuaacggaacgcugguuaagaccaucacaaaugaucaaauugaggugacuaacgcgaccgagcuaguacaggguucuucaacaggcagaaucugcgacaguccacacaggauucucgaugggaaaaauuguacccugaucgacgcucugcugggagauccgcauugcgacggcuuucagaacaaggaaugggauuuguucguggaacggagcaaagccuauuccaauuguuaccccuaugacgucccugauuacgcaucucuccgcucgcugguggccucaagcgguacucuggaguuuaacaaugaaaguuucaacuggacagggguugcucagaauggaaccuccuaugcaugcaagcgacguucugugaaguccuuuuucuccagacucaacugguuacacaaacuggaguacaaguauccagcccuuaaugucacgaugcccaacaaugacaaauuugauaaguuguacauauggggcgugcaucacccuucaacugacagugaucaaaccagccuguacguacaggcuucuggcaggguuacaguguccacuaaacggucacagcagaccgucaucccaaacauugggagccgccccugggugagaggagugaguucuaggaucuccauuuauuggacaaucgucaagccuggugacauacuacucauuaacagcaccggcaaucugaucgccccacggggguacuucaagauucgcucgggaaaaucuuccaucaugcgaucagacgcgccgaucgauaacuguaauagugagugcauuacgcccaacggcagcauaccuaaugacaagccauuucaaaacguuaauagaaucacuuauggugcaugucccagguacgugaaacagaacacacuuaagcuggccaccgggaugcggaauguaccugaaaaacagacucguggaauuuucggcgcuaucgccggcuuuauagagaacgggugggaaggaaugguggaugguugguauggcuuccgccaccagaauagcgaggggacaggacaagcagcugacuugaagucuacccaggccgcgauuaaccagaucaauggcaaacucaacagacugaucgagaagacgaaugaaaaguuucaucaaauugagaaagaguucagcgaagucgaagguaggauccaggauuuagagaaguacguggaggacaccaaaauugaucuguggucauauaacgccgaacuccuuguugcacuggagaaccagcacacaauagacuugacugauagugaaaugaauaagcuauucgagcggacccgaaaacagcugcgcgaaaacgcugaggacauggggaauggcugcuuuaagaucuaccauaagugugauaacgccugcauuggauccaucagaaauggcacauacgaccacgacguguauagggaugaggcucucaacaaucgguuccaaaucaaaggggucgaacuuaagagcggauacaaagacuggauucuuuggauaucuuuugccaucucaugcuuccuguugugugugguacuccuggguuuuauuaugugggcaugccagaagggcaacauccgcuguaauauuugcaucuga

SEQ ID NO: 128832 - RNA, 1701 nt, Artificial Sequence
  derived and/or modified CDS sequence (opt3) from hemagglutinin__InfluenzaA__ABD77895
augaagaccaucauugcccugagcuacauacucugccuuguguucgcucagaaacugcccggcaacgacaauuccacagcaacuuuguguuuagggcaccaugccgucccuaacggaacgcugguuaagaccaucacaaaugaucaaauugaggugacuaacgcgaccgaacuuguacagucuucaaguacagguagaaucugcgacagcccacacaggauucucgauggcaaaaauuguacccugaucgacgcucuacugggggauccgcauugcgacggauuucagaacaaggagugggauuuguucguggaacgguccaaagccuauucuaauuguuaccccuaugacgucccugauuacgcaucgcuccgcucacugguggccagcaguggcacucuggaguuuaacaaugaauccuucaacuggacagguguugcucagaaugggaccucuuaugcaugcaagcgacguagcgugaaguccuuuuucucaagacucaacugguuacacaaacuggaguacaaguauccagcccuuaaugucacgaugcccaacaaugacaaauuugauaaguuguacauauggggagugcaucacccuaguacugacagcgaucaaaccucucuguacguacaggcuuccggcaggguuacagugucaacuaaacggagccagcagaccgucaucccaaacauuggcagucgccccugggugagagggaucucuuccaggauuagcaucuauuggacaauagugaagccuggagacauucuacucaucaacucgaccgguaaucugauugccccacggggcuacuucaagauccgcucugggaaauccucaaucaugcgaagugacgcgccgauugauaacuguaauagcgagugcauaacgcccaacggauccaucccuaaugacaagccauuucaaaacgucaauagaauuacuuauggcgcaugucccagguacguuaaacagaacacacuuaagcuggccaccgguaugcggaaugugccugaaaaacagacucgugggaucuucggagcuauagccggcuuuauugagaacggcugggaagggaugguagauggaugguaugguuuccgccaccagaauagcgagggcacagggcaagcagcugacuugaagucuacccaggccgcgaucaaccagaucucaggaaaacucaauagacugauugagaagacgaacgaaaaguuucaucaaaucgagaaagaguucagugaaguggaaggcaggauucaggauuuagagaaguacgucgaggacaccaaaauagaucugugguccuauaaugccgaacuccuuguggcacuggagaaccagcacacaaucgacuugacugauagcgaaaugaacaagcuauucgagcggacccgaaaacagcugcgcgaaaaugcugaggacauggguaacgggugcuuuaagauuuaccauaagugugauaaugccugcaucggcucuaucagaaacggaacauacgaccacgacguuuauagggaugaggcucucaauaaccgguuccaaauuaaaggcguggaacugaagucaggguacaaagacuggauacuuuggaucaguuuugccauuagcugcuuccuguugugugucgugcuccugggauuuaucaugugggcaugccagaaggguaauauucgcuguaacaucugcauauga

SEQ ID NO: 128833 - RNA, 1701 nt, Artificial Sequence; identical to SEQ ID NO: 128831
  derived and/or modified CDS sequence (opt3) from hemagglutinin__InfluenzaA__ABD77906

SEQ ID NO: 128834 - RNA, 1698 nt, Artificial Sequence
  derived and/or modified CDS sequence (opt3) from hemagglutinin__InfluenzaA__ABD77917
augaaggugaaacugcucguccuucugugcaccuucacagccacuuacgcugacacgaucuguauuggcuaucacgcaaacaauagcaccgauacaguugacacuguguuggagaagaacguaaccgugacacauuccgucaauuuacuggaagauucucacaacgggaaacuaugccuccugaagggaauagcgccccuucagcuggguaauuguucaguggccggcuggaucuuggggaacccugagugcgaacuccugauuaguaaagagagcugguccuacaucguugaaaccccaaauccggagaacggaacuuguuaucccggcuacuuugcugacuaugaggaacugagagagcaacucucuucggugagcucauucgaaagguuugagauuuucccuaaggagaguuccuggccaaaucauacagucaccggugugucugccagcugcucccacaacgggaagucaaguuuuuaccggaauuuacuguggcuuacgggaaagaacggcuuguaucccaaucugagcaagucuuacgcaaacaauaaagaaaaggaggugcuaguucucuggggcgugcaucacccuccaaacaucgggaaccagaaagcccuguaccacacugaaaaugcuuaugucuccguggugucaagccauuacagucgccgauucacccccgagauagcaaagcguccuaaggucagagaucaggaaggaaggaucaacuauuacuggacacuucuggagccaggugacacuauuaucuuugaggccaauggcaacuugauugcuccgcgguaugccuucgcgcucucucgcggguuuggauccggcaucauaaccagcaaugcacccauggaugaaugugacgccaaaugccagacaccucaaggugcuauuaacucgucucugccauuccagaauguucaccccgugaccaucggggaguguccuaaguacguaagauccgccaaauuaaggauggugacgggacugcggaacauuccaucaauccagagucgcggccucuuuggcgcaaucgcuggguucauugaaggagguuggacuggcauggucgaugggugguauggauaccaucaccagaaugagcaaggcagcgguuacgccgcggaccagaaguccacacagaacgccauaaaugggaucaccaacaaaguaaauucuguuauugaaaagaugaacacucaguuuacagcagugggcaaagaguucaauaaacuugagcgaagaauggaaaaccugaacaagaaagucgaugacggauucuuggauaucuggaccuauaaugcugagcuacuggugcuccuggaaaacgagaggacgcuugacuuucacgacagcaauguaaagaaccuguacgaaaaaguuaagucacaauugaaaaauaacgccaaggagauaggcaaugggugcuucgaguuuuaucauaaguguaacaaugaaugcauggagagugugaaaaacggaaccuacgauuaucccaaguacuccgaagagagcaaacucaaucgggagaagauugacggugucaaacuggaaucuaugggcguguaucagaucuuagcuaucuacucaacagucgccaguagccuggugcuacucguuucccugggggcaauuucuuucuggaugugcucgaacggaagccuucagugucguaucugcauuuga

SEQ ID NO: 128835 - RNA, 1698 nt, Artificial Sequence
  derived and/or modified CDS sequence (opt3) from hemagglutinin__InfluenzaA__ABD77928
augaaggugaaacugcucguccuucugugcaccuucacagccacuuacgcugacacgaucuguauuggcuaucacgcaaacaauagcaccgauacaguugacacuguguuggagaagaacguaaccgugacacauuccgucaauuuacuggaagauucucacaacgggaaacuaugccuccugaagggaauagcgccccuucagcuggguaauuguucaguggccggcuggaucuuggggaacccugagugcgaacuccugauuaguaaagagagcugguccuacaucguugaaaccccaaauccggagaacggaacuuguuaucccggcuacuuugcugacuaugaggaacugagagagcaacucucuucggugagcucauucgaaagguuugagauuuucccuaaggagaguuccuggccaaaucauacagucaccggugugucugccagcugcucccacaacgggaagucaaguuuuuaccggaauuuacuguggcuuacgggaaagaacggcuuguaucccaaucugagcaagucuuacgcaaacaauaaagaaaagaaaguucuaguacucuggggcgugcaucacccuccaaacaucggggaucagaaggcccuguaccacacugagaacgcuuaugucuccguggugucaagccauuacagucgccgauucacccccgaaauagcaaagcguccuaaagucagagaccaggagggaaggaucaauuauuacuggacacuucuggaaccaggugauacuauuaucuuugaggccaacggcaauuugauugcuccgcgguaugccuucgcgcucucucgcggguuuggauccggcaucauaaccagcaacgcacccauggacgagugugaugccaagugccagacaccucaaggugcuauuaauucgucucugccauuccagaacguucaccccgugaccaucggggaauguccuaaauacguaagauccgccaaguuaaggauggugacgggacugcggaauauuccaucaauccagagucgcggccucuuuggcgcaaucgcuggguucauugagggagguuggacuggcauggucgacgggugguauggauaccaucaccagaacgaacaaggcagcgguuacgccgcggaucagaaauccacacagaaugccauaaacgggaucaccaauaaggugaacucuguuauugagaaaaugaauacucaguuuacagcagugggcaaggaguucaacaaacuugaacgaagaauggagaaucugaacaaaaaggucgacgauggauucuuggacaucuggaccuauaacgcugaacuacuggugcuccuggagaaugaaaggacgcuugacuuucacgauagcaacguuaaaaaucuguacgagaagguaaaaucacaauugaagaacaaugccaaggaaauaggcaacgggugcuucgaguuuuaucauaaauguaauaacgagugcauggaaagugugaagaauggaaccuacgacuaucccaaauacuccgaggaaagcaagcucaaccgggagaaaauugauggugucaagcuggagucuaugggcguguaucagaucuuagcuaucuacucaacagucgccaguagccuggugcuacucguuucccugggggcaauuucuuucuggaugugcucgaauggaagccuucagugucguaucugcauuuga

SEQ ID NO: 128836 - RNA, 1698 nt, Artificial Sequence; identical to SEQ ID NO: 128790
  derived and/or modified CDS sequence (opt3) from hemagglutinin__InfluenzaA__ABD77939

SEQ ID NO: 128837 - RNA, 1698 nt, Artificial Sequence; identical to SEQ ID NO: 128790
  derived and/or modified CDS sequence (opt3) from hemagglutinin__InfluenzaA__ABD77950

SEQ ID NO: 128838 - RNA, 1698 nt, Artificial Sequence; identical to SEQ ID NO: 128789
  derived and/or modified CDS sequence (opt3) from hemagglutinin__InfluenzaA__ABD77961

SEQ ID NO: 128839 - RNA, 1698 nt, Artificial Sequence; identical to SEQ ID NO: 128790
  derived and/or modified CDS sequence (opt3) from hemagglutinin__InfluenzaA__ABD77983

SEQ ID NO: 128840 - RNA, 1698 nt, Artificial Sequence; identical to SEQ ID NO: 128790
  derived and/or modified CDS sequence (opt3) from hemagglutinin__InfluenzaA__ABD77994

SEQ ID NO: 128841 - RNA, 1698 nt, Artificial Sequence; identical to SEQ ID NO: 128789
  derived and/or modified CDS sequence (opt3) from hemagglutinin__InfluenzaA__ABD78005

SEQ ID NO: 128842 - RNA, 1698 nt, Artificial Sequence; identical to SEQ ID NO: 128789
  derived and/or modified CDS sequence (opt3) from hemagglutinin__InfluenzaA__ABD78016

SEQ ID NO: 128843 - RNA, 1698 nt, Artificial Sequence; identical to SEQ ID NO: 128790
  derived and/or modified CDS sequence (opt3) from hemagglutinin__InfluenzaA__ABD78027

SEQ ID NO: 128844 - RNA, 1698 nt, Artificial Sequence; identical to SEQ ID NO: 128790
  derived and/or modified CDS sequence (opt3) from hemagglutinin__InfluenzaA__ABD78038

SEQ ID NO: 128845 - RNA, 1701 nt, Artificial Sequence; identical to SEQ ID NO: 128825
  derived and/or modified CDS sequence (opt3) from hemagglutinin__InfluenzaA__ABD78049

SEQ ID NO: 128846 - RNA, 1698 nt, Artificial Sequence; identical to SEQ ID NO: 128344
  derived and/or modified CDS sequence (opt3) from hemagglutinin__InfluenzaA__ABD78060

SEQ ID NO: 128847 - RNA, 1698 nt, Artificial Sequence
  derived and/or modified CDS sequence (opt3) from hemagglutinin__InfluenzaA__ABD78071
augaaggccaaacugcucgugcuucugugcaccuucacagcuacuuacgcagacacgaucuguauuggcuaucacgccaacaauagcaccgauacagucgacacuguuuuggagaagaacgugaccguaacacauuccgugaauuuacuggaagauucucacaacgggaaacuaugccuccugaagggaauagcgccccuucagcuggguaauuguucagucgcuggcuggaucuuggggaacccugagugcgaacuccugauuaguaaagagagcugguccuacaucguggaaaccccaaauccggagaacggaacuuguuaucccggcuacuuugccgacuaugaggaacugagagagcaacucucuucgguuagcucauucgaaagguuugagauuuucccuaaggguaguuccuggccaaaucauacagugaccggggucucugcaagcugcucccacaacggaaagucaaguuuuuaccggaauuuacuguggcuuacgggcaaaaacggcuuguaucccaaucugagcaugucuuacgugaacaauaaggagaaagaaguacuuguucucuggggagugcaucacccuccaaacaucggggaucagcgcgcccuguaccacacugagaacgcuuaugucuccguggugucaagccauuacagucgacguuucacccccgaaauagcaaagagaccuaaagucagggaccaggagggucggaucaauuauuacuggacacuucuggaaccaggcgauacuauuaucuuugaggccaacgggaauuugauugcuccgugguaugccuucgcgcucucuggaggcuuugguuccgggaucauaaccagcaacgcacccaugggagagugugacgccaagugccagacaccucaaggcgcuauuaauucgucucugccauuccagaacguucaccccgugaccaucggcgaauguccuaaguacguacgcuccgccaaauuaagaauggugacggggcugaggaauauuccaucaauccagagucggggacucuuuggugcaaucgcuggcuucauugaagggggauggacuggcauggucgaugguugguauggguaccaucaccagaacgaacaaggcagcggauacgccgcggaccagaaguccacacagaaugccauaaacggcaucaccaauaaagugaacucuguuauugagaagaugaauacucaguuuacagcaguggggaaagaguucaacaagcuagagcgccgaauggagaaucugaacaaaaaggucgaugacggauucuuggauaucuggaccuauaacgcugaacuacuggugcuccuggagaaugaaagaacgcuugacuuucacgacagcaacguaaagaaucuguacgagaaaguuaagucacaauugaaaaacaaugccaaggaaauagguaacggcugcuucgaguuuuaucauaaauguaauaacgagugcauggaaagugugaagaaugggaccuacgauuaucccaaguacuccgaggaaagcaaacucaacagggagaagauugacggagucaaacuggagucuaugggcguguaucagaucuuagcuaucuacucaacagucgccaguagccuggugcuacucguuucccugggugcaauuucuuucuggaugugcucgaaugggagccuucagugucggaucugcauuuga

SEQ ID NO: 128848 - RNA, 1698 nt, Artificial Sequence
  derived and/or modified CDS sequence (opt3) from hemagglutinin__InfluenzaA__ABD78093
augaaggccaaacugcucgugcuucugugcaccuucacagcuacuuacgcagacacgaucuguauuggcuaucacgccaacaauagcaccgauacagucgacacuguuuuggagaagaacgugaccguaacacauuccgugaauuuacuggaagauucucacaacgggaaacuaugccuccugaagggaauagcgccccuucagcuggguaauuguucagucgcuggcuggaucuuggggaacccugagugcgaacuccugauuaguaaagagagcugguccuacaucguggaaaccccaaauccggagaacggaacuuguuaucccggcuacuuugccgacuaugaggaacugagagagcaacucucuucgguuagcucauucgaaagguuugagauuuucccuaaggguaguuccuggccaaaucauacagugaccggggucucugcaagcugcucccacaacggaaagucaaguuuuuaccggaauuuacuguggcuuacgggcaaaaacggcuuguaucccaaucugagcaugucuuacgugaacaauaaggagaaagaaguacuuguucucuggggagugcaucacccuccaaacaucggggaucagcgcgcccuguaccacacugagaacgcuuaugucuccguggugucaagccauuacagucgacguuucacccccgaaauagcaaagagaccuaaagucagggaccaggagggucggaucaauuauuacuggacacuucuggaaccaggcgauacuauuaucuuugaggccaacgggaauuugauugcuccgugguaugccuucgcgcucucucgcggauuuggcuccgguaucauaaccagcaacgcacccaugggggagugugacgccaagugccagacaccucaaggagcuauuaauucgucucugccauuccagaacguucaccccgugaccaucggcgaauguccuaaguacguaagauccgccaaauuaaggauggugacgggccugcggaauauuccaucaauccagagucgcgggcucuuuggagcaaucgcugguuucauugagggcggguggacuggaauggucgauggcugguaugguuaccaucaccagaacgaacaagggagcggcuacgccgcggaccagaaguccacacagaaugccauaaacggaaucaccaauaaagugaacucuguuauugagaagaugaauacucaguuuacagcagugggcaaagaguucaacaagcuagaacgaagaauggagaaucugaacaaaaaggucgaugacggguucuuggauaucuggaccuauaacgcugaacuacuggugcuccuggagaaugaaaggacgcuugacuuucacgacagcaacguaaagaaucuguacgagaaaguuaagucacaauugaaaaacaaugccaaggaaauaggaaacgguugcuucgaguuuuaucauaaauguaauaacgagugcauggaaagugugaagaauggcaccuacgauuaucccaaguacuccgaggaaagcaaacucaaccgggagaagauugacggggucaaacuggagucuaugggaguguaucagaucuuagcuaucuacucaacagucgccaguagccuggugcuacucguuucccugggcgcaauuucuuucuggaugugcucgaaugguagccuucagugucguaucugcauuuga

SEQ ID NO: 128849 - RNA, 1701 nt, Artificial Sequence
  derived and/or modified CDS sequence (opt3) from hemagglutinin__InfluenzaA__ABD78115
augaagaccaucauugcccugagcuacauacucugccuuguguucgcucagaaacugcccggcaacgacaauuccacagcaacuuuguguuuagggcaccaugccgucccuaacggaacgcugguuaagaccaucacaaaugaucaaauugaggugacuaacgcgaccgagcuaguacagucuucaaguacagguagaaucugcgacagcccacacaggauucucgauggcaaaaauuguacccugaucgacgcucugcugggggauccgcauugcgacggauuucagaacaaggaaugggauuuguucguggaacgguccaaagccuauucugacuguuaccccuaugaugucccugacuacgcaucgcuccgcucacugguggccagcaguggcacucuggaguuuacaaaugaagguuucaacuggaccgggguugcucaggauggaacguccuaugcaugcaagcgaggcucugucaagagcuuuuucucccgucucaauugguuacacaaacuggaguacaaguauccagcccuuaacgugacuaugcccaauaacgacaaauuugauaaguuguacauauggggcgugcaucacccuucaaccgacagugaccaaacaagccuguacguacaggcuucugggagaguuacuguguccaccaaaaggucacagcagacagucaucccaaauauuggaagccggcccugggugcgcggugugaguucuagaaucuccauuuauuggaccaucgucaagccuggcgauauacuacucauuaacagcacggggaaucugaucgccccaaggggauacuucaagauucggucgggcaaaucuuccaucaugcgcucagacgcgccgaucgguaacuguaacagugagugcauuacucccaaugggagcauaccuaacgauaagccauuucaaaauguuaaccgaaucacauauggagcaugucccagauacgugaaacagaauacccuuaagcuggccacuggcaugaggaacguaccugaaaaacagacacggggcauuuucggggcuaucgccggauuuauagagaaugguugggaaggcaugguggacgggugguauggauuccgucaccagaacuccgagggcaccggucaagcagcugauuugaagucuacgcaggccgcgauuaaucagaucaacgggaaacucaaucgccugaucgagaagaccaacgaaaaguuucaucaaauugagaaagaguucagcgaagucgaaggcagaauccaggacuuagagaaguacguggaggauacaaaaauugaccuguggucauauaaugccgaacuccuuguugcacuggagaaccagcacacuauagauuugaccgacagugaaaugaauaagcuauucgagaggacacggaaacagcugcgagaaaacgcugaggauaugggaaacggcugcuuuaagaucuaccauaagugugacaaugccugcauuggguccauccgcaacggaacuuacgaccacgauguguauagaaaugaggcucucaacaauagguuccaaaucaaaggugucgaacuuaagagcggcuacaaagacuggauucuuuggauaucuuuugccaucucaugcuuccuguugugugugguacuccugggguuuauuaugugggcaugccagaagggaaacauccgguguaauauuugcaucuga

SEQ ID NO: 128850 - RNA, 1701 nt, Artificial Sequence
  derived and/or modified CDS sequence (opt3) from hemagglutinin__InfluenzaA__ABD78126
augaagaccaucauugcccugagcuacauacucugccuuguguucgcucagaaacugcccggcaacgacaauuccacagcaacuuuguguuuagggcaccaugccgucccuaacggaacgcugguuaagaccaucacaaaugaucaaauugaggugacuaacgcgaccgagcuaguacagucuucaaguacagguagaaucugcgacagcccacacaggauucucgauggcaaaaauuguacccugaucgacgcucugcugggggauccgcauugcgacggauuucagaacaaggaaugggauuuguucguggaacgguccaaagccuauucugacuguuaccccuaugaugucccugacuacgcaucgcuccgcucacugguggccagcaguggcacucuggaguuuacaaaugaagguuucaacuggaccgggguugcucaggauggaacguccuaugcaugcaagcgaggcucugucaagagcuuuuucucccgucucaauugguuacacaaacuggaguacaaguauccagcccuuaacgugacuaugcccaauaacgacaaauuugauaaguuguacauauggggcgugcaucacccuucaaccgacagugaccaaacaagccuguacguacaggcuucugggagaguuacuguguccaccaaaaggucacagcagacagucaucccaaauauuggaagccggcccugggugcgcggugugaguucuaucauuuccaucuauuggaccauagucaagccuggcgauauucuacucaucaacagcacggggaaucugauugccccaagaggauacuucaagaucaggucgggcaaaucuuccaucaugcggucagacgcgccgauugguaacuguaacagugagugcauaacucccaaugggagcaucccuaacgauaagccauuucaaaauguuaaccgcauuacauauggagcauguccccgauacgugaaacagaauacccuuaagcuggccacuggcaugagaaacguaccugaaaaacagacaaggggcaucuucggggcuauagccggauuuauugagaaugguugggaaggcaugguggacgggugguauggauuccggcaccagaacuccgagggcaccggucaagcagcugauuugaagucuacgcaggccgcgaucaaucagaucaacgggaaacucaaucgucugauugagaagaccaacgaaaaguuucaucaaaucgagaaagaguucagcgaagucgaaggccgcauucaggacuuagagaaguacguggaggauacaaaaauagaccuguggucauauaaugccgaacuccuuguugcacuggagaaccagcacacuaucgauuugaccgacagugaaaugaauaagcuauucgagagaacaaggaaacagcugcgggaaaacgcugaggauaugggaaacggcugcuuuaagauuuaccauaagugugacaaugccugcaucggguccauccgaaacggaacuuacgaccacgauguguaucgcgacgaggcucucaauaacagauuccaaauuaaaggugucgaacuuaagagcggcuacaaagauuggauacuuuggaucucuuuugccauuucaugcuuccuguugugugugguacuccugggguuuaucaugugggcaugccagaagggaaauauuagguguaacaucugcauauga

SEQ ID NO: 128851 - RNA, 1701 nt, Artificial Sequence
  derived and/or modified CDS sequence (opt3) from hemagglutinin__InfluenzaA__ABD79032
augaagaccaucauugcccugagcuacauauucugccucgugcuuggccaggacuuucccgggaacgauaauuccacagcuacucuguguuugggacaccaugcagucccuaacgguacguuaguuaaaaccaucacaaaugaccaaauugaggugacuaacgccaccgaacugguacagucuucaaguacaggcaagaucugcaauaacccacacaggauucuagaugggaucgacuguacccucauagaugcgcugcuuggagacccgcauugcgauggcuuccagaaugagacuugggaccuguuuguggaaagaagcaaggcuuucuccaacuguuaucccuacgaugucccugacuaugccucuuugcggucgcucguggcaucaagcgguacacuggaguuuaucagugaaggguucaccuggacgggaguuacucagaauggcggcuccaacgccugcaaacgcgggccagauauuggauuuuucucucgacugaauuggcucuacaaaagcgguuccaccuaucccguguuaaacgucacaaugccuaauaacgacaauuuugauaagcuguacaucuggggcgugcaccauccaucaacugaccaagagcagaccagucuuuauguacaggcuagcgggcguguuacagugucuaccaagagaucccagcaaacgauuauccccaacauaggaucaaggccuuggguccggggcuugagcagucgcauuucuaucuacuggacuauugugaaaccaggugacauccuggugaucaacuccaaugggaaccuaauugcaccgagaggauacuucaagaugaggacaggcaaaagcucgauaaugcggucugaugcccccaucggcaccuguauuuccgagugcaucacuccuaaugggucaauaccaaacgacaagcccuuucagaaugucaacaaaauuacauauggagcuuguccuaaguacguuaagcagaauacccucaaacuggccacggguaugcgcaacgugccagaaaagcagacccgaggccuuuucagugcgaucgcaggguuuaucgagaauggaugggaaggcaugauugaugguugguauggguucagacaccaaaacagcgagggcacaggacaggccgcugaccugaaauccacucaggccgcaaucgaucaaauuaauggcaaguugaacaggguaauagagaaaaccaaugaaaaguuccaccagaucgagaaagaauuuucugagguggaagggcggauucaggaccucgagaaguacgucgaggauacaaagaucgaccuguggagcuauaacgcugaauuacugguggcccucgagaaucagcauacuaucgaucuuaccgacucagaaaugaacaaacuguucgagaagacacgucgccaauugagagaaaacgcggaggauaugggaaaugguugcuuuaaaauuuaccacaagugugacaacgccugcauaggcaguaucaggaaugggaccuaugaccaugauguuuaccgggacgaggcacuaaacaaucgauuccagauuaaaggaguggaacugaaguccggcuacaaggauuggauccucuggauuagcuuugcuaucucuugcuuccugcuuugugucgugcuguuggguuuuauaaugugggccugccagaaagggaacauccgcuguaauauuugcaucuga

SEQ ID NO: 128852 - RNA, 1701 nt, Artificial Sequence
  derived and/or modified CDS sequence (opt3) from hemagglutinin__InfluenzaA__ABD79112
augaaggccaaacugcucauccuucugugcgcuuugagcgcaaccgacgccgauacaauuuguauaggcuaccacgcgaacaauuccacugacacgguggauaccgucuuagagaagaacguuacagugacucauucuguaaaucugcuagaagacucacacaacgggaaacucugcagacugaagggaaucgcuccccuucagcuggguaaauguaauauugccggcuggaucuuggggaacccugagugcgaaagucuccugagcaagagguccuggucuuauauugcagagaccccaaauucggaaaacggagccuguuacccgggcgauuucgcugacuaugaggagcugcgggaacaacucucaagcgugaguuccuuugagcgcuucgaaaucuuucccaagggucgaucuuggccugagcauaauauagauaucggggucacagcagccugcagccacgcuggaaaauccucauucuacaagaacuuacuguggcuuaccgagaaagacggcaguuauccaaauuugaacaagagcuacgugaauaaaaaggaaaaggagguucugauucuauggggcgugcaucaucccccuaacaucgaaaaucagaaaacucucuaucguaaggagaacgccuacgucucugugguauccucaaacuacaauagaagguuuacaccagaaauugcggagcggcccaaaguucgcgggcaggcaggaagaaucaacuauuacuggacccugcuugagccuggugauacgauaauuuucgaagccaauggcaaccugaucgcuccaugguaugccuuugcauugaauagggggauuggaagcggcaucaucaccaguaacgcuucuauggacgagugugauacuaagugccagacaccgcaaggugccauuaauuccagccuccccuuccagaacauacacccuuuuacuaucggggaauguccaaaauacgugcggucgaccaagcugcgcauggucacaggauuacgaaauauucccucuauccaguccagaggccuguucggcgcgauagccggguuuauugagggagguugggacggcaugaucgaugggugguauggauaccaccaccagaacgaacaaggcucagguuaugcagcugaccagaaaaguacccagaaugccaucaacgggauuacgaauaaggugaacagcgugaucgagaagaugaauacucaguucacagcugucggcaaagaguuuaacaagcucgagaaaaggauggaaaaccuuaauaagaaaguugacgauggauuccuggacauuuggaccuacaacgccgaauugcuagugcugcucgagaaugaacggacucuggauuuccaugacuccaacguaaagaaucuuuacgagaaggugaaaaaccaacugcguaauaacgcaaaggagauaggcaaugggugcuuugaguucuaucacaaauguaacaaugaaugcauggaaucugucaagaacggaacauacgauuauccuaaauuuagcgaggagucaaaguugaaucgcgaaaagaucgacggugugaaacucgagaguaugggcguuuaccagauucuggccaucuauuccaccguggcuagcucuuuaguccugcuagugucacucggggcgaucaguuucuggaugugcagcaacggaucccugcaguguagaauuugcauauga

SEQ ID NO: 128853 - RNA, 1701 nt, Artificial Sequence
  derived and/or modified CDS sequence (opt3) from hemagglutinin__InfluenzaA__ABD79123
augaagaccaucauugcccugagcuacauacucugccuuguguucgcucagaaacugcccggcaacgacaauuccacagcaacuuuguguuuagggcaccaugccgucccuaacggaacgcugguuaagaccaucacaaaugaucaaauugaggugacuaacgcgaccgaauugguacagucuucaaguacagguagaaucugcgacagcccacaccagauucucgauggcaaaaauuguacccugaucgacgcccuucugggggauccgcauugcgacggauuucagaacaaggagugggauuuguucguggaaagguccacugcuuauucuaauuguuaccccuaugacgucccugauuacgcaucgcuccggucacugguggccagcaguggcacacuggaguuuaccaaagaagguuucaacuggacggggguugcucaagacggaacuuccuaugcaugcaagcgcggcucugucaagagcuuuuucucccgacucaauugguuacacaaacuggaguacaaguauccagcccuuaacgugaccaugcccaauaacgauaaauuugacaaguuguacauauggggcgugcaucacccuucaacagauagugaccagacuagccuguacguacaggcuucugggcguguuaccguguccacaaaaagaucacagcaaaccgucaucccaaauauuggaagcaggcccugggugcggggugugaguucucgcaucuccauuuauuggacgaucgucaagccuggcgacauacuacucauuaacagcacugggaaucugaucgccccaagaggauacuucaagauuaggucgggcaaaucuuccaucaugcggucagaugcgccgaucgacaacuguaacagugagugcauuacacccaaugguagcauauccaacgauaagccuuuucagaauguuaaccgcaucaccuauggggcauguccacgauacgugaaacagaauacucuuaagcuggccacaggaaugagaaacguacccgaaaaacagaccaggggcauuuucggcgcuaucgccggguuuauagagaauggaugggaagguaugguggacggcugguauggguuccggcaccaaaacucugagggaacgggccaggcagcugaucuaaagagcacccaggccgcgauuaaucaaaucaacgguaaacucaaucgucugaucgagaagacaaacgaaaaguuucaucagauugagaaagaguucucagaagucgaagggcgcauccaggacuuagagaaguacguggaggauacuaaaauugaccuguggaguuauaaugccgaacuccuuguugcacuggagaaccagcacaccauagauuugacagacuccgaaaugaauaagcuauucgagagaacuaggaaacaacugcgggaaaacgcugaggauaugggcaacggaugcuuucgaaucuaccauaagugugacaaugccugcauuggcagcauccgcaacgggaccuacgaccacgauguguauagagacgaggcucucaauaacagguuccagaucaagggagucgaacugaaaucugguuacaaggauuggauucuuuggauaucauuugccaucaguugcuuccuguugugugugguacuccugggcuuuauuaugugggcaugccagaaagggaauauccgguguaacauuugcaucuga

SEQ ID NO: 128854 - RNA, 1701 nt, Artificial Sequence
  derived and/or modified CDS sequence (opt3) from hemagglutinin__InfluenzaA__ABD79134
augaagaccaucauugcccugagcuacauacucugccuuguguucgcucagaaacugcccggcaacgacaauuccacagcaacuuuguguuuagggcaccaugccgucccuaacggaacgcugguuaagaccaucacaaaugaucaaauugaggugacuaacgcgaccgaacuuguacagucuucaaguacagguagaaucugcgacagcccacaccagauucucgauggcaaaaauuguacccugaucgacgcucuacugggggauccgcauugcgacggauuucagaacaagaaaugggauuuguucguggagagguccacugccuauucuaauuguuaccccuaugacgucccugauuacgcaucgcuccggucacugguggccagcaguggcacacuggaauuuaccaaggaggguuucaacuggacggggguugcucaagacggaacuuccuaugcaugcaagcgcggcucugugaaauccuuuuucagccgacucaauugguuacacaagcuggaauacaaauauccagcccuuaacgucaccaugcccaauaacgauaaguuugacaaauuguacauauggggcgugcaucacccuucaacagauagugaccagacuagccuguacguacaggcuucugggcguguuaccguguccacaaagagaucacagcaaaccgucaucccaaauauuggaagcaggcccugggugcggggugugaguucucgcaucuccauuuauuggacgaucgucaagccuggcgacauacuacucauuaacagcacugggaaucugaucgccccaagaggauacuucaaaauuaggucgggcaagucuuccaucaugcggucagaugcgccgaucgacaacuguaacagugagugcauuacacccaaugguagcauauccaacgauaaaccuuuucagaauguuaaccgcaucaccuauggggcauguccacgauacgugaagcagaauacucuuaaacuggccacaggaaugagaaacguacccgagaagcagaccaggggcauuuucggcgcuaucgccggguuuauagaaaauggaugggaggguaugguggacggcugguauggguuccggcaccaaaacucugaaggaacgggccaggcagcugauuugaaaagcacccaggccgcgauuaaucaaaucaacgguaagcucaaucgucugaucgagaagacaaacgagaaauuucaucagauugaaaaggaguucucagaagucgaggggcgcauccaggacuuagaaaaauacguggaggauacuaagauugaccuguggaguuauaaugccgagcuccuuguugcacuggaaaaccagcacaccauagauuugacagacuccgagaugaauaaacuauucgaaagaacuaggaagcaacugcgggagaacgcugaagauaugggcaacggaugcuuuaagaucuaccauaaaugugacaaugccugcauuggcagcauccgaaacgggaccuacgaccacgauguguaucgcgacgaggcucucaauaacagauuccagaucaagggagucgagcugaaaucugguuacaaggauuggauucuuuggauaucauuugccaucaguugcuuccuguugugugugguacuccugggcuuuauuaugugggcaugccagaaagggaauaucagguguaacauuugcaucuga

SEQ ID NO: 128855 - RNA, 1701 nt, Artificial Sequence
  derived and/or modified CDS sequence (opt3) from hemagglutinin__InfluenzaA__ABD79145
augaagaccaucauugcccugagcuacauacucugccuuguguucgcucagaaacugcccggcaacgacaauuccacagcaacuuuguguuuagggcaccaugccgucccuaacggaacgcugguuaagaccaucacaaaugaucaaauugaggugacuaacgcgaccgaauugguacagucuucaaguacagguagaaucugcgacagcccacaccagauucucgauggcaaaaauuguacccugaucgacgcccuucugggggauccgcauugcgacggauuucagaacaaggagugggauuuguucguggaaagguccacugcuuauucuaauuguuaccccuaugacgucccugauuacgcaucgcuccggucacugguggccagcaguggcacacuggaguuuaccaaagaagguuucaacuggacggggguugcucaagacggaacuuccuaugcaugcaagcgcggcucugucaagagcuuuuucucccgacucaauugguuacacaaacuggaguacaaguauccagcccuuaacgugaccaugcccaauaacgauaaauuugacaaguuguacauauggggcgugcaucacccuucaacagauagugaccagacuagccuguacguacaggcuucugggcguguuaccguguccacaaaaagaucacagcaaaccgucaucccaaauauuggaagcaggcccugggugcggggugugaguucucgcaucuccauuuauuggacgaucgucaagccuggcgacauacuacucauuaacagcacugggaaucugaucgccccaagaggauacuucaagauuaggucgggcaaaucuuccaucaugcggucagaugcgccgaucgacaacuguaacagugagugcauuacacccaaugguagcauauccaacgauaagccuuuucagaauguuaaccgcaucaccuauggggcauguccacgauacgugaaacagaauacucuuaagcuggccacaggaaugagaaacguacccgaaaaacagaccaggggcauuuucggcgcuaucgccggguuuauagagaauggaugggaagguaugguggacggcugguauggguuccggcaccaaaacucugagggaacgggccaggcagcugaucuaaagagcacccaggccgcgauuaaucaaaucaacgguaaacucaaucgucugaucgagaagacaaacgaaaaguuucaucagauugagaaagaguucucagaagucgaagggcgcauccaggacuuagagaaguacguggaggauacuaaaauugaccuguggaguuauaaugccgaacuccuuguugcacuggagaaccagcacaccauagauuugacagacuccgaaaugaauaagcuauucgagagaacuaggaaacaacugcgggaaaacgcugaggauaugggcaacggaugcuuuaagaucuaccauaagugugacaaugccugcauuggcagcauccgaaacgggaccuacgaccacgauguguaucgcgacgaggcucucaauaacagauuccagaucaaaggagucgaacugaagucugguuacaaagauuggauucuuuggauaucauuugccaucaguugcuuccuguugugugugguacuccugggcuuuauuaugugggcaugccagaaggggaauaucagguguaacauuugcaucuga

SEQ ID NO: 128856 - RNA, 1701 nt, Artificial Sequence; identical to SEQ ID NO: 128855
  derived and/or modified CDS sequence (opt3) from hemagglutinin__InfluenzaA__ABD79156

SEQ ID NO: 128857 - RNA, 1701 nt, Artificial Sequence; identical to SEQ ID NO: 128071
  derived and/or modified CDS sequence (opt3) from hemagglutinin__InfluenzaA__ABD79167

SEQ ID NO: 128858 - RNA, 1701 nt, Artificial Sequence; identical to SEQ ID NO: 128855
  derived and/or modified CDS sequence (opt3) from hemagglutinin__InfluenzaA__ABD79178

SEQ ID NO: 128859 - RNA, 1701 nt, Artificial Sequence
  derived and/or modified CDS sequence (opt3) from hemagglutinin__InfluenzaA__ABD79189
augaagaccaucauugcccugagcuacauacucugccuuguguucgcucagaaacugcccggcaacgacaauuccacagcaacuuuguguuuagggcaccaugccgucccuaacggaacgcugguuaagaccaucacaaaugaucaaauugaggugacuaacgcgaccgaacuuguacagucuucaaguacagguagaaucugcgacagcccacaccagauucucgauggcaaaaauuguacccugaucgacgcucuacugggggauccgcauugcgacggauuucagaacaaggagugggauuuguucguggaaagguccacugccuauucuaauuguuaccccuaugacgucccugauuacgcaucgcuccggucacugguggccagcaguggcacacuggaguuuaccaaagaagguuucaacuggacggggguugcucaagacggaacuuccuaugcaugcaagcgcggcucugucaagagcuuuuucucccgacucaauugguuacacaaacuggaguacaaguauccagcccuuaacgugaccaugcccaauaacgauaaauuugacaaguuguacauauggggcgugcaucacccuucaacagauagugaccagacuagccuguacguacaggcuucugggcguguuaccguguccacaaaaagaucacagcaaaccgucaucccaaauauuggaagcaggcccugggugcggggugugaguucucgcaucuccauuuauuggacggucguuaagccuggcgacauccuacucauaaacagcacugggaaucugauugccccaagaggauacuucaagaucaggucgggcaaaucuuccauuaugcggucagaugcgccgaucgacaguuguaacagcgagugcaucacacccaacgguuccauuucuaaugauaagccuuuucagaacgugaaucgcauaaccuauggggcauguccacgauacguaaaacagaacacucuuaagcuggccacaggaaugagaaaugugcccgaaaaacagaccaggggcaucuucggcgcuauugccggguuuaucgagaacggaugggaagguauggucgacggcugguauggguuccggcaccaaaauagcgagggaacgggccaggcagcugauuugaagucaacccaggccgcgauaaaccaaauuaaugguaaacucaaccgucugaucgagaagacaaaugaaaaguuucaucagaucgagaaagaguucagugaaguggaagggcgcauucaggacuuagagaaguacguugaggauacuaaaaucgaccugugguccuauaacgccgaacuccuuguggcacuggagaaucagcacaccauugauuugacagacagcgaaaugaacaagcuauucgagagaacuaggaaacaacugcgggaaaaugcugaggauaugggcaacggaugcuuuaagauauaccauaagugugacaacgccugcaucggcucuauucgaaaugggaccuacgaccacgaugucuaucgcgacgaggcucucaacaauagauuccagaucaaaggaguggaacugaagucagguuacaaagauuggauccuuuggauuaguuuugccauaagcugcuuccuguuguguguaguucuccugggcuuuaucaugugggcaugccagaaggggaacauuagguguaauaucugcauuuga

SEQ ID NO: 128860 - RNA, 1701 nt, Artificial Sequence; identical to SEQ ID NO: 128855
  derived and/or modified CDS sequence (opt3) from hemagglutinin__InfluenzaA__ABD79200

SEQ ID NO: 128861 - RNA, 1701 nt, Artificial Sequence
  derived and/or modified CDS sequence (opt3) from hemagglutinin__InfluenzaA__ABD79211
augaagaccaucauugcccugagcuacauacucugccuuguguucgcucagaaacugcccggcaacgacaauuccacagcaacuuuguguuuagggcaccaugccgucccuaacggaacgcugguuaagaccaucacaaaugaucaaauugaggugacuaacgcgaccgaauugguacagucuucaaguacagguagaaucugcgacagcccacaccagauucucgauggcaaaaauuguacccugaucgacgcccuucugggggauccgcauugcgacggauuucagaacaaggagugggauuuguucguggaaagguccacugcuuauucuaauuguuaccccuaugacgucccugauuacgcaucgcuccggucacugguggccagcaguggcacacuggaguuuaccaaagaagguuucaacuggacggggguugcucaagacggaacuuccuaugcaugcaagcgcggcucugucaagagcuuuuucucccgacucaauugguuacacaaacuggaguacaaguauccagcccuuaacgugaccaugcccaauaacgauaaauuugacaaguuguacauauggggcgugcaucacccuucaacagauagugaccagacuagccuguacguacaggcuucugggcguguuaccguguccacaaaaagaucacagcaaaccgucaucccaaauauuggaagcaggcccuggauccggggugugaguucucgcauuuccaucuauuggacgauagugaagccuggcgacauucuacucaucaacagcacugggaaucugauugccccaagaggauacuucaagaucaggucgggcaaaucuuccaucaugcggucagaugcgccgauugacaacuguaacagugagugcauaacacccaaugguagcaucuccaacgauaagccuuuucagaaugucaaccgcauuaccuauggggcauguccacgauacguuaaacagaauacucuuaagcuggccacaggaaugagaaacgugcccgaaaaacagaccaggggcaucuucggcgcuauagccggguuuauugagaauggaugggaagguaugguagacggcugguauggguuccggcaccaaaacucugagggaacgggccaggcagcugaucuaaagagcacccaggccgcgaucaaucaaaucaacgguaaacucaaucgucugauugagaagacaaacgaaaaguuucaucagaucgagaaagaguucucagaaguggaagggcgcauucaggacuuagagaaguacgucgaggauacuaaaauagaccuguggaguuauaaugccgaacuccuuguggcacuggagaaccagcacaccaucgauuugacagacuccgaaaugaauaagcuauucgagagaacuaggaaacaacugcgggaaaacgcugaggauaugggcaacggaugcuuuaagauuuaccauaagugugacaaugccugcaucggcagcauccgaaacgggaccuacgaccacgauguuuaucgcgacgaggcucucaauaacagauuccagauuaaaggaguggaacugaagucugguuacaaagauuggauacuuuggaucucauuugccauuaguugcuuccuguugugugucgugcuccugggcuuuaucaugugggcaugccagaaggggaauauuagguguaacaucugcauauga

SEQ ID NO: 128862 - RNA, 1701 nt, Artificial Sequence; identical to SEQ ID NO: 128071
  derived and/or modified CDS sequence (opt3) from hemagglutinin__InfluenzaA__ABD79222

SEQ ID NO: 128863 - RNA, 1701 nt, Artificial Sequence; identical to SEQ ID NO: 128071
  derived and/or modified CDS sequence (opt3) from hemagglutinin__InfluenzaA__ABD79233

SEQ ID NO: 128864 - RNA, 1701 nt, Artificial Sequence
  derived and/or modified CDS sequence (opt3) from hemagglutinin__InfluenzaA__ABD79244
augaagaccaucauugcccugagcuacauacucugccuuguguucgcucagaaacugcccggcaacgacaauuccacagcaacuuuguguuuagggcaccaugccgucccuaacggaacgcugguuaagaccaucacaaaugaucaaauugaggugacuaacgcgaccgaacugguacagucuucaaguacagguagaaucugcgacagcccacaccagauucucgauggcaaaaauuguacccugaucgacgcccuucugggggauccgcauugcgacggauuuaagaacaaagagugggauuuguucguggaaagguccacugcuuauucuaauuguuaccccuaugacgucccugauuacgcaucgcuccggucacugguggccagcaguggcacacuggaguuuaccaacgaagguuucaauuggacggggguugcucaggacggaacuuccuaugcaugcaagcgcggcucugugaaguccuuuuucucccgacucaacugguuacacaaacuggaguacaaguauccagcccuuaaugucaccaugcccaacaaugauaaauuugacaaguuguacauauggggcgugcaucacccuucaacagauagugaccaaacuagccuguacguacaggcuucugggcguguuaccguguccacaaaaagaucacagcagaccgucaucccaaacauuggaagcaggcccugggugcggggugugaguucucgcaucuccauuuauuggacgaucgucaagccuggcgacauacuacucauuaauagcacugggaaccugaucgccccaagaggauacuucaagauuaggucgggcaaaucuuccaucaugcggucagaugcgccgaucgacaacuguaauagugagugcauuacacccaacgguagcauaccuaaugauaagccauuucaaaacguuaaucgcaucaccuauggggcauguccccgauacgugaaacagaacacucuuaagcuggccacaggaaugagaaauguaccugaaaaacagaccaggggcauuuucggcgcuaucgccggguuuauagagaacggaugggaagguaugguggacggcugguauggguuccggcaccagaauagcgagggaacgggccaagcagcugauuugaagucuacccaggccgcgauuaaccagaucaaugguaaacucaaccgucugaucgagaagacaaaugaaaaguuucaucaaauugagaaagaguucagcgaagucgaagggcgcauccaggacuuagagaaguacguggaggauacuaaaauugaccuguggucauauaacgccgaacuccuuguugcacuggagaaucagcacaccauagauuugacagacagugaaaugaacaagcuauucgagagaacuaggaaacagcugcgggaaaacgcugaggauaugggcaauggaugcuuuaagaucuaccauaagugugacaacgccugcauuggcuccauccgaaaugggaccuacgaccacgauguguaucgcgacgaggcucucaacaauagauuccaaaucaaaggagucgaacuaaagagcgguuacaaagauuggauucuuuggauaucuuuugccaucucaugcuuccuguugugugugguacuccugggcuuuauuaugugggcaugccagaaggggaacaucagguguaauauuugcaucuga

SEQ ID NO: 128865 - RNA, 1701 nt, Artificial Sequence; identical to SEQ ID NO: 128291
  derived and/or modified CDS sequence (opt3) from hemagglutinin__InfluenzaA__ABD94734

SEQ ID NO: 128866 - RNA, 1701 nt, Artificial Sequence; identical to SEQ ID NO: 128678
  derived and/or modified CDS sequence (opt3) from hemagglutinin__InfluenzaA__ABD94745

SEQ ID NO: 128867 - RNA, 1701 nt, Artificial Sequence
  derived and/or modified CDS sequence (opt3) from hemagglutinin__InfluenzaA__ABD94767
augaagaccaucauugcccugagcuacauacucugccuuguguucgcucagaaacugcccgucaacgacaauuccacagcaacuuuguguuuaggccaccaugccguuccuaacgggacgcuggugaagaccaucacaaaugauaacauugagguaacuaaugcgaccgaacuugugcaaucuucaaguacaggaagaaucugcgacagcccacaccagauucucgauggugagaacuguacccugaucgacgcucuacugggcgauccgcauugcgacggguuucagaauaaagaaugggauuuguucgucgagagguccacugccuauucuaacuguuaccccuaugacgugccugauuacgcaucgcuccggucacugguugccagcaguggaacacuggaauuuaauaacgaguccuucaauuggaccggcguggaccagaacgguacgucuagcgcuugcaagcgccgauccaauaaaucauuuuucagucgucucaacugguuacaccaacugaaguauaaguacccagcacuuaaugucacuaugcccaacaacgagaaauuugauaaguuguauauauggggagugcaucacccuagcaccgacucugaucagaucucccuguacgcccaggcuucagggagaguaacaguuagcacuaaaaggagucagcaaaaugugauuccaaacaucggcucucggcccuggguccgcggcguguccagcagaauuucgaucuacuggaccauagugaagccuggggacauucuacucaucaauucuacaggaaaccugauugccccaagggguuauuucaaaauccgguccggcaagucaaguaucaugcgcagcaaugcgccgauugggaaguguaacuccgaaugcauaacccccaauggaucuaucccuaacgacaaaccauuucagaaugucaaccgaauuacguacggcgcaugucccagauauguuaagcagaauacucuuaaacuggccacagguaugaggaacgugccugagaagcagacccgggggaucuucggagcuauagccggcuuuauugaaaauggcugggaggggaugguagauggaugguacgguuuccgucaccaaaacagcgagggcacugggcaggcagcugacuugaaaucaacacaggccgcgaucaaucaaaucaacggaaagcucaaccgccugauugagaaaaccaaugaaaaguuucaucagaucgaaaaggaguucagugaaguggagggcaggauucaggauuuagagaaauaugucgaagacacgaagauagaucugugguccuacaacgccgagcuccuuguggcacuggaaaaucagcacaccaucgacuugacagauagcgagaugaacaaacuauucgaaagaacucggaagcaacugcgagagaaugcugaggacauggguaacgggugcuuuaaaauuuaucauaagugugauaaugccugcaucggcucuauccgcaacggaaccuacgaccacgauguuuacagagacgaagcucucaauaacagguuccagauuaagggcguggagcugaaaucaggguauaaggacuggauacuuuggaucaguuuugccauuagcugcuuccuguugugugucgugcuccugggauuuaucaugugggcaugccagaaagguaauauucgguguaacaucugcauauga

SEQ ID NO: 128868 - RNA, 1698 nt, Artificial Sequence; identical to SEQ ID NO: 128848
  derived and/or modified CDS sequence (opt3) from hemagglutinin__InfluenzaA__ABD94778

SEQ ID NO: 128869 - RNA, 1698 nt, Artificial Sequence; identical to SEQ ID NO: 128848
  derived and/or modified CDS sequence (opt3) from hemagglutinin__InfluenzaA__ABD94789

SEQ ID NO: 128870 - RNA, 1701 nt, Artificial Sequence
  derived and/or modified CDS sequence (opt3) from hemagglutinin__InfluenzaA__ABD94822
augaagaccaucauugcccugagcuacauacucugccuuguguucgcucagaaaauccccggcaacgacaauuccacagcaacucuguguuuggggcaccaugccgucccuaacggaacguuaguuaagaccauuacaaaugaucaaaucgaggugacuaacgcgaccgaacugguacagucuucaaguacagguagaauuugcgacagcccacacaggauccuagauggcgagaauuguacccucauagacgcucugcuuggggauccgcauugcgacggauuucagaacaaagaaugggaucuguucguggagcgguccaaggccuauucuaauuguuaccccuaugacgucccugauuacgcaucguugcgcucacucguggccagcaguggcacucuggaauuuaacaaugaguccuucaacuggacagguguugcucagaaugggaccucuuaugcaugcaaacgaagcuccaucaagucauuuuucagucgucugaacuggcuccaccaauuaaaguacaaauauccagcccugaaugugacgaugcccaacaaugacaaguuugauaaacuuuacauuuggggaguccaucacccuagcacugacucugaucagaccuccuuguacgcucaggccucaggcagagugacaguaagcacuaagaggagucagcaaaccguuaucccaaacauuggcucucggcccugggugcgcggggucuccagcagaaucucgauauauuggacaauugugaaaccuggagacauccugcuaauuaacucuaccgguaaucucaucgcgccaaggggcuacuucaagauccgguccgggaagucaaguauuaugcgcagcgacgcaccgauaggaaaauguaacuccgagugcaucacgcccaauggcucuauuccuaacgauaagccauuucagaaugugaaccgaaucacuuauggugccugucccagauacgucaaacagaauacacugaaacuugcuaccgggaugaggaacguuccugaaaagcagacucggggaauauucggcgccauugcaggcuuuaucgagaaugggugggaaggaaugguggacgguugguauggcuuccgucaccaaaacagcgaggggacaggacaggcugccgaucugaagucaacccaggcggccaucaaucaaauuaacggcaaauugaaucgccucaucgagaagacgaacgaaaaguuucaucagauugagaaagaguucagugaaguagaagguagaauacaggaccuggagaaguacguggaggauaccaaaaucgacuuaugguccuauaaugcagaacugcucgucgcucuugagaaccagcacacaauugaucugacugacagcgaaaugaacaaguuguucgagaggacccggaaacaacuacgagaaaaugccgaggauauggggaacggcugcuuuaagaucuaccauaagugugacaaugcuugcaucggaucuauucgcaacggcacauacgaucacgacguguauagagacgaggcccugaauaacagguuccagauaaaagggguugaacucaagucaggauacaaagauuggauccuguggauuaguuuugcaaucagcugcuuccuucuguguguggucuugcucgguuuuauuaugugggccugccagaagggcaauauccgguguaacauaugcaucuga

SEQ ID NO: 128871 - RNA, 1701 nt, Artificial Sequence
  derived and/or modified CDS sequence (opt3) from hemagglutinin__InfluenzaA__ABD94833
augaagaccaucauugcccugagcuacauacucugccuuguguucgcucagaaacugcccggcaacgacaauuccacagcaacuuuguguuuagggcaccaugccgucccuaacggaacgcugguuaagaccaucacaaaugaucaaauugaggugacuaacgcgaccgagcuaguacagucuucaaguacagguagaaucugcgacagcccacacaggauucucgauggcaaaaauuguacccugaucgacgcucugcugggggauccgcauugcgacggauuucagaacaaggaaugggauuuguucguggaacgguccaaagccuauucugacuguuaccccuaugaugucccugacuacgcaucgcuccgcucacugguggccagcaguggcacucuggaguuuacaaaugaagguuucaacuggaccgggguugcucaggauggaacguccuaugcaugcaagcgaggcucugucaagagcuuuuucucccgucucaauugguuacacaaacuggaguacaaguauccagcccuuaacgugacuaugcccaauaacgacaaauuugauaaguuguacauauggggcgugcaucacccuucaaccgacagugaccaaacaagccuguacguacaggcuucugggagaguuacuguguccaccaaaaggucacagcagacagucaucccaaauauuggaagccggcccugggugcgcggugugaguucuagaaucuccauuuauuggaccaucgucaagccuggcgauauacuacucauuaacagcacggggaaucugaucgccccaaggggauacuucaagauucggucgggcaaaucuuccaucaugcgcucagacgcgccgaucgguaacuguaacagugagugcauuacucccaaugggagcauaccuaacgauaagccauuucaaaauguuaaccgaaucacauauggagcaugucccagauacgugaaacagaauacccuuaagcuggccacuggcaugaggaacguaccugaaaaacagacacggggcauuuucggggcuaucgccggauuuauagagaaugguugggaaggcaugguggacgggugguauggauuccgucaccagaacuccgagggcaccggucaagcagcugauuugaagucuacgcaggccgcgauuaaucagaucaacgggaaacucaaucgccugaucgagaagaccaacgaaaaguuucaucaaauugagaaagaguucagcgaagucgaaggcagaauccaggacuuagagaaguacguggaggauacaaaaauugaccuguggucauauaaugccgaacuccuuguugcacuggagaaccagcacacuauagauuugaccgacagugaaaugaauaagcuauucgagaggacacggaaacagcugcgagaaaacgcugaggauaugggaaacggcugcuuuaagaucuaccauaagugugacaaugccugcauuggguccauccgcaacggaacuuacgaccacgauguguauagagacgaggcucucaauaacagguuccaaaucaaaggugucgaacuuaagagcggcuacaaagauuggauucuuuggauaucuuuugccaucucaugcuuccuguugugugugguacuccugggguuuauuaugugggcaugccagaagggaaauauccgguguaacauuugcaucuga

SEQ ID NO: 128872 - RNA, 1701 nt, Artificial Sequence
  derived and/or modified CDS sequence (opt3) from hemagglutinin__InfluenzaA__ABD94844
augaagaccaucauugcccugagcuacauacucugcaugguguucgcucagaaacuucccggcaacgacaauuccacagcaacucuguguuuggggcaccaugccgucccuaacggaacguuaguuaagaccaucacaaaugaucaaauugaggugacuaacgcgaccgaacugguacagucuucaaguacagguagaaucugcgacagcccacacaggauucuagauggcaaaaauuguacccucaucgacgcucugcuuggggauccgcauugcgacggauuucagaacaaggagugggaucuguucguggaacgguccaaagccuauucuaauuguuaccccuaugacgucccugauuacgcaucguugcgcucacucguggccagcaguggcacucuggaguuuaacaaugaauccuucaacuggacagguguugcucagaaugggaccucuuaugcaugcaagcgacguagcgugaaguccuuuuucucaagacugaacuggcuccacaaauuagaguacaaguauccagcccugaaugucacgaugcccaacaaugacaaauuugauaagcuguacauauggggagugcaucacccuaguacugacagcgaucaaaccucuuuguacguacaggcuuccggcaggguuacagugucaacuaaacggagccagcagaccgucaucccaaacauuggcagucgccccugggugagaggggugucuuccaucauuagcaucuauuggacaauagucaagccuggagacauucugcuaaucaacucgaccgguaaucucauugccccaaggggcuacuucaagauccggucugggaaauccucaaucaugcgcagugacgcgccgauuggaaacuguaauagcgagugcauaacgcccaacggcuccaucccuaaugauaagccauuucaaaacguuaaucgaauuacuuauggugcaugucccagauacgugaaacagaacacacugaaacuugccaccgggaugaggaauguaccugaaaagcagacucggggaaucuucggcgcuauagccggcuuuauugagaacgggugggaaggaaugguggacgguugguauggcuuccgucaccaaaauucugaggggacaggacaggcagcugaucuuaagagcacccaggccgcgaucaaccagaucaauggcaaauugaaccgccucauugagaagacgaaugaaaaguuucaucaaaucgagaaagaguucucagaagucgaagguaggauucaggaccuggagaaguacguggaggauaccaaaauagacuuauggaguuauaacgccgaacugcucguugcacuugagaaccagcacacaaucgaucugacugacuccgaaaugaauaaguuguucgagagaacccggaaacagcuacgagaaaacgcugaggauauggggaauggcugcuuuaagauuuaccauaagugugacaacgccugcaucggaagcauccgcaauggcacauacgaucacgacguguauagagacgaggcucugaacaauagguuccaaauuaaaggggucgaacucaagucuggauacaaagauuggauacuguggaucucauuugccauuaguugcuuccuucugugugugguauugcucgguuuuaucaugugggcaugccagaagggcaacauucgguguaauaucugcauauga

SEQ ID NO: 128873 - RNA, 1701 nt, Artificial Sequence
  derived and/or modified CDS sequence (opt3) from hemagglutinin__InfluenzaA__ABD94855
augaagaccaucauugcccugagcuacauacucugccuuguguucgcucagaaacugcccggcaacgacaauuccacagcaacuuuguguuuagggcaccaugccgucccuaacggaacgcugguuaagaccaucacaaaugaucaaauugaggugacuaacgcgaccgagcuaguacaggguucuucaacaggcagaaucugcgacaguccacacaggauucucgaugggaaaaauuguacccugaucgacgcucugcugggagauccgcauugcgacggcuuucagaacaaggaaugggauuuguucguggaacggagcaaagccuauuccaauuguuaccccuaugacgucccugauuacgcaucucuccgcucgcugguggccucaagcgguacucuggaguuuaacaaugaaaguuucaacuggacagggguugcucagaauggaaccuccuaugcaugcaagcgaggcucugugaaguccuuuuucucccgucucaacugguuacacaaacuggaguacaaguauccagcccuuaaugucacgaugcccaacaaugacaaauuugauaaguuguacauauggggcgugcaucacccuucaacugacagugaucaaaccagccuguacguacaggcuucugggagaguuacaguguccacuaaaaggucacagcagaccgucaucccaaacauuggaagccggcccugggugcgcggugugaguucuagaaucuccauuuauuggacaaucgucaagccuggcgacauacuacucauuaacagcaccgggaaucugaucgccccaaggggauacuucaagauucggucgggcaaaucuuccaucaugcgcucagacgcgccgaucgauaacuguaauagugagugcauuacgcccaacgguagcauaccuaaugacaagccauuucaaaacguuaaucgaaucacuuauggggcaugucccagauacgugaaacagaacacacuuaagcuggccaccggaaugaggaauguaccugaaaaacagacucggggcauuuucggcgcuaucgccggguuuauagagaacggaugggaagguaugguggauggcugguauggguuccgucaccagaauagcgagggaacaggccaagcagcugacuugaagucuacccaggccgcgauuaaccagaucaaugguaaacucaaccgccugaucgagaagacgaaugaaaaguuucaucaaauugagaaagaguucagcgaagucgaagggagaauccaggauuuagagaaguacguggaggacaccaaaauugaucuguggucauauaacgccgaacuccuuguugcacuggagaaccagcacacaauagacuugacugauagugaaaugaauaagcuauucgagaggacccggaaacagcugcgagaaaacgcugaggacaugggcaauggaugcuuuaagaucuaccauaagugugauaacgccugcauuggcuccauccgcaaugggacauacgaccacgacguguauagagaugaggcucucaacaauagguuccaaaucaaaggagucgaacuuaagagcgguuacaaagacuggauucuuuggauaucuuuugccaucucaugcuuccuguugugugugguacuccugggcuuuauuaugugggcaugccagaaggggaacauccgguguaauauuugcaucuga

SEQ ID NO: 128874 - RNA, 1701 nt, Artificial Sequence
  derived and/or modified CDS sequence (opt3) from hemagglutinin__InfluenzaA__ABD94866
augaagaccaucauugcccugagcuacauauccugccucguguucgcucagaaacuucccggcaacgacaauucuacagcaacucuguguuuggggcaccaugccgucccuaacggaacguuaguuaagaccaucacaaaugaucaaauugaggugacuaacgcgaccgaacugguacagucaaguagcacagguagaaucugcgacggcccacaccagauucuagaugggaaaaauuguacccucaucgacgcucugcuuggagauccgcauugcgacggcuuucagaacaaggagugggaucuguucguggaaagguccaaagccuauucuaauuguuaccccuaugacgucccugauuacgcaucguugcggucacucguggccagcagugguacucuggaguuuacaaacgaauccuucaauuggaccgggguugcucaaaacggaacgucuuaugcaugcaagcgcggcagcgugaaguccuuuuucucacgacugaauuggcuccacaaauuagaguacaaguauccagcccugaacgucacuaugcccaauaacgacaaauuugauaagcuguacauauggggcgugcaucacccuaguaccgacagcgaucagacaucuuuguacguacaguccucagggcguaucacuguuagcaccaaaagaagucagcaaacagugaccccaaauauuggaucuaggcccuggguccgggguguguccagccgcaucucgauuuauuggacgaucgugaagccuggcgacauacugcuaauuacuucuacagggaaccucaucgcuccaagaggauacuucaagauuaggcggggcaaauccucaaucaugcgcagugacgccccgaucgauaacuguaauagcgagugcauuacccccaacgguuccauaccuaaugacaagccauuucagaacgucaaucgaaucacuuauggggcgugucccagauacguuaaacagaacacacugaaacuugcaaccggaaugaggaaugugccugaaaagcagacgcggggcauuuucggcgccaucgcuggguuuauagagaacggaugggaagguaugguagauggcugguauggguuccgucaccaaaauucugagggaaccggccaggccgcagaccuuaagagcacacaggcugccauuaaccaaaucaaugguaaauugaaccgccucaucgagaagacuaaugaaaaguuucaucagauugagaaagaguucucagaaguggaagggagaauccaggaucuggagaaguacgucgaggacaccaaaauugauuuauggaguuauaacgcggaacugcucguggcccuugagaaucagcacacaauagaccugacugauuccgaaaugaacaaguuguucgagaggacccggaaacaacuacgagaaaacgcagaggacaugggcaauggaugcuuuaagaucuaccauaagugugauaacgcuugcauuggcagcauccgcaaugggacauacgaccacgacguuuauagagaugaggcccugaacaauagguuccagaucaaaggaguggaacucaagucugguuacaaagacuggauucuguggauaucauuugcuaucaguugcuuccuucugugugucguguugcucggcuuuauuaugugggccugccagaaggggaacauccgguguaauauuugcaucuga

SEQ ID NO: 128875 - RNA, 1701 nt, Artificial Sequence
  derived and/or modified CDS sequence (opt3) from hemagglutinin__InfluenzaA__ABD94877
augaagaccaucauugcccugagcuacauacucugccuuguguucgcucagaaacugcccggcaacgacaauuccacagcaacuuuguguuuagggcaccaugccgucccuaacggaacgcugguuaagaccaucacaaaugaucaaauugaggugacuaacgcgaccgaacuuguacagucuucaaguacagguagaaucugcgacagcccacacaggauucucgauggcaaaaauuguacccugaucgacgcucuacugggggauccgcauugcgacggauuucagaacaaggagugggauuuguucguggaacgguccaaagccuauucuaauuguuaccccuaugacgucccugauuacgcaucgcuccgcucacugguggccagcaguggcacucuggaguuuaacaaugaauccuucaacuggacagguguugcucagaaugggaccucuuaugcaugcaagcgacguagcgugaaguccuuuuucucaagacucaacugguuacacaaacuggaguacaaguauccagcccuuaaugucacgaugcccaacaaugacaaauuugauaaguuguacauauggggagugcaucacccuaguacugacagcgaucaaaccucucuguacguacaggcuuccggcaggguuacagugucaacuaaacggagccagcagaccgucaucccaaacauuggcagucgccccugggugagaggggugucuuccaggaucagcauuuauuggacaaucgucaagccuggagacauacuacucauuaacucgaccgguaaucugaucgccccacggggcuacuucaagauucgcucugggaaauccucaaucaugcgaagugacgcgccgaucgauaacuguaauagcgagugcauuacgcccaacggauccauaccuaaugacaagccauuucaaaacguuaauagaaucacuuauggcgcaugucccagguacgugaaacagaacacacuuaagcuggccaccgguaugcggaauguaccugaaaaacagacucgugggauuuucggagcuaucgccggcuuuauagagaacggcugggaagggaugguggauggaugguaugguuuccgccaccagaauagcgagggcacagggcaagcagcugacuugaagucuacccaggccgcgauuaaccagaucaauggaaaacucaacagacugaucgagaagacgaaugaaaaguuucaucaaauugagaaagaguucucagaagucgaaggcaggauccaggauuuagagaaguacguggaggacaccaaaauugaucuguggaguuauaacgccgaacuccuuguugcacuggagaaccagcacacaauagacuugacugauuccgaaaugaauaagcuauucgagcggacccgaaaacagcugcgcgaaaacgcugaggacauggguaaugggugcuuuaagaucuaccauaagugugauaacgccugcauuggcagcaucagaaauggaacauacgaccacgacguguauagggaugaggcucucaacaaucgguuccaaaucaaaggcgucgaacugaagucuggguacaaagacuggauucuuuggauaucauuugccaucaguugcuuccuguugugugugguacuccugggauuuauuaugugggcaugccagaaggguaacauccgcuguaauauuugcaucuga

SEQ ID NO: 128876 - RNA, 1701 nt, Artificial Sequence
  derived and/or modified CDS sequence (opt3) from hemagglutinin__InfluenzaA__ABD94888
augaagaccaucauugcccugagcuacauacucugccuuguguucgcucagaaacugcccggcaacgacaauuccacagcaacuuuguguuuagggcaccaugccgucccuaacggaacgcugguuaagaccaucacaaaugaucaaauugaggugacuaacgcgaccgaacugguacagucuucaaguacagguagaaucugcgacagcccacacaggauucucgauggcaaaaauuguacccugaucgacgcccuucugggggauccgcauugcgacggauuuaagaacaaagagugggauuuguucguggaacgguccacugcuuauucuaauuguuaccccuaugacgucccugauuacgcaucgcuccgcucacugguggccagcaguggcacacuggaguuuaccaacgaagguuucaauuggacggggguugcucaggacggaacuuccuaugcaugcaagcgaggcucugucaagagcuuuuucucccgucucaacugguuacacaaacuggaguacaaguauccagcccuuaaugugaccaugcccaacaaugauaaauuugacaaguuguacauauggggcgugcaucacccuucaacagauagugaccagacuagccuguacguacaggcuucugggagaguuaccguguccacaaaaaggucacagcagaccgucaucccaaacauuggaagccggcccugggugcgcggugugaguucuagaaucuccauuuauuggacgaucgucaagccuggcgacauacuacucauuaauagcacugggaaccugaucgccccaaggggauacuucaagauucggucgggcaaaucuuccaucaugcgcucagaugcgccgaucgacaacuguaauagugagugcauuacacccaacgguagcauaccuaaugauaagccauuucagaacguuaaucgaaucaccuauggggcaugucccagauacgugaaacaaaacacucuuaagcuggccacaggaaugaggaauguaccugaaaaacagacccggggcauuuucggcgcuaucgccggguuuauagagaacggaugggaagguaugguggacggcugguauggguuccgucaccaaaauuccgagggaacgggccaggcagcugauuugaagucuacccaagccgcgauuaaccagaucaaugguaaacucaaccgccugaucgagaagacaaaugaaaaguuucaucagauugagaaagaguucagcgaagucgaagggagaauccaagacuuagagaaguacguggaggauacuaaaauugaccuguggucauauaacgccgaacuccuuguugcacuggagaaucagcacaccauagauuugacagacagugaaaugaacaagcuauucgagaggacucggaaacagcugcgagaaaacgcugaggauaugggcaauggaugcuuuaagaucuaccauaagugugacaacgccugcauuggcuccauccgcaaugggaccuacgaccacgauguguauagagacgaggcucucaacaauagguuccagaucaaaggagucgaacuaaagagcgguuacaaagauuggauucuuuggauaucuuuugccaucucaugcuuccuguugugugugguacuccugggcuuuauuaugugggcaugccaaaaggggaacauccgguguaauauuugcaucuga

SEQ ID NO: 128877 - RNA, 1701 nt, Artificial Sequence; identical to SEQ ID NO: 128855
  derived and/or modified CDS sequence (opt3) from hemagglutinin__InfluenzaA__ABD94899

SEQ ID NO: 128878 - RNA, 1701 nt, Artificial Sequence
  derived and/or modified CDS sequence (opt3) from hemagglutinin__InfluenzaA__ABD94910
augaagaccaucauugcccugagcuacauacucugccuuguguucgcucagaaacugcccggcaacgacaauuccacagcaacuuuguguuuagggcaccaugccgucccuaacggaacgcugguuaagaccaucacaaaugaucaaauugaggugacuaacgcgaccgaacuuguacaaaauucuucaacagguagaaucugcgacaguccacacaggauucucgauggcaaaaacuguacccugaucgacgcucuacugggggauccgcauugcgacggauuucagaauaaggagugggauuuguucguggaacggagcaaagccuauuccaacuguuaccccuaugacgucccugauuacgcaucucuccgcucgcugguggccucaagcggcacucuggaguuuaauaacgaaaguuucaauuggacagguguugcucagaacgggaccuccuaugcaugcaagcgacguucugucaagagcuuuuucuccagacucaauugguuacacaaacuggaguacaaguauccagcccuuaacgugacgaugcccaauaacgacaaauuugauaaguuguacauauggggagugcaucacccuucaacugacagugaucagaccagccuguacguacaggcuucuggcaggguuacaguguccacuaaacggucacagcagaccgucaucccaaacauuggcagccgccccugggugagaggggugaguucuaggaucuccauuuauuggacaaucgucaagccuggagacauacuacucauuaauagcaccgguaaccugaucgccccacggggcuacuucaagauucgcucggggaaaucuuccaucaugcgaucagacgcgccgaucggaaauuguaacagugagugcauuacgcccaauggcagcauaccuaacgauaagccauuucaaaauguuaacagaaucacuuauggugcaugucccagguacgugaaacagaauacacuuaagcuggccaccgggaugcggaacguaccugaaaaacagacucguggaauuuucggcgcuaucgccggcuuuauagagaaugggugggaaggaaugguggacgguugguauggcuuccgccaccagaacuccgaggggacaggacaagcagcugauuugaagucuacccaggccgcgauuaaucagaucaacggcaaacucaauagacugaucgagaagacgaacgaaaaguuucaucaaauugagaaagaguucagcgaagucgaagguaggauccaggacuuagagaaguacguggaggauaccaaaauugaccuguggucauauaacgccgaacuccuuguugcacuggagaaucagcacacaauagauuugacugacagugaaaugaacaagcuauucgagcggacccgaaaacagcugcgcgaaaaugcugaggauauggggaacggcugcuuuagaaucuaccauaagugugacaaugccugcauuggauccaucaggaacggcacauacgaucacgacguguaucgggacgaggcucucaauaaccgcuuccaaaucaagggggucgaacugaaaagcggauacaaggauuggauucuuuggauaucuuuugccaucucaugcuuccuguugugugugguacuccuggguuuuauuaugugggcaugccagaaaggcaauaucagauguaacauuugcaucuga

SEQ ID NO: 128879 - RNA, 1701 nt, Artificial Sequence
  derived and/or modified CDS sequence (opt3) from hemagglutinin__InfluenzaA__ABD94921
augaagaccaucauugcccugagcuacauacucugccuuguguucgcucagaaacugcccggcaacgacaauuccacagcaacuuuguguuuagggcaccaugccgucccuaacggaacgcugguuaagaccaucacaaaugaucaaauugaggugacuaacgcgaccgagcuaguacagucuucaaguacagguagaaucugcgacggcccacaccagauucucgaugggaaaaauuguacccugaucgacgcucugcugggagauccgcauugcgacggcuuucagaacaaggaaugggauuuguucguggaaaggagcaaagccuauuccaauuguuaccccuaugacgucccugauuacgcaucucuccggucgcugguggccucaagcgguacucuggaguuuacaaacgaaaguuucaauuggaccgggguugcucaaaacggaacguccuaugcaugcaagcgcggcucugucaagagcuuuuucucccgacucaauugguuacacaaacuggaguacaaguauccagcccuuaacgugacuaugcccaauaacgacaaauuugauaaguuguacauauggggcgugcaucacccuucaaccgacagugaucagacaagccuguacguacagucuuccgggcguguuacugugucaaccaaaagaagccagcaaacagucaccccaaauaucggaaguaggcccugggugcggggugugucuucccgcauuagcaucuauuggacgauugucaagccuggcgacauccuacucauaaacucgacugggaaccugauugcuccaagaggauacuucaagaucaggcggggcaaaucuuccauuaugcgcucagacgccccgaucgauaauuguaacagugagugcaucacacccaaugguagcauuccuaacgacaagccauuucagaauguuaaccgaauaaccuauggggcgugucccagauacgugaaacagaauacucuuaagcuggcaacaggaaugaggaacguaccugaaaaacagacccggggcaucuucggcgccauugcuggguuuaucgagaauggaugggaagguaugguggauggcugguauggguuccgucaccaaaacuccgagggaacgggccaggccgcagacuugaagucuacccaggcugccauaaaucaaauuaacgguaaacucaaucgccugaucgagaagacaaacgaaaaguuucaucagaucgagaaagaguucagcgaagucgaagggaggauucaggauuuagagaaguacguggaggacacuaaaaucgaucuguggucauauaaugcggaacuccuuguugcccuggagaaccagcacaccauugacuugacagauagugaaaugaacaagcuauucgagagaacucggaaacaacugcgagaaaaugcagaggacaugggcaacggaugcuuuaagauauaccauaagugugauaaugcuugcaucggcuccauucgcaacgggaccuacgaccacgacguguauagagaugaggcccucaauaacagguuccagaucaaaggagucgaacuuaagagcgguuacaaagacuggauccuuuggauuucuuuugcuauaucaugcuuccuguugugugugguacuccugggcuuuaucaugugggccugccagaaggggaauauucgguguaacaucugcauuuga

SEQ ID NO: 128880 - RNA, 1701 nt, Artificial Sequence; identical to SEQ ID NO: 128855
  derived and/or modified CDS sequence (opt3) from hemagglutinin__InfluenzaA__ABD94932

SEQ ID NO: 128881 - RNA, 1698 nt, Artificial Sequence
  derived and/or modified CDS sequence (opt3) from hemagglutinin__InfluenzaA__ABD94943
augaaggugaaacugcucauccuucugugcaccuucacagccacuuacgcugacacgauuuguauaggcuaucacgcaaacaauagcaccgauacagucgacacuguuuuggagaagaacgugaccguaacacauuccgugaauuuacuggaagauucucacaacgggaaacuaugccuccugaagggaaucgcgccccuucagcuggguaauuguucagucgccggcuggauuuuggggaacccugagugcgaacuccugaucaguaaagagagcugguccuacauuguggaaaccccaaauccggagaacggagcuuguuaucccggcuacuuugccgacuaugaggaacugagagagcaacucucuucgguuagcucauucgaaagguuugagaucuucccuaaggagaguuccuggccaaaucauacugugacaggugucucugcaagcugcucccacaacgggaagucaaguuuuuaccggaauuuacuguggcuuaccggaaagaacggcuuguaucccaaucugagcaagucuuacgccaacaauaaaaagaaagaagugcuaauacucuggggcguacaucacccuccaaacaucggggaucagcgcacgcuguaccacacugagaacgcuuauguuuccguggucucaagccauuacagucgacguuucacccccgaaauuacaaagagaccuaaggugagggaccaggagggacggaucaauuauuacuggacucuucuggaaccaggugauaccauuaucuuugaggcaaacggcaauuugauagccccgugguaugcuuucgcccucucucgcggguuuggauccggcauuaucacaagcaacgcgcccauggacgagugugaugcaaaaugccagaccccucaaggugccauuaauucgucucugccauuccagaacgugcaccccgucacgaucggggaauguccuaaguacguuagauccgcuaaauuaaggauggugacuggacugcggaauaucccaucaauucagagucgcggccucuuuggcgccauagcaggguucaucgagggagguuggacaggcaugguagacgggugguauggauaccaucaccagaacgaacaaggcagcgguuacgcugccgaucagaaguccacccagaaugcgauuaacgggaucacuaauaaagugaacucugucauagagaagaugaauacacaguuuaccgccgugggcaaagaguucaacaaacuugaacgaagaauggagaaucugaacaagaaaguugacgauggauucuuggacauuuggacguauaacgcagaacuacuggugcuccuggagaaugaaaggacccuugacuuucacgauagcaacgucaagaaucuguacgagaaagugaagucacaauugaaaaacaaugcuaaggaaaucggcaacgggugcuucgaguuuuaucauaaguguaauaacgagugcauggaaaguguuaaaaauggaacauacgacuaucccaaguacuccgaggaaagcaaacucaaccgggagaagaucgaugguguaaaacuggacucuaugggcguguaucagauuuuagccaucuacucaacugucgcuaguagccuggugcuacucgucucccugggggccauuucuuucuggaugugcucgaauggaagccuucagugucguauaugcaucuga

SEQ ID NO: 128882 - RNA, 1701 nt, Artificial Sequence; identical to SEQ ID NO: 128681
  derived and/or modified CDS sequence (opt3) from hemagglutinin__InfluenzaA__ABD94954

SEQ ID NO: 128883 - RNA, 1698 nt, Artificial Sequence; identical to SEQ ID NO: 128790
  derived and/or modified CDS sequence (opt3) from hemagglutinin__InfluenzaA__ABD94965

SEQ ID NO: 128884 - RNA, 1698 nt, Artificial Sequence; identical to SEQ ID NO: 128789
  derived and/or modified CDS sequence (opt3) from hemagglutinin__InfluenzaA__ABD94987

SEQ ID NO: 128885 - RNA, 1698 nt, Artificial Sequence; identical to SEQ ID NO: 128789
  derived and/or modified CDS sequence (opt3) from hemagglutinin__InfluenzaA__ABD94998

SEQ ID NO: 128886 - RNA, 1698 nt, Artificial Sequence; identical to SEQ ID NO: 128789
  derived and/or modified CDS sequence (opt3) from hemagglutinin__InfluenzaA__ABD95009

SEQ ID NO: 128887 - RNA, 1698 nt, Artificial Sequence; identical to SEQ ID NO: 128790
  derived and/or modified CDS sequence (opt3) from hemagglutinin__InfluenzaA__ABD95020

SEQ ID NO: 128888 - RNA, 1698 nt, Artificial Sequence
  derived and/or modified CDS sequence (opt3) from hemagglutinin__InfluenzaA__ABD95031
augaaggugaaacugcucguccuucugugcaccuucacagccacuuacgcugacacgaucuguauuggcuaucacgcaaacaauagcaccgauacaguugacacuguguuggagaagaacguaaccgugacacauuccgucaauuuacuggaagauucucacaacgggaaacuaugccuccugaagggaauagcgccccuucagcuggguaauuguucaguggccggcuggaucuuggggaacccugagugcgaacuccugauuaguaaagagagcugguccuacaucguugaaaccccaaauccggagaacggaacuuguuaucccggcuacuuuacagacuaugaggaacugagagagcaacucucuucggugagcucauucgaaagguuugagauuuucccuaaggagaguuccuggccaaaucauaccgucacgggugugucugcuagcugcucccacaacgggaagucaaguuuuuaccggaauuuacuguggcuuacuggcaaaaacggauuguaucccaaucugcgccgaagcuacgccaacaauaaggaaaaagagguucuaguacucuggggcgugcaucacccuccaaacaucggggaucagaaggcacuguaccacaccgaaaacgccuaugucucugugguguccucacauuacagccguagauucacacccgagauagcuaaaaggccuaagguccggggacaggaaggucgcaucaauuauuacuggacucuucuggagccaggcgacaccauuaucuuugaggcaaacgggaauuugauugccccgagauaugcuuucgcccucaguaggggauuuggcucugguaucauaacauccaacgcgcccauggaugaaugugacgcaaagugccagaccccucaaggggccauuaauagcucgcugccauuccagaacguucaccccgugacgaucggagaguguccuaaauacguacggucugcuaaguuacgcauggugacuggccugcgaaauauuccauccauccagucaagaggccucuuuggggccaucgcaggauucauugaagguggcuggacagggauggucgauggaugguauggcuaccaucaccagaacgagcaagguaguggguacgcugccgaccagaaaagcacccagaaugcgauaaacggcaucacuaauaaggugaacuccauuaucgaaaagaugaauacacaguuuaccgccguuggaaaagaguucaacaaacuugagaggcggauggaaaaucugaacaagaagguggaugacggcuucuuggauauauggacguauaacgcagagcuacugguccuccuggaaaaugagcguacccuugacuuucacgacucuaacgugaaaaaucuguacgaaaagguaaaaagccaauugaagaacaaugcuaaagagauugggaacggaugcuucgaguuuuaucauaaguguaauaacgaaugcauggagucaguuaagaaugguacauacgauuaucccaaauacagugaagaguccaagcucaaccgcgagaaaaucgacggcgugaagcuggaaagcaugggggucuaucagaucuuagccauuuacucuacuguggcuucaagucugguccuacucgugagccugggagccaucuccuucuggaugugcucuaauggcucgcuucaguguagaauuugcauauga

SEQ ID NO: 128889 - RNA, 1698 nt, Artificial Sequence
  derived and/or modified CDS sequence (opt3) from hemagglutinin__InfluenzaA__ABD95042
augaaggccaaacugcucgugcuucugugcaccuucacagcuacuuacgcagacacgaucuguauuggcuaucacgccaacaauagcaccgauacagucgacacuguuuuggagaagaacgugaccguaacacauuccgugaauuuacuggaagauucucacaacgggaaacuaugccuccugaagggaauagcgccccuucagcuggguaauuguucagucgcuggcuggaucuuggggaacccugagugcgaacuccugauuaguaaagagagcugguccuacaucguggaaaccccaaauccggagaacggaacuuguuaucccggcuacuuugccgacuaugaggaacugagagagcaacucucuucgguuagcucauucgaaagguuugagauuuucccuaaggguaguuccuggccaaaucauacagugaccggggucucugcaagcugcucccacaacggaaagucaaguuuuuaccggaauuuacuguggcuuacgggcaaaaacggcuuguaucccaaucugagcaugucuuacgugaacaauaaggggaaagagguacuuguucucuggggagugcaucacccuccaaacaucggugaucagcgcgcccuguaccacacugaaaacgcuuaugucuccguggugucaagccauuacagucgacguuucacccccgagauagcaaagagaccuaaagucagggaccaggaaggccggaucaauuauuacuggacacuucuggagccaggggauacuauuaucuuugaagccaacggaaauuugauugcuccgugguaugccuucgcgcucucucgcggcuuugguuccgggaucauaaccagcaacgcacccaugggagagugugacgccaagugccagacaccucaaggcgcuauuaauucgucucugccauuccagaacguucaccccgugaccaucggcgaguguccuaaguacguaagauccgccaaauuaaggauggugacggggcugcggaauauuccaucaauccagagucgcggacucuuuggugcaaucgcuggcuucauugaagggggauggacuggcauggucgaugguugguauggguaccaucaccagaacgagcaaggcagcggauacgccgcggaccagaaguccacacagaaugccauaaacggcaucaccaauaaagugaacucuguuauugaaaagaugaauacucaguuuacagcaguggggaaagaguucaacaagcuagaacgaagaauggagaaucugaacaaaaaggucgaugacggauucuuggauaucuggaccuauaacgcugagcuacuggugcuccuggaaaaugagaggacgcuugacuuucacgacagcaacguaaagaaucuguacgaaaaaguuaagucacaauugaaaaacaaugccaaggagauagguaacggcugcuucgaauuuuaucauaaauguaauaacgagugcauggagagugugaagaaugggaccuacgauuaucccaaguacuccgaagagagcaaacucaaccgggaaaagauugacggagucaaacuggagucuaugggcguguaucagaucuuagcuaucuacucaacagucgccaguagccuggugcuacucguuucccugggugcaauuucuuucuggaugugcucgaaugggagccuucagugucguaucugcauuuga

SEQ ID NO: 128890 - RNA, 1698 nt, Artificial Sequence; identical to SEQ ID NO: 128889
  derived and/or modified CDS sequence (opt3) from hemagglutinin__InfluenzaA__ABD95053

SEQ ID NO: 128891 - RNA, 1698 nt, Artificial Sequence; identical to SEQ ID NO: 128848
  derived and/or modified CDS sequence (opt3) from hemagglutinin__InfluenzaA__ABD95064

SEQ ID NO: 128892 - RNA, 1698 nt, Artificial Sequence
  derived and/or modified CDS sequence (opt3) from hemagglutinin__InfluenzaA__ABD95075
augaaggccaaacugcucgugcuucugugcaccuucacagcuacuuacgcagacacgaucuguauuggcuaucacgccaacaauagcaccgauacagucgacacuguuuuggagaagaacgugaccguaacacauuccgugaauuuacuggaagauucucacaacgggaaacuaugccuccugaagggaauagcgccccuucagcuggguaauuguucagucgcuggcuggaucuuggggaacccugagugcgaacuccugauuaguaaagagagcugguccuacaucguggaaaccccaaauccggagaacggaacuuguuaucccggcuacuuugccgacuaugaggaacugagagagcaacucucuucgguuagcucauucgaaagguuugagauuuucccuaaggguaguuccuggccaaaucauacagugaccggggucucugcaagcugcucccacaacggaaagucaaguuuuuaccggaauuuacuguggcuuacgggcaaaaacggcuuguaucccaaucugagcaugucuuacgugaacaauaaggagaaagaaguucuaguacucuggggagugcaucacccuccaaacaucggggaucagcgcgcccuguaccacacugagaacgcuuaugucuccguggugucaagccauuacagucgacguuucacccccgaaauagcaaagagaccuaaagucagggaccaggagggucggaucaauuauuacuggacacuucuggaaccaggcgauacuauuaucuuugaggccaacgggaauuugauugcuccgugguaugccuucgcgcucucuaagggauuuggcuccgguaucauaaccagcaacgcacccaugggggagugugacgccaagugccagacaccucaaggagcuauuaauucgucucugccauuccagaacguucaccccgugaccaucggcgaauguccuaaauacguacgcuccgccaaguuaagaauggugacgggccugaggaauauuccaucaauccagagucgggggcucuuuggagcaaucgcugguuucauugagggcggguggacuggaauggucgauggcugguaugguuaccaucaccagaacgaacaagggagcggcuacgccgcggaccagaaauccacacagaaugccauaaacggaaucaccaauaaggugaacucuguuauugagaaaaugaauacucaguuuacagcagugggcaaggaguucaacaaacuugaacgccgaauggagaaucugaacaagaaggucgaugacggguucuuggauaucuggaccuauaacgcugaacuacuggugcuccuggagaaugaaagaacgcuugacuuucacgacagcaacguuaaaaaucuguacgagaagguaaaaucacaauugaagaacaaugccaaagaaauaggaaacgguugcuucgaguuuuaucauaaguguaauaacgagugcauggaaagugugaagaauggcaccuacgauuaucccaaauacuccgaggaaagcaagcucaacagggagaaaauugacggggucaagcuggagucuaugggaguguaucagaucuuagcuaucuacucaacagucgccaguagccuggugcuacucguuucccugggcgcaauuucuuucuggaugugcucgaaugguagccuucagugucggaucugcauuuga

SEQ ID NO: 128893 - RNA, 1698 nt, Artificial Sequence; identical to SEQ ID NO: 128889
  derived and/or modified CDS sequence (opt3) from hemagglutinin__InfluenzaA__ABD95086

SEQ ID NO: 128894 - RNA, 1698 nt, Artificial Sequence; identical to SEQ ID NO: 128848
  derived and/or modified CDS sequence (opt3) from hemagglutinin__InfluenzaA__ABD95097

SEQ ID NO: 128895 - RNA, 1698 nt, Artificial Sequence
  derived and/or modified CDS sequence (opt3) from hemagglutinin__InfluenzaA__ABD95119
augaaggccaaacugcucauccuucugugcaccuucacagcuacuuacgcagacacgauuuguauaggcuaucacgccaacaauagcaccgauacaguggacacugucuuggagaagaacguuaccgugacacauuccguaaauuuacuggaagauucucacaacgggaaacuaugccuccugaagggaaucgcgccccuucagcuggguaauuguucaguggcuggcuggauuuuggggaacccugagugcgaacuccugaucaguaaagagagcugguccuacauugucgaaaccccaaauccggagaacggaacuuguuaucccggcuacuuugccgacuaugaggaacugagagagcaacucucuucggugagcucauucgaaagguuugagaucuucccuaaggguaguuccuggccaaaucauacaguuaccggggugucugcaagcugcucccacaacggaaagucaaguuuuuaccggaauuuacuguggcuuacgggcaaaaacggcuuguaucccaaucugagcaugucuuacgucaacaauaaggagaaagaagugcuaguacucuggggaguucaucacccuccaaacauaggggaucagcgcgcccuguaccacacugagaacgcuuauguguccgucgugucaagccauuacagucgacguuucacccccgaaaucgcaaagagaccuaaagugagggaccaggagggucggauuaauuauuacuggacacuucuggaaccaggcgauacuaucauuuuugaggccaacgggaauuugaucgcuccgugguaugccuucgcgcucucucgcggauuuggcuccgguauaauuaccagcaacgcacccaugggggagugugacgccaagugccagacaccucaaggagcuaucaauucgucucugccauuccagaacguccaccccguuaccauuggcgaauguccuaaguacgugagauccgccaaauuaaggaugguaacgggccugcggaauaucccaucaauccagagucgcgggcucuuuggagcaauugcugguuucauagagggcggguggacuggaaugguggauggcugguaugguuaccaucaccagaacgaacaagggagcggcuacgccgcggaccagaaguccacacagaaugccaucaacggaauuaccaauaaagucaacucugugaucgagaagaugaauacucaguuuacagcaguuggcaaagaguucaacaaacuugaacgaagaauggagaaucugaacaagaagguggaugacggguucuuggauauauggaccuauaacgcugaacuacugguccuccuggagaaugaaaggacgcuugacuuucacgacagcaacgugaagaaucuguacgagaaaguaaagucacaauugaaaaacaaugccaaggaaauuggaaacgguugcuucgaguuuuaucauaaauguaauaacgagugcauggaaaguguuaagaauggcaccuacgauuaucccaaguacuccgaggaaagcaaacucaaccgggagaagaucgacggggugaaacuggagucuaugggagucuaucagaucuuagcuauuuacucaacaguggccaguagccugguccuacucgugucccugggcgcaaucucuuucuggaugugcucgaaugguagccuucagugucguauuugcauauga

SEQ ID NO: 128896 - RNA, 1698 nt, Artificial Sequence
  derived and/or modified CDS sequence (opt3) from hemagglutinin__InfluenzaA__ABD95130
augaaggccaaacugcucgugcuucugugcaccuucacagcuacuuacgcagacacgaucuguauuggcuaucacgccaacaauagcaccgauacagucgacacuguuuuggagaagaacgugaccguaacacauuccgugaauuuacuggaagauucucacaacgggaaacuaugccuccugaagggaauagcgccccuucagcuggguaauuguucagucgcuggcuggaucuuggggaacccugagugcgaacuccugauuaguaaagagagcugguccuacaucguggaaaccccaaauccggagaacggaacuuguuaucccggcuacuuugccgacuaugaggaacugagagagcaacucucuucgguuagcucauucgaaagguuugagauuuucccuaaggguaguuccuggccaaaucauacagugaccggggucucugcaagcugcucccacaacggaaagucaaguuuuuaccggaauuuacuguggcuuacgggcaaaaacggcagcuaucccaauuugucuauguccuacgugaacaauaaggagaaagaaguacugguucuauggggagugcaucacccuccaaacaucggggaucagcgcgcccucuaccacacugagaacgcuuaugucucaguggugagcagucauuacucucgacguuucacccccgaaauagcaaagagaccuaaagucagggaccaggagggucggaucaauuauuacuggacacugcuugaaccaggcgauacuauuaucuuugaggccaacgggaaucugauugcuccgugguaugccuucgcguugucccgcggauuuggcagcgguaucauaaccucgaacgcacccaugggggagugugacgccaagugccagacaccucaaggagcuauuaauucuucccucccauuccagaacguucaccccgugaccaucggcgaauguccuaaguacguaagaucagccaaacugaggauggugacgggcuuacggaauauuccaaguauccagagccgcgggcuguuuggagcaaucgcugguuucauugagggcggguggacuggaauggucgauggcugguaugguuaccaucaccagaacgaacaaggguccggcuacgccgcggaccagaagucuacacagaaugccauaaacggaaucaccaauaaagugaacagcguuauugagaagaugaauacucaguuuacagcagugggcaaagaguucaacaagcucgaacgaagaauggagaaucuuaacaaaaaggucgaugacggguuccuggauaucuggaccuauaacgcugaauugcuagugcugcucgagaaugaaaggacgcuggacuuucacgacucaaacguaaagaaucuuuacgagaaaguuaagagucaacugaaaaacaaugccaaggaaauaggaaacgguugcuucgaguuuuaucauaaauguaauaacgagugcauggaauccgugaagaauggcaccuacgauuaucccaaguacagcgaggaaucuaaauugaaccgggagaagauugacggggucaaacucgagucaaugggaguguaucagauccuggcuaucuacaguacagucgccagcuccuuagugcugcuaguuucucucggcgcaauuucguucuggaugugcagcaaugguucccugcagugucguaucugcauuuga

SEQ ID NO: 128897 - RNA, 1698 nt, Artificial Sequence; identical to SEQ ID NO: 128848
  derived and/or modified CDS sequence (opt3) from hemagglutinin__InfluenzaA__ABD95141

SEQ ID NO: 128898 - RNA, 1698 nt, Artificial Sequence; identical to SEQ ID NO: 128848
  derived and/or modified CDS sequence (opt3) from hemagglutinin__InfluenzaA__ABD95152

SEQ ID NO: 128899 - RNA, 1698 nt, Artificial Sequence; identical to SEQ ID NO: 128895
  derived and/or modified CDS sequence (opt3) from hemagglutinin__InfluenzaA__ABD95163

SEQ ID NO: 128900 - RNA, 1698 nt, Artificial Sequence; identical to SEQ ID NO: 128889
  derived and/or modified CDS sequence (opt3) from hemagglutinin__InfluenzaA__ABD95174

SEQ ID NO: 128901 - RNA, 1698 nt, Artificial Sequence
  derived and/or modified CDS sequence (opt3) from hemagglutinin__InfluenzaA__ABD95185
augaaggccaaacugcucgugcuucugugcaccuucacagcuacuuacgcagacacgaucuguauuggcuaucacgccaacaauagcaccgauacagucgacacuguuuuggagaagaacgugaccguaacacauuccgugaauuuacuggaagauucucacaacgggaaacuaugccuccugaagggaauagcgccccuucagcuggguaauuguucagucgcuggcuggaucuuggggaacccugagugcgaacuccugauuaguaaagagagcugguccuacaucguggaaaccccaaauccggagaacggaacuuguuaucccggcuacuuugccgacuaugaggaacugagagagcaacucucuucgguuagcucauucgaaagguuugagauuuucccuaaggguaguuccuggccaaaucauacagugaccggggucucugcaagcugcucccacaacggagagucaaguuuuuaccggaauuuacuguggcuuacgggcaagaacggcuuguaucccaaucugagcaugucuuacgugaacaauaaagaaaaggagguucuaguacucuggggagugcaucacccuccaaacaucggggaucagcgcgcccuguaccacacugaaaacgcuuaugucuccguggugucaagccauuacagucgacguuucacccccgagauagcaaaaagaccuaaggucagggaccaggaaggucggaucaauuauuacuggacacuucuggagccaggcgauacuauuaucuuugaggccaacgggaauuugauugcuccgugguaugccuucgcgcucucucgcggauuuggcuccgguaucauaaccagcaacgcacccaugggggaaugugacgccaaaugccagacaccucaaggagcuauuaauucgucucugccauuccagaacguucaccccgugaccaucggcgaguguccuaaguacguaagauccgccaaguuaaggauggugacgggccugcggaauauuccaucaauccagagucgcgggcucuuuggagcaaucgcugguuucauugaaggcggguggacuggaauggucgauggcugguaugguuaccaucaccagaacgagcaagggagcggcuacgccgcggaccagaaauccacacagaaugccauaaacggaaucaccaauaaggugaacucuguuauugaaaagaugaauacucaguuuacagcagugggcaaagaguucaacaaacuugagcgaagaauggaaaaucugaacaagaaagucgaugacggguucuuggauaucuggaccuauaacgcugagcuacuggugcuccuggaaaaugagaggacgcuugacuuucacgacagcaacguaaagaaucuguacgaaaagguuaaaucacaauugaagaacaaugccaaagagauaggaaacgguugcuucgaguuuuaucauaaguguaauaacgaaugcauggagagugugaaaaauggcaccuacgauuaucccaaguacuccgaagagagcaagcucaaccgggagaaaauugacggggucaagcuggaaucuaugggaguguaucagaucuuagcuaucuacucaacagucgccaguagccuggugcuacucguuucccugggcgcaauuucuuucuggaugugcucgaaugguagccuucagugucguaucugcauuuga

SEQ ID NO: 128902 - RNA, 1698 nt, Artificial Sequence; identical to SEQ ID NO: 128889
  derived and/or modified CDS sequence (opt3) from hemagglutinin__InfluenzaA__ABD95196

SEQ ID NO: 128903 - RNA, 1698 nt, Artificial Sequence; identical to SEQ ID NO: 128347
  derived and/or modified CDS sequence (opt3) from hemagglutinin__InfluenzaA__ABD95207

SEQ ID NO: 128904 - RNA, 1698 nt, Artificial Sequence; identical to SEQ ID NO: 128848
  derived and/or modified CDS sequence (opt3) from hemagglutinin__InfluenzaA__ABD95218

SEQ ID NO: 128905 - RNA, 1698 nt, Artificial Sequence; identical to SEQ ID NO: 128895
  derived and/or modified CDS sequence (opt3) from hemagglutinin__InfluenzaA__ABD95229

SEQ ID NO: 128906 - RNA, 1698 nt, Artificial Sequence; identical to SEQ ID NO: 128848
  derived and/or modified CDS sequence (opt3) from hemagglutinin__InfluenzaA__ABD95240

SEQ ID NO: 128907 - RNA, 1698 nt, Artificial Sequence; identical to SEQ ID NO: 128889
  derived and/or modified CDS sequence (opt3) from hemagglutinin__InfluenzaA__ABD95251

SEQ ID NO: 128908 - RNA, 1698 nt, Artificial Sequence; identical to SEQ ID NO: 128347
  derived and/or modified CDS sequence (opt3) from hemagglutinin__InfluenzaA__ABD95262

SEQ ID NO: 128909 - RNA, 1698 nt, Artificial Sequence; identical to SEQ ID NO: 128848
  derived and/or modified CDS sequence (opt3) from hemagglutinin__InfluenzaA__ABD95273

SEQ ID NO: 128910 - RNA, 1698 nt, Artificial Sequence; identical to SEQ ID NO: 128344
  derived and/or modified CDS sequence (opt3) from hemagglutinin__InfluenzaA__ABD95284

SEQ ID NO: 128911 - RNA, 1698 nt, Artificial Sequence; identical to SEQ ID NO: 128848
  derived and/or modified CDS sequence (opt3) from hemagglutinin__InfluenzaA__ABD95295

SEQ ID NO: 128912 - RNA, 1698 nt, Artificial Sequence
  derived and/or modified CDS sequence (opt3) from hemagglutinin__InfluenzaA__ABD95306
augaaggccaaacugcucgugcuucugugcaccuucacagcuacuuacgcagacacgaucuguauuggcuaucacgccaacaauagcaccgauacagucgacacuguuuuggagaagaacgugaccguaacacauuccgugaauuuacuggaagauucucacaacgggaaacuaugccuccugaagggaauagcgccccuucagcuggguaauuguucagucgcuggcuggaucuuggggaacccugagugcgaacuccugauuaguaaagagagcugguccuacaucguggaaaccccaaauccggagaacggaacuuguuaucccggcuacuuugccgacuaugaggaacugagagagcaacucucuucgguuagcucauucgaaagguuugagauuuucccuaaggguaguuccuggccaaaucauacagugaccggggucucugcaagcugcucccacaacggaaagucaaguuuuuaccggaauuuacuguggcuuacgggcaaaaacggcuuguaucccaaucugagcaugucuuacgugaacaauaaggagaaagaaauccuaguacucuggggaguucaucacccuccaaacauaggggaucagcgcgcccuguaccacacugagaacgcuuauguguccgucgugucaagccauuacagucgacguuucacccccgaaaucgcaaagagaccuaaagugagggaccaggagggucggauuaauuauuacuggacacuucuggaaccaggcgauacuaucauuuuugaggccaacgggaauuugaucgcuccgugguaugccuucgcgcucucucgcggauuuggcuccgguauaauuaccagcaacgcacccaugggggagugugacgccaagugccagacaccucaaggagcuaucaauucgucucugccauuccagaacguccaccccguuaccauuggcgaauguccuaaguacgugagauccgccaaauuaaggaugguaacgggccugcggaauaucccaucaauccagagucgcgggcucuuuggagcaauugcugguuucauagagggcggguggacuggaaugguggauggcugguaugguuaccaucaccagaacgaacaagggagcggcuacgccgcggaccagaaguccacacagaaugccaucaacggaauuaccaauaaagucaacucugugaucgagaagaugaauacucaguuuacagcaguuggcaaagaguucaacaaacuugaacgaagaauggagaaucugaacaagaagguggaugacggguucuuggauauauggaccuauaacgcugaacuacugguccuccuggagaaugaaaggacgcuugacuuucacgacagcaacgugaagaaucuguacgagaaaguaaagucacaauugaaaaacaaugccaaggaaauuggaaacgguugcuucgaguuuuaucauaaauguaauaacgagugcauggaaaguguuaagaauggcaccuacgauuaucccaaguacuccgaggaaagcaaacucaaccgggagaagaucgacggggugaaacuggagucuaugggagucuaucagaucuuagcuauuuacucaacaguggccaguagccugguccuacucgugucccugggcgcaaucucuuucuggaugugcucgaaugguagccuucagugucguauuugcauauga

SEQ ID NO: 128913 - RNA, 1698 nt, Artificial Sequence; identical to SEQ ID NO: 128889
  derived and/or modified CDS sequence (opt3) from hemagglutinin__InfluenzaA__ABD95328

SEQ ID NO: 128914 - RNA, 1701 nt, Artificial Sequence
  derived and/or modified CDS sequence (opt3) from hemagglutinin__InfluenzaA__ABD95339
augaaggccaaacugcucgugcuucugugcgcuuugagcgcaaccgacgccgauacaaucuguauuggcuaccacgcgaacaauuccacugacacggucgauaccguuuuagagaagaacgugacaguaacucauucugugaaucugcuagaagacucacacaacgggaaacucugcagacugaagggaauagcuccccuucagcuggguaaauguaguaucgccggcuggauuuuggggaauccugagugcgaaagccucuucuccaagaagucuuggucguauaucgcagagaccccaaacucagaaaauggaacauguuacccgggcuauuuugccgauuacgaggagcugagggaacaacugagcagugucuccucuuucgagcgguuugaaauuuuccccaaagagagcuccuggccuaagcauucagugacccgcgguguuacugcuaguugcagccacaaagggaagucuuccuuuuaucgaaaccucuuauggcugacagagaaaaauggaucauacccaaaccuuagcaagaguuaugugaaugacaaggaaaaagaggucuuggugcuguggggcguacaucaccccucuaacaucgaagaucagaagaccauauaccguaaagagaaugcauacguuuccguggucagcucgcacuauaacagaagguucacgccugaaaucgccaagcggccaaaagugcgcgaccaggagggcagaauuaauuacuauuggacucuacucgagcccggggauaccaucauuuuugaagcuaacggaaaccugaucgccccuugguacgcguucgcacuuucuagggguuuuggcuccgggauaauuacaucaaaugugaguauggacgagugugaugccaagugccagacuccacaaggagcuaucaacagcucccugccguuccagaauguccaucccguuaccauuggcgaauguccuaaauaugugcggucuacaaaguugcgcaugguaaccggucuccgaaacaucccaagcauccagucaagagggcuguuuggagccauugcaggcuucauagagggcggguggacgggaaugaucgacgguugguacggcuaucaccaucagaaugaacaagggaguggauacgcugccgaucagaaguccacucagaacgcgauuaauggcaucacaaacaaagugaauagcgucauagagaagaugaacacccaguuuacugccguggguaaagaguucaauaaguuagaaaagaggauggagaaccugaauaagaagguugacgacggguuccucgauauuuggacauacaacgcagaacuucugguguugcuagagaaugaacggacccuggacuuucacgauucuaacgucaaaaaccucuaugagaaggugaaaucacaacugaagaauaacgcuaaagagaucggcaauggaugcuucgaauuuuaccacaaguguaacaaugagugcauggaaaguguaaagaacggcacguaugacuaccccaaauauagcgaggaguccaaacuuaaucgugagaaaaucgaugggguuaagcuggaaucuaugggaguguaccagauuuuggccaucuauucgaccgucgcuagcucccucgugcuguuagucucacugggugccauuaguuucuggaugugcucuaacggcagccuacagugucgcauaugcaucuga

SEQ ID NO: 128915 - RNA, 1698 nt, Artificial Sequence; identical to SEQ ID NO: 128790
  derived and/or modified CDS sequence (opt3) from hemagglutinin__InfluenzaA__ABE11657

SEQ ID NO: 128916 - RNA, 1698 nt, Artificial Sequence
  derived and/or modified CDS sequence (opt3) from hemagglutinin__InfluenzaA__ABE11668
augaaggccaaacugcucgugcuucugugcaccuucacagcuacuuacgcagacacgaucuguauuggcuaucacgccaacaauagcaccgauacagucgacacuguuuuggagaagaacgugaccguaacacauuccgugaauuuacuggaagauucucacaacgggaaacuaugccuccugaagggaauagcgccccuucagcuggguaauuguucagucgcuggcuggaucuuggggaacccugagugcgaacuccugauuaguaaagagagcugguccuacaucguggaaaccccaaauccggagaacggaacuuguuaucccggcuacuuugccgacuaugaggaacugagagagcaacucucuucgguuagcucauucgaaagguuugagauuuucccuaaggagaguuccuggccaaaucauacagugaccggugucucugcaagcugcucccacaacgggaagucaaguuuuuaccggaauuuacuguggcuuacgggaaagaacggcuuguaucccaaucugagcaugucuuacgugaacaauaaggaaaaagagguucuaguacucuggggcgugcaucacccuccaaacaucggggaucagcgcgcccuguaccacacugaaaacgcuuaugucuccguggugucaagccauuacagucgacguuucacccccgagauagcaaagagaccuaaagucagggaccaggaaggacggaucaauuauuacuggacacuucuggagccaggugauacuauuaucuuugaggccaacggcaauuugauugcuccgugguaugccuucgcgcucucucgcggguuuggauccggcaucauaaccagcaacgcacccauggacgaaugugaugccaagugccagacaccucaaggugcuauuaauucgucucugccauuccagaacguucaccccgugaccaucggggaguguccuaaguacguaagauccgccaaauuaaggauggugacgggacugcggaauauuccaucaauccagagucgcggccucuuuggcgcaaucgcuggguucauugaaggagguuggacuggcauggucgacgggugguauggauaccaucaccagaacgagcaaggcagcgguuacgccgcggaucagaaguccacacagaaugccauaaacgggaucaccaauaaagugaacucuguuauugaaaagaugaauacucaguuuacagcagugggcaaagaguucaacaaacuugagcgaagaauggaaaaucugaacaaaaaggucgacgauggauucuuggacaucuggaccuauaacgcugagcuacuggugcuccuggaaaaugagaggacgcuugacuuucacgauagcaacguaaagaaucuguacgaaaaaguuaagucacaauugaaaaacaaugccaaggagauaggcaacgggugcuucgaguuuuaucauaaauguaauaacgaaugcauggagagugugaagaauggaaccuacgacuaucccaaguacuccgaagagagcaaacucaaccgggagaagauugauggugucaaacuggaaucuaugggcguguaucagaucuuagcuaucuacucaacagucgccaguagccuggugcuacucguuucccugggggcaauuucuuucuggaugugcucgaauggaagccuucagugucguaucugcauuuga

SEQ ID NO: 128917 - RNA, 1698 nt, Artificial Sequence
  derived and/or modified CDS sequence (opt3) from hemagglutinin__InfluenzaA__ABE11679
augaaggugaaacugcucguccuucugugcaccuucacagccacuuacgcugacacgaucuguauuggcuaucacgcaaacaauagcaccgauacaguugacacuguguuggagaagaacguaaccgugacacauuccgucaauuuacuggaagauucucacaacgggaaacuaugccuccugaagggaauagcgccccuucagcuggguaauuguucaguggccggcuggaucuuggggaacccugagugcgaacuccugauuaguaaagagagcugguccuacaucguugaaaccccaaauccggagaacggaacuuguuaucccggcuacuuugcugacuaugaggaacugagagagcaacucucuucggugagcucauucgaaagguuugagauuuucccuaaggagaguuccuggccaaaucauacagucaccggugugucugccagcugcucccacaacgggaagucaaguuuuuaccggaauuuacuguggcuuacgggacgcaacggcuuguaucccaaucugagcaaaucuuacgcaaacaauaaggaaaaagagguacuuguucucuggggcgugcaucacccuccaaacaucggggaucagcgagcccuguaccacacugaaaacgcuuaugucuccguggugucaagccauuacagucguagauucacccccgagauagcaaagaggccuaaaguccgggaccaggaaggacgcaucaauuauuacuggacacuucuggagccaggugauacuauuaucuuugaggccaacggcaauuugauugcuccgagauaugccuucgcgcucucuaggggguuuggauccggcaucauaaccagcaacgcacccauggacgaaugugaugccaagugccagacaccucaaggugcuauuaauucgucucugccauuccagaacguucaccccgugaccaucggggaguguccuaaguacguacgguccgccaaauuacgcauggugacgggacugcgaaauauuccaucaauccagaguagaggccucuuuggcgcaaucgcuggguucauugaaggagguuggacuggcauggucgacgggugguauggauaccaucaccagaacgagcaaggcagcgguuacgccgcggaucagaaguccacacagaaugccauaaacgggaucaccaauaaagugaacucuguuauugaaaagaugaauacucaguuuacagcagugggcaaagaguucaacaagcuagagaggcggauggaaaaucugaacaaaaaggucgacgauggauucuuggacaucuggaccuauaacgcugagcuacuggugcuccuggaaaaugagcguacgcuugacuuucacgauagcaacguaaagaaucuguacgaaaaaguuaagucacaauugaaaaacaaugccaaggagauaggcaacgggugcuucgaguuuuaucauaaauguaaugacgaaugcauggagagugugaagaacggaaccuacgauuaucccaaguacuccgaagagagcaaacucaaucgcgagaagauugacggugucaaacuggaaucuaugggcguguaucagaucuuagcuaucuacucaacagucgccaguagccuggugcuacucguuucccugggggcaauuucuuucuggaugugcucgaacggaagccuucaguguagaaucugcauuuga

SEQ ID NO: 128918 - RNA, 1698 nt, Artificial Sequence
  derived and/or modified CDS sequence (opt3) from hemagglutinin__InfluenzaA__ABE11690
augaaggccaaacugcucgugcuucugugcaccuucacagcuacuuacgcagacacgaucuguauuggcuaucacgccaacaauagcaccgauacagucgacacuguuuuggagaagaacgugaccguaacacauuccgugaauuuacuggaagauucucacaacgggaaacuaugccuccugaagggaauagcgccccuucagcuggguaauuguucagucgcuggcuggaucuuggggaacccugagugcgaacuccugauuaguaaagagagcugguccuacaucguggaaaccccaaauccggagaacggaacuuguuaucccggcuacuuugccgacuaugaggaacugagagagcaacucucuucgguuucaucuuucgaaagguuugagauuuucccuaaggguaguuccuggccaaaucauacagugaccggggucucugcaagcugcucccacaacggaaagucaaguuuuuaccggaauuuacuguggcuuacgggcaaaaacggcuuguaucccaaucugagcaugucuuacgugaacaauaaggagaaagaaguacuuguucucuggggagugcaucacccuccaaacaucgggaaccagcgcgcccuguaccacacugagaaugcuuaugucuccguggugucaagccauuacagucgacguuucacccccgaaauagcaaagagaccuaaagucagggaucaggagggucggaucaacuauuacuggacacuucuggaaccaggcgacacuauuaucuuugaggccaaugggaacuugauugcuccgugguaugccuucgcgcucucucgcggauuuggcuccgguaucauaaccagcaaugcacccaugggggagugugaugccaagugccagacaccucaaggagcuauuaacucgucucugccauuccagaauguucaccccgugaccaucggcgaauguccuaaguacguaagauccgccaaauuaaggauggugacgggccugcggaacauuccaucaauccagagucgcgggcucuuuggagcaaucgcugguuucauugagggcggguggacuggaauggucgacggcugguaugguuaccaucaccagaaugaacaagggagcggcuacgccgcggaucagaaguccacacagaacgccauaaauggaaucaccaacaaagugaauagcguuauugagaagaugaacacucaguuuacagcagugggcaaagaguucaauaagcuagaacgaagaauggagaaccugaacaaaaaggucgacgauggguucuuggacaucuggaccuauaaugcugaacuacuggugcuccuggagaacgaaaggacgcuugauuuucacgacagcaauguaaagaaccuguacgagaaaguuaagucacaauugaaaaauaacgccaaggaaauaggaaaugguugcuucgaguuuuaucauaaauguaacaaugagugcauggaaagugugaagaacggcaccuacgacuaucccaaguacuccgaggaaagcaaacucaaucgggagaagauugauggggucaaacuggagucuaugggaguguaucagaucuuagcuaucuacucaacagucgccaguagccuggugcuacucguuucccugggcgcaauuucuuucuggaugugcucgaacgguagccuucagugucguaucugcauuuga

SEQ ID NO: 128919 - RNA, 1698 nt, Artificial Sequence
  derived and/or modified CDS sequence (opt3) from hemagglutinin__InfluenzaA__ABE11701
augaaggccaaacugcucgugcuucugugcaccuucacagcuacuuacgcagacacgaucuguauuggcuaucacgccaacaauagcaccgauacagucgacacuguuuuggagaagaacgugaccguaacacauuccgugaauuuacuggaagauucucacaacgggaaacuaugccuccugaagggaauagcgccccuucagcuggguaauuguucagucgcuggcuggaucuuggggaacccugagugcgaacuccugauuaguaaagagagcugguccuacaucguggaaaccccaaauccggagaacggaacuuguuaucccggcuacuuugccgacuaugaggaacugagagagcaacucucuucgguuagcucauucgaaagguuugagauuuucccuaaggguaguuccuggccaaaucauacagugaccggggucucugcaagcugcucccacaacggaaagucaaguuuuuaccggaauuuacuguggcuuacgggcaaaaacggcuuguaucccaaucugagcaugucuuacgugaacaauaaggagaaagaaguucuaguacucuggggagugcaucacccuccaaacaucggggaucagaaggcccuguaccacacugagaacgcuuaugucuccguggugucaagccauuacagucgccgauucacccccgaaauagcaaaacguccuaaggucagagaccaggaggguaggaucaauuauuacuggacacuucuggaaccaggcgauacuauuaucuuugaggccaacgggaauuugauugcuccgugguaugccuucgcgcucucucggggauuuggcuccgguaucauaaccagcaacgcacccaugggggagugugacgccaagugccagacaccucaaggagcuauuaauucgucucugccauuccagaacguucaccccgugaccaucggcgaauguccuaaauacguacgcuccgccaaguuaagaauggugacgggccugaggaauauuccaucaauccagagucgggggcucuuuggagcaaucgcugguuucauugagggcggguggacuggaauggucgauggcugguaugguuaccaucaccagaacgaacaagggagcggcuacgccgcggaccagaaauccacacagaaugccauaaacggaaucaccaauaaggugaacucuauuaucgagaaaaugaauacucaguuuacagcaguuggcaaggaguucaacaaacuugaacgccgaauggagaaucugaacaagaagguggaugacggguucuuggauauauggaccuauaacgcugaacuacugguccuccuggagaaugaaagaacgcuugacuuucacgacagcaacgugaaaaaucuguacgagaagguaaaaucacaauugaagaacaaugccaaagaaauuggaaacgguugcuucgaguuuuaucauaaguguaauaacgagugcauggaaaguguuaagaauggcaccuacgauuaucccaaauacuccgaggaaagcaagcucaacagggagaaaaucgacggggugaagcuggagucuaugggagucuaucagaucuuagcuauuuacucaacaguggccaguagccugguccuacucgugucccugggcgcaaucucuuucuggaugugcucgaaugguagccuucagugucggauuugcauauga

SEQ ID NO: 128920 - RNA, 1698 nt, Artificial Sequence; identical to SEQ ID NO: 128848
  derived and/or modified CDS sequence (opt3) from hemagglutinin__InfluenzaA__ABE11712

SEQ ID NO: 128921 - RNA, 1698 nt, Artificial Sequence; identical to SEQ ID NO: 128889
  derived and/or modified CDS sequence (opt3) from hemagglutinin__InfluenzaA__ABE11723

SEQ ID NO: 128922 - RNA, 1698 nt, Artificial Sequence; identical to SEQ ID NO: 128895
  derived and/or modified CDS sequence (opt3) from hemagglutinin__InfluenzaA__ABE11734

SEQ ID NO: 128923 - RNA, 1698 nt, Artificial Sequence; identical to SEQ ID NO: 128848
  derived and/or modified CDS sequence (opt3) from hemagglutinin__InfluenzaA__ABE11812

SEQ ID NO: 128924 - RNA, 1698 nt, Artificial Sequence; identical to SEQ ID NO: 128889
  derived and/or modified CDS sequence (opt3) from hemagglutinin__InfluenzaA__ABE11823

SEQ ID NO: 128925 - RNA, 1698 nt, Artificial Sequence; identical to SEQ ID NO: 128889
  derived and/or modified CDS sequence (opt3) from hemagglutinin__InfluenzaA__ABE11834

SEQ ID NO: 128926 - RNA, 1698 nt, Artificial Sequence; identical to SEQ ID NO: 128889
  derived and/or modified CDS sequence (opt3) from hemagglutinin__InfluenzaA__ABE11845

SEQ ID NO: 128927 - RNA, 1698 nt, Artificial Sequence; identical to SEQ ID NO: 128895
  derived and/or modified CDS sequence (opt3) from hemagglutinin__InfluenzaA__ABE11856

SEQ ID NO: 128928 - RNA, 1701 nt, Artificial Sequence
  derived and/or modified CDS sequence (opt3) from hemagglutinin__InfluenzaA__ABE11900
augaaggccaaacugcucgugcuucugugcgcuuucaccgcaacauacgccgacacuaucuguauuggcuaucacgcgaacaauagcacggauaccgucgacacaguuuuggagaagaacgugacuguaacccauuccgugaauuuacuggaagauucucacaacgggaaacuaugcagacucaagggaacagcuccccugcagcuugguaauuguucagucgccggcuggauacuggggaacccugagugcgaaaguuuguuuagcaaagaguccuggucuuacaucgcagaaaccccaaauccggagaacggaacuuguuaucccggcuacuucgccgacuaugaggaacucagggagcaacugucgucagugagcaguuuugaacgguucgagauuuuuccuaaggaguccucuuggccaaaucauacaguuaccaagggugugacggcuagcugcucccacaacgggaaaucaaguuucuacaagaaucugcucugguuaacugaaaagaacggacuguaucccaaucuuagcaagucuuacgucaacaauaaagagaaggaaguguugguacuguggggcguucaucacccuuccaacaucggcgaucagcgcgcaauuuaccacaccgagaacgccuaugugucagucgugagcagucauuacucucgacguuuuacaccagaaaucgcuaagagacccaaagugagggaccaggaggggcggauaaauuauuacuggacucuacucgagccuggagauaccaucauuuucgaagccaacgguaaucugaucgcgccaugguaugcauuugcccuuucccgcggcuucgggagcggaauuaucacaucgaacgcuucuaugggcgagugugacgccaagugccagaccccgcaaggugcaauaaauuccucacugcccuuucagaacguccacccuguuacgauuggggaauguccaaaauacgugagaaguacuaaguugaggaugguaacaggacuccggaauauccccagcauucagucccgcggccuguucggcgcuaucgccggguuuaucgagggagguuggaccggcaugauugaugggugguauggauaccaucaccagaacgaacaaggcucugguuacgcggccgaccagaaaagcacucagaaugcaauaaacgggaucacaaauaaggugaacucagucauugagaaaaugaauacccaguucacggcugugggcaaggaguucaacaaguuagaacgaagaauggagaaucugaacaaaaagguugaugacggauuucucgauaucuggaccuauaacgccgaacuucugguguugcuagagaaugaaaggacacuggacuuccacgacaguaacgucaaaaaucucuacgagaaggugaaaacucaacugaagaacaaugcuaaggagauaggcaacgggugcuuugaguucuaucauaaauguaauaacgaaugcauggaauccguaaagaauggaaccuacgauuauccuaaauacagcgaggagucuaaacuuaaccgggagaaaauugacgguguuaagcuggaaucaaugggcguguaucagaucuuggccaucuacaguacagucgcaagcucccucgugcuguuaauuucucugggggccaucucguuuuggaugugcagcaauggaucccuacagugucguauuugcauauga

SEQ ID NO: 128929 - RNA, 1701 nt, Artificial Sequence
  derived and/or modified CDS sequence (opt3) from hemagglutinin__InfluenzaA__ABE11942
augaaggccaaacugcucgugcuucugugcgcuuucaccgcaacauacgccgacacuaucuguauuggcuaucacgcgaacaauagcacggauaccgucgacacaguuuuggagaagaacgugacuguaacccauuccgugaauuuacuggaagauucucacaacgggaaacuaugcagacucaagggaacagcuccccugcagcuugguaauuguucagucgccggcuggauacuggggaacccugagugcgaaaguuuguuuagcaaagaguccuggucuuacaucgcagaaaccccaaauccggagaacggaacuuguuaucccggcuacuucgccgacuaugaggaacucagggagcaacugucgucagugagcaguuuugaacgguucgagauuuuuccuaaggaguccucuuggccaaaucauacaguuaccaagggugugacggcuagcugcucccacaacgggaaaucaaguuucuacaagaaucugcucugguuaacugaaaagaacggacuguaucccagccuuucuaaguccuacgucaauaacaaagagaaggaaguguugguacuguggggcguucaucacccuucaaauaucggcgaucagcgcgcaauuuaccacaccgagaacgccuaugugagcgucgugaguucucauuacucccgacguuuuacaccagaaaucgcuaagagacccaaagugagggaccaggaggggcggauaaacuauuacuggacucuacucgagccuggagauaccaucauuuucgaagccaaugguaaccugaucgcgccaugguaugcauuugcccuuagccgcggcuucgggucgggaauuaucacaucuaaugcuuccaugggcgagugugacgccaagugccagaccccgcaaggugcaauaaacucaagucugcccuuucagaauguccacccuguuacgauuggggaauguccaaaauacgugagaagcacuaaguugaggaugguaacaggacuccggaacauccccuccauucagucucgcggccuguucggcgcuaucgccggguuuaucgagggagguuggaccggcaugauugaugggugguauggauaccaucaccagaaugaacaaggcagcgguuacgcggccgaccagaaaucaacucagaacgcaauaaaugggaucacaaacaaggugaauagugucauugagaaaaugaacacccaguucacggcugugggcaaggaguucaauaaguuagaacgaagaauggagaaccugaauaaaaagguugaugacggauuucucgauaucuggaccuauaacgccgaacuucugguguugcuagagaacgaaaggacacuggacuuccacgacuccaaugucaaaaaccucuacgagaaggugaaaacucaacugaagaauaacgcuaaggagauaggcaaugggugcuuugaguucuaucauaaauguaacaaugaaugcauggaaagcguaaagaacggaaccuacgauuauccuaaauacucugaggagucaaaacuuaaucgggagaaaauugacgguguuaagcuggaaaguaugggcguguaucagaucuuggccaucuacagcacagucgcauccucucucgugcuguuagucucgcugggggccauuagcuuuuggaugugcuccaacggaucacuacagugucguaucugcauuuga

SEQ ID NO: 128930 - RNA, 1701 nt, Artificial Sequence
  derived and/or modified CDS sequence (opt3) from hemagglutinin__InfluenzaA__ABE12078
augaagaccaucauugcccugagcuacauacucugccuuguguucgcucagaaacugcccggcaacgacaauuccacagcaacuuuguguuuagggcaccaugccgucccuaacggaacgcugguuaagaccaucacaaaugaucaaauugaggugacuaacgcgaccgaacuuguacagucuucaaguacagguggcaucugcgacagcccacaccagauucucgauggggagaauuguacccugaucgacgcucuacugggagauccgcauugcgacggcuuucagaacaaagaaugggauuuguucguggagagauccaaggccuauucuaauuguuaccccuaugacgucccugauuacgcaucgcucaggucacugguggccagcagugguacucuggaauuuaacaaugaguccuucaacuggacagggguugcucaaaauggaaccucuagcgcaugcaaacggcgcuccaacaagucauuuuucagucgacucaauugguuacaccagcugaaguauaaauacccagcccuuaacgugacgaugcccaauaacgagaaguuugacaaauuguauauauggggcguccaucacccuagcacugauucugaccagaucucccuguacgcucaggccccaggccgugugaccguaucaacaaagagaagccaacagacuguuauucccaacaucgggaguaggccuugggugcggggagucucuucccgcauuagcaucuacuggaccauagugaaaccaggugauauucuacucaucaauuguacaggcaaccugauugcgccgagaggguauuucaagaucaggucgggaaagucuuccaucaugcggucagacgcaaguauuggcaaaugcaauagcgaauguauaacccccaacgguuccaucccuaaugacaagccauuucagaacgugaaucgcauuacguacggggccugcccccgauaugucaaacagaacacucuuaagcuggcuacaggaaugagaaauguuccugagaaacaaaccaggggcaucuucggcgccauagcaggguuuauugaaaacggaugggaggguaugguggauggcugguacggguuccggcaccaaaauucugagggaacuggccaggcugccgacuugaaaagcacacaggcggccaucaaccagaucaaugguaaacucaaccgucugauugaaaagaccaaugagaaguuucaucagaucgaaaaagaguucucagaaguagaggggcgcauucaggauuuagagaaguauguggaagacacgaaaauagaucuguggaguuacaacgcagagcuccuugucgcucuggaaaaccaacacaccaucgacuugacagauuccgagaugaauaagcuauucgaaaagacuaagaagcagcugagagagaacgccgaggacaugggcaauggauguuuuaaaauuuaucauaagugcgauaacgcuugcaucggcagcaucaggaaugggaccuacgaccacgauguguaccgggacgaagcccucaacaaucgauuccagauuaaaggaguugagcugaagucugguuauaaagacuggauacuuuggaucucauuugcaauuaguuguuuccuguugugcgugguccuccugggcuuuaucaugugggccugucagaaggggaacauucgcugcagcaucuguauauga

SEQ ID NO: 128931 - RNA, 1701 nt, Artificial Sequence; identical to SEQ ID NO: 128825
  derived and/or modified CDS sequence (opt3) from hemagglutinin__InfluenzaA__ABE12123

SEQ ID NO: 128932 - RNA, 1698 nt, Artificial Sequence; identical to SEQ ID NO: 128848
  derived and/or modified CDS sequence (opt3) from hemagglutinin__InfluenzaA__ABE12248

SEQ ID NO: 128933 - RNA, 1701 nt, Artificial Sequence
  derived and/or modified CDS sequence (opt3) from hemagglutinin__InfluenzaA__ABE12623
augaagaccaucauugcccugagcuacauauucugccucgugcuuggccaggaccugcccgggaacgauaauuccacagcuacuuuguguuuaggacaccaugcagucccuaacgguacgcugguuaaaaccaucacaaaugaccaaauugaggugacuaacgccaccgagcuaguacagucuucaaguacaggcaagaucugcaauaacccacacaggauucucgaugggaucgacuguacccugauagaugcgcuucugggagacccgcauugcgauggcuuucagaaugaaacuugggacuuguucguggaaagaagcaaggcuuuuuccaacuguuaucccuacgaugucccugacuaugccucucuccggucgcugguggcaucaagcgguacacuggaguucaucaaugaaggguuuaccuggacgggaguuacucagaacggcggcaguaaugccugcaagcgcgggccagauuccggauucuuuucucgacucaacugguuauacaaaagcgguuccaccuaucccgugcugaaugucacaaugccuaacaaugacaacuucgauaaacuuuacauuuggggcgugcaccauccaucaacuaaccaagagcagaccaguuuguauguacaggcuagcgggcguguuacagugucuaccaagagaucccagcaaacgaucauucccaauaucggaucaaggccuuggguccggggccugagcagucgcauaucuauuuacuggacuaucgugaaaccaggugacauucuagugaucaacuccaaugggaaccucaucgcaccgagaggauacuuuaagaugaggacaggcaaaagcucgauuaugcggucugacgcccccauaggcaccuguaucuccgagugcauuacuccuaaugggucaaucccaaacgauaagcccuuccagaaugucaacaaaauaacauauggagcuuguccuaaguacguuaagcagaauacccugaaacuugccacggguaugcgcaacgugccagaaaagcagacccgaggccuguuuggggcgauugcaggauucaucgagaauggcugggaagguaugaucgacgggugguauggcuuuagacaccaaaacagugagggaacaggccaggccgcugauuugaaaagcacucaggccgcaauugaccaaaucaaugggaagcucaacaggguaauugagaaaaccaaugaaaaguuccaccagauagagaaagaguucuccgaaguggaaggacggauccaggaucuggagaaguacgucgaggacacaaagauugauuuauggucuuauaacgcugaacugcucguggcccuugagaaccagcauacuaucgaccugaccgauagcgaaaugaauaaauuguuugagaagacacgucgccaacuaagagaaaacgcggaggacauggguaauggcugcuucaggaucuaccacaaaugugauaacgccugcauugggucaauacggaauggaaccuaugaccaugacguuuaccgagaugaggcacugaacaaucgcuuucagaucaagggcguggaacucaaaagugguuacaaggacuggauucuguggaucuccuucgcuauuagcugcuuucuucugugugucguguugcucggguucaucaugugggccugccagaagggcaacauaagauguaauaucugcauuuga

SEQ ID NO: 128934 - RNA, 1701 nt, Artificial Sequence; identical to SEQ ID NO: 128878
  derived and/or modified CDS sequence (opt3) from hemagglutinin__InfluenzaA__ABE12645

SEQ ID NO: 128935 - RNA, 1701 nt, Artificial Sequence; identical to SEQ ID NO: 128855
  derived and/or modified CDS sequence (opt3) from hemagglutinin__InfluenzaA__ABE13076

SEQ ID NO: 128936 - RNA, 1701 nt, Artificial Sequence; identical to SEQ ID NO: 128831
  derived and/or modified CDS sequence (opt3) from hemagglutinin__InfluenzaA__ABE13323

SEQ ID NO: 128937 - RNA, 1701 nt, Artificial Sequence
  derived and/or modified CDS sequence (opt3) from hemagglutinin__InfluenzaA__ABE13471
augaagaccaucauugcccugagcuacauacucugccuuguguucgcucagaaacugcccggcaacgacaauuccacagcaacuuuguguuuagggcaccaugccgucccuaacggaacgcugguuaagaccaucacaaaugaucaaauugaggugacuaacgcgaccgaacuuguacaaaauucuucaacagguagaaucugcgacaguccacacaggauucucgauggcaaaaacuguacccugaucgacgcucuacugggggauccgcauugcgacggauuucagaauaaggagugggauuuguucguggaacggagcaaagccuauuccaacuguuaccccuaugacgucccugauuacgcaucucuccgcucgcugguggccucaagcggcacucuggaguuuuauaaugaaaguuucaacuggacagguguugcucagaaugggaccuccuacgcaugcaagcgacguucugugaaguccuuuuucuccagacucaacugguuacacaaacuggaguauaaguacccagcccuuaaugucacgaugcccaacaaugacaaauuugauaaguuguacauauggggagugcaucacccuucaacugacagugaucagaccagccuguauguacaggcuucuggcaggguuacaguguccacuaaacggucacagcagaccgucaucccaaacauuggcagccgccccugggugagaggggugaguucuaggaucuccauuuacuggacaaucgucaagccuggagacauacuacucauuaacagcaccgguaaucugaucgccccacggggcuauuucaagauucgcucggggaaaucuuccaucaugcgaucagacgcgccgaucggaaacuguaauagugagugcauuacgcccaacggcagcauaccuaaugauaagccauuucaaaacguuaauagaaucacuuacggugcaugucccagguaugugaaacagaacacacuuaagcuggccaccgggaugcggaauguaccugaaaaacagacucguggaauuuucggcgcuaucgccggcuuuauagagaacgggugggaaggaaugguggacgguugguacggcuuccgccaccagaauagcgaggggacaggacaagcagcugauuugaagucuacccaggccgcgauuaaccagaucaauggcaaacucaacagacugaucgagaagacgaaugaaaaguuucaucaaauugagaaagaguucagcgaagucgaagguaggauccaggacuuagagaaguauguggaggauaccaaaauugaccuguggucauacaacgccgaacuccuuguugcacuggagaaccagcacacaauagauuugacugacagugaaaugaauaagcuauucgagcggacccgaaaacagcugcgcgaaaacgcugaggauauggggaauggcugcuuuagaaucuaccauaagugugacaacgccugcauuggauccaucaggaauggcacauaugaucacgacguguaccgggacgaggcucucaacaaucgcuuccaaaucaagggggucgaacugaaaagcggauauaaggauuggauucuuuggauaucuuuugccaucucaugcuuccuguugugugugguacuccuggguuuuauuaugugggcaugccagaaaggcaacaucagauguaauauuugcaucuga

SEQ ID NO: 128938 - RNA, 1701 nt, Artificial Sequence
  derived and/or modified CDS sequence (opt3) from hemagglutinin__InfluenzaA__ABE13555
augaagaccaucauugcccugagcuacauacucugccuuguguucgcucagaaacugcccggcaacgacaauuccacagcaacuuuguguuuagggcaccaugccgucccuaacggaacgcugguuaagaccaucacaaaugaucaaauugaggugacuaacgcgaccgaacuuguacaggguucuucaacaggcagaaucugcgacaguccacacaggauucucgaugggaaaaauuguacccugaucgacgcucuacugggagauccgcauugcgacggcuuucagaacaaggagugggauuuguucguggaacggagcaaagccuauuccaauuguuaccccuaugacgucccugauuacgcaucucuccgcucgcugguggccucaagcgguacucuggaguuuaacaaugaaaguuucaacuggacagggguugcucagaauggaaccuccuaugcaugcaagcgacguucugucaagagcuuuuucuccagacucaacugguuacacaaacuggaguacaaguauccagcccuuaaugugacgaugcccaacaaugacaaauuugauaaguuguacauauggggcgugcaucacccuucaacugacagugaucaaaccagccuguacguacaggcuucuggcaggguuacaguguccacuaaacggucacagcagaccgucaucccaaacauugggagccgccccugggugagaggagugaguucuaggaucuccauuuauuggacaaucgucaagccuggugacauacuacucauuagcucgaccggcaaccugaucgccccacggggguacuucaagauucgcucuggaaaauccucaaucaugcgaagugacgcgccgaucgauaauuguaacagcgagugcauuacgcccaauggcuccauaccuaacgacaagccauuucaaaauguuaacagaaucacuuauggugcaugucccagguacgugaaacagaauacacuuaagcuggccaccgggaugcggaacguaccugaaaaacagacuaagggaauuuucggcgcuaucgccggcuuuauagagaaugggugggaaggaaugguggaugguugguauggcuuccgucaccagaacucugaggggacaggacaagcagcugacuugaaaagcacccaggccgcgauuaaucagaucaacggcaagcucaaucgccugaucgagaagacgaacgaaaaauuucaucaaauugagaaggaguucucagaagucgaagguagaauccaggauuuagagaaauacguggaggacaccaagauugaucuguggaguuauaaugccgaacuccuuguugcacuggagaaccagcacacaauagacuugacugauuccgaaaugaacaaacuauucgagaggacccggaagcagcugcgagaaaaugcugaggacauggggaacggcugcuuuaagaucuaccauaaaugugauaaugccugcauuggaagcauccgcaacggcacauacgaccacgacguguauagagaugaggcucucaauaacagguuccaaaucaagggggucgaacugaaaucuggauacaaggacuggauucuuuggauaucauuugccaugaguugcuuccuguugugugugguacuccuggguuuuaucaugugggcaugccagaaaggcaauauucgguguaacaucugcauuuga

SEQ ID NO: 128939 - RNA, 1701 nt, Artificial Sequence
  derived and/or modified CDS sequence (opt3) from hemagglutinin__InfluenzaA__ABE13606
augaagaccaucauugcccugagcuacauacucugccuuguguucgcucagaaacugcccggcaacgacaauuccacagcaacuuuguguuuagggcaccaugccgucccuaacggaacgcugguuaagaccaucacaaaugaucaaauugaggugacuaacgcgaccgaaaugguacagucuucaaguacagguagaaucugcgacagcccacacaggauucuagauggcaaaaauuguacccucaucgacgcucugcuuggggauccgcauugcgacggauuucagaacaaggagugggaucuguucguggaacgguccaaagccuauucuaauuguuaccccuaugacgucccugauuacgcaucguugcgcucacucguggccagcaguggcacucuggaguuuacaaacgaagguuucaauuggaccgggguugcucaggacggaacguccuaugcaugcaagcgaggcucugugaaguccuuuuucucccgucugaacuggcuccacaaauuagaguacaaguauccagcccugaaugucacuaugcccaacaaugauaaauuugacaaguuguacauauggggcgugcaucacccuucaaccgauagugaccaaacaagccuuuacguacaggcuucugggagaguuacuguguccaccaaaaggucacagcagacagucaucccaaacauuggaagccggcccugggugcgcggugugaguucuagaaucuccauuuauuggaccaucgucaagccuggcgacauacugcuaauuaauagcacggggaaccucaucgccccaaggggauacuucaagauucggucgggcaaaucuuccaucaugcgcucagaugcgccgaucgguaacuguaauagugagugcauuacucccaacgggagcauaccuaaugacaagccauuucaaaacguuaaucgaaucacauauggagcaugucccagauacgugaaacagaacacccugaaacuugccacuggcaugaggaauguaccugaaaagcagacacggggcauuuucggggcuaucgccggauuuauagagaacgguugggaaggcaugguggaugggugguauggauuccgucaccagaauagcgagggcaccggucaagcagcugaccugaagucuacgcaggccgcgauuaaccagaucaaugggaaauugaaccgccucaucgagaagaccaaugaaaaguuucaucaaauugagaaagaguucagcgaagucgaaggcagaauccaggaucuggagaaguacguggaggacacaaaaauugauuuauggucauauaacgccgaacugcucauagcacuugagaaucagcacacuaucgaccugaccgauagugaaaugaacaaguuguucgagaggacacggaaacagcuacgagaaaacgcugaggacaugggaaauggcugcuuuaagauuuaccauaagugugauaacgccugcaucggguccauccgcaauggaacuuacgaccacgacguuuauagagaugaggcucugaacaauagguuccaaauuaaagguguggaacucaagagcggcuacaaagacuggauacuguggaucucuuuugccauuucaugcuuccuucugugugucguguugcucggguuuaucaugugggcaugccagaagggaaacauucgguguaauaucugcauauga

SEQ ID NO: 128940 - RNA, 1701 nt, Artificial Sequence
  derived and/or modified CDS sequence (opt3) from hemagglutinin__InfluenzaA__ABE13628
augaagaccaucauugcccugagcuacauacucugccuuguguucgcucagaaacugcccggcaacgacaauuccacagcaacuuuguguuuagggcaccaugccgucccuaacggaacgcugguuaagaccaucacaaaugaucaaauugaggugacuaacgcgaccgaacuuguacagucuucaaguacagguagaaucugcgacagcccacacaggauucucgauggcaaaaauuguacccugaucgacgcucuacugggggauccgcauugcgacggauuucagaacaaggagugggauuuguucguggaacgguccaaagccuauucuaauuguuaccccuaugacgucccugauuacgcaucgcuccgcucacugguggccagcaguggcacucuggaguuuacaaacgaagguuucaauuggaccgggguugcucaggacggaaaguccuaugcaugcaagcgaggcucugugaacagcuuuuucucccgucucaauugguuacacaaacuggaguacaaguauccagcccuuaacgucacgaugcccaauaacgauaaauuugacaaguuguacauauggggcgugcaucacccuucaacugauagugaccaaaccagccuguacguacaggcuucugggagaguuacaguguccacuaaaaggucacagcagaccgucaucccaaauauuggaagccggcccugggugcgcgguaucaguucuagaauuuccaucuauuggacaauagugaagccuggcgacauucuacucaucaacagcaccgggaaccugauugccccaaggggauacuucaagauccggaauggcaaaucgucuaucaugcgcuccgaugcgccgauugacaacuguaauucagagugcauaacgcccaacgguaguaucccuaaugauaagccauuucaaaacgucaaucgaauuacuuauggggcaugucccagauacguuaaacagaacacacuuaagcuggccaccggaaugaggaaugugccugaaaaacagacucggggcaucuucggcgcuauagccggguuuauugagaacggaugggaagguaugguagacggcugguauggguuccgucaccagaauagcgagggaacaggccaagcagcugauuugaaguccacccaggccgcgaucgaccagaucaacgguaaacucaaucgccugauugagaagacgaacgaaaaguuucaucaaaucgagaaagaguucucugaaguggaagggaggauucaggauuuagagaaguacgucgaggacaccaaaauagaucuguggagcuauaaugccgaacuccuuguggcacuggagaaccagcacacaaucgacuugacugauucagaaaugaacaagcuauucgagagaacccggaaacagcugcgagaaaaugcugaggacaugggcaacggaugcuuuaagauuuaccauaagugugacaaugccugcaucggcaguauccgcaacgggacauacgaucacgacguuuauagagaugaggcucucaauaacagguuccaaauuaaaggaguggaacugaaguccgguuacaaagacuggauacuuuggaucagcuuugccauuucuugcuuccuguugugugucgugcuccugggcuuuaucaugugggcaugccagaaggggaauauucgguguaacaucugcauauga

SEQ ID NO: 128941 - RNA, 1701 nt, Artificial Sequence
  derived and/or modified CDS sequence (opt3) from hemagglutinin__InfluenzaA__ABE13824
augaagaccaucauugcccugagcuacauacucugccagguguucgcucaaaaacuucccggcaacgacaauuccacagcaacucuguguuuggggcaccaugccgucccuaacggaacguuaguuaagaccaucacaaaugaucagauugaggugacuaacgcgaccgaacugguacagucuucaaguacagguagaaucugcgacagcccacacaggauucuagauggcaaaaauuguacccucaucgacgcucugcuuggggauccgcauugcgacggauuucagaacaaggagugggaucuguucguggaacgguccaaagccuauucuaauuguuaccccuaugacgucccugauuacgcaucguugcgcucacucguggccagcaguggcacucuggaguuuacaaacgaagguuucaauuggaccgggguugcucaagacggaaaguccuaugcaugcaagcgaggcucugugaacagcuuuuucucccgucugaauuggcuccacaaauuagaguacaaguauccagcccugaacgucacgaugcccaauaacgauaaauuugacaaacuuuacauauggggcgugcaucacccuucaacugauagugaccagaccagcuuguacguacaggcuucugggagaguuacaguguccacuaagaggucacagcaaaccgucaucccaaauauuggaagccggcccugggugcgcgguaucaguucuagaauuuccaucuauuggacaauagugaagccuggcgacauucugcuaaucaacagcaccgggaaccucauugccccaaggggauacuucaagauccggaauggcaaaucgucuaucaugcgcuccgaugcgccgauugacaacuguaauucagagugcauaacgcccaacgguaguaucccuaaugauaagccauuucagaacgucaaucgaauuacuuauggggcaugucccagauacguuaaacagaacacacugaaacuugccaccggaaugaggaaugugccugaaaagcagacucggggcaucuucggcgcuauagccggguuuauugagaacggaugggaagguaugguagacggcugguauggguuccgucaccaaaauagcgagggaacaggccaggcagcugaucugaaguccacccaggccgcgaucgaccaaaucaacgguaaauugaaucgccucauugagaagacgaacgaaaaguuucaucagaucgagaaagaguucucugaaguggaagggaggauucaggaucuggagaaguacgucgaggacaccaaaauagauuuauggagcuauaaugccgaacugcucguggcacuugagaaccagcacacaaucgaccugacugauucagaaaugaacaaguuguucgagagaacccggaaacaacuacgagaaaaugcugaggacaugggcaacggaugcuuuaagauuuaccauaagugugacaaugccugcaucggcaguauccgcaacgggacauacgaucacgacguuuauagagaugaggcucugaauaacagguuccagauuaaaggaguggaacucaaguccgguuacaaagacuggauacuguggaucagcuuugccauuucuugcuuccuucugugugucguguugcucggcuuuaucaugugggcaugccagaaggggaauauucgguguaacaucugcauauga

SEQ ID NO: 128942 - RNA, 1701 nt, Artificial Sequence; identical to SEQ ID NO: 128941
  derived and/or modified CDS sequence (opt3) from hemagglutinin__InfluenzaA__ABE14019

SEQ ID NO: 128943 - RNA, 1701 nt, Artificial Sequence
  derived and/or modified CDS sequence (opt3) from hemagglutinin__InfluenzaA__ABE14030
augaagaccaucauugcccugagcuacauacucugccuuguguucgcucagaaacugcccggcaacgacaauuccacagcaacuuuguguuuagggcaccaugccgucccuaacggaacgcugguuaagaccaucacaaaugaucaaauugaggugacuaacgcgaccgaacuuguacagucuucaaguaucgguagaauuugcgacagcccacacaggauccucgauggcaaaaauuguacacugauagacgcucuacugggggauccgcauugcgacggauuucagaacaaggagugggauuuguucguggaacgguccaaagccuauucuaauuguuaccccuaugacgucccugauuacgcaucgcuccgcucacugguggccagcaguggcacccuggaguuuacuaacgaagguuucaauuggacagggguugcucaggacggaaaguccuaugcaugcaagcgaggcucugugaacagcuuuuucucccgucucaauugguuacacaaacuggaguacaaguauccagcccuuaacgucaccaugcccaauaacgauaaauuugacaaguuguacaucuggggcgugcaucacccuucaacggauagugaccaaacuagccuguacguacaggcuucugggagaguuaccguguccacaaaaaggucacagcagacugucauuccaaauaucggaagccggcccugggugcgcgguauuaguucuagaaucuccauauauuggaccauugugaagccuggcgacauccuacucauuaacagcacagggaaccugaucgccccaaggggauacuucaagauccggaauggcaaaucgucuauuaugcgcuccgaugcgccgauagacaacuguaauucagagugcaucacccccaacgguaguauuccuaaugauaagccauuucaaaacgucaaucgaaucacguauggggcaugucccagauacguuaaacagaacacucuuaagcuggccacaggaaugaggaaugugccugaaaaacagacccggggcauauucggcgcuauugccggguuuaucgagaacggaugggaagguaugguagacggcugguauggguuccgucaccagaauagcgagggaacuggccaagcagcugauuugaaguccacacaggccgcgaucgaccagauuaacgguaaacucaaucgccugaucgagaagaccaacgaaaaguuucaucaaauugagaaagaguucucugaaguggaagggagaauacaggauuuagagaaguacgucgaggacacgaaaaucgaucuguggagcuauaaugccgaacuccuuguggcacuggagaaccagcacaccauugacuugacagauucagaaaugaacaagcuauucgagaggacucggaaacagcugcgagaaaaugcugaggacaugggcaacggaugcuuuaagaucuaccauaagugugacaaugccugcaucggcaguauucgcaacgggaccuacgaucacgacguuuauagagaugaggcucucaauaacagguuccaaauaaaaggaguggaacugaaguccgguuacaaagacuggauccuuuggauuagcuuugccaucucuugcuuccuguugugugucgugcuccugggcuuuauuaugugggcaugccagaaggggaauauccgguguaacauaugcaucuga

SEQ ID NO: 128944 - RNA, 1701 nt, Artificial Sequence; identical to SEQ ID NO: 128940
  derived and/or modified CDS sequence (opt3) from hemagglutinin__InfluenzaA__ABE14041

SEQ ID NO: 128945 - RNA, 1701 nt, Artificial Sequence; identical to SEQ ID NO: 128941
  derived and/or modified CDS sequence (opt3) from hemagglutinin__InfluenzaA__ABE14063

SEQ ID NO: 128946 - RNA, 1701 nt, Artificial Sequence
  derived and/or modified CDS sequence (opt3) from hemagglutinin__InfluenzaA__ABE14124
augaagaccaucauugcccugagcuacauacucugccuuguguucgcucagaaacugcccggcaacgacaauuccacagcaacuuuguguuuagggcaccaugccgucccuaacggaacgcugguuaagaccaucacaaaugaucaaauugaggugacuaacgcgaccgagcuaguacagucuucaaguacagguagaaucugcgacagcccacacaggauucucgauggcaaaaauuguacccugaucgacgcucugcugggggauccgcauugcgacggauuucagaacaaggaaugggauuuguucguggaacgguccaaagccuauucuaauuguuaccccuaugacgucccugauuacgcaucgcuccgcucacugguggccagcaguggcacucuggaguuuacaaacgaagguuucaauuggaccgggguugcucaggacggaacguccuaugcaugcaagcgaggcucugugaaguccuuuuucucccgucucaacugguuacacaaacuggaguacaaguauccagcccuuaaugucacuaugcccaacaaugauaaauuugacaaguuguacauauggggcgugcaucacccuucaaccgauagugaccaaacaagccuguacguacaggcuucugggagaguuacuguguccaccaaaaggucacagcagacagucaucccaaacauuggaagccggcccugggugcgcggugugaguucuagaaucuccauuuauuggaccaucgucaagccuggcgacauacuacucauuaauagcacggggaaccugaucgccccaaggggauacuucaagauucggucgggcaaaucuuccaucaugcgcucagaugcgccgaucgguaacuguaauagugagugcauuacucccaacgggagcauaccuaaugacaagccauuucaaaacguuaaucgaaucacauauggagcaugucccagauacgugaaacagaacacccuuaagcuggccacuggcaugaggaauguaccugaaaaacagacacggggcauuuucggggcuaucgccggauuuauagagaacgguugggaaggcaugguggaugggugguauggauuccgucaccagaauagcgagggcaccggucaagcagcugacuugaagucuacgcaggccgcgauuaaccagaucaaugggaaacucaaccgccugaucgagaagaccaaugaaaaguuucaucaaauugagaaagaguucagcgaagucgaaggcagaauccaggauuuagagaaguacguggaggacacaaaaauugaucuguggucauauaacgccgaacuccuuauagcacuggagaaucagcacacuaucgacuugaccgauagugaaaugaacaagcuauucgagaggacacggaaacagcugcgagaaaacgcugaggacaugggaaauggcugcuuuaagauuuaccauaagugugauaacgccugcaucggguccauccgcaauggaacuuacgaccacgacguuuauagagaugaggcucucaacaauagguuccaaauuaaagguguggaacuuaagagcggcuacaaagacuggauacuuuggaucucuuuugccauuucaugcuuccuguugugugucgugcuccugggguuuaucaugugggcaugccagaagggaaacauucgguguaauaucugcauauga

SEQ ID NO: 128947 - RNA, 1701 nt, Artificial Sequence
  derived and/or modified CDS sequence (opt3) from hemagglutinin__InfluenzaA__ABE14464
augaagaccaucauugcccugagcuacauacucugccagguguucgcucaaaaacuucccggcaacgacaauuccacagcaacucuguguuuggggcaccaugccgucccuaacggaacguuaguuaagaccaucacaaaugaucagauugaggugacuaacgcgaccgaacugguacagucuucaaguacagguagaaucugcgacagcccacacaggauucuagauggcaaaaauuguacccucaucgacgcucugcuuggggauccgcauugcgacggauuucagaacaaggagugggaucuguucguggaacgguccaaagccuauucuaauuguuaccccuaugacgucccugauuacgcaucguugcgcucacucguggccagcaguggcacucuggaguuuacaaacgaagguuucaauuggaccgggguugcucaagacggaaaguccuaugcaugcaagcgaggcucugugaacagcuuuuucucccgucugaauuggcuccacaaauuagaguacaaguauccagcccugaacgucacgaugcccaauaacgauaaauuugacaaacuuuacauauggggcgugcaucacccuucaacugauagugaccagaccagcuuguacguacaggcuucugggagaguuacaguguccacuaagaggucacagcaaaccgucaucccaaauauuggaagccggcccugggugcgcgguaucaguucuagaauuuccaucuauuggacaauagugaagccuggcgacauucugcuaaucaacagcaccgggaaccucauugccccaaggggauacuucaagauccggaauggcaaaucgucuaucaugcgcuccgaugcgccgauugacaacuguaauucagagugcauaacgcccaacgguaguaucccuaaugauaagccauuucagaacgucaaucgaauuacuuauggggcaugucccagauacguuaaacagaacacacugaaacuugccaccggaaugaggaaugugccugaaaagcagacucggggcaucuucggcgcuauagccggguuuauugagaacggaugggaagguaugaucgacggcugguauggguuccgucaccaaaauagcgagggaacaggccaggcagcugaucugaaguccacccaggccgcgaucgaccaaauuaacgguaaauugaaucgccucaucgagaagacgaacgaaaaguuucaucagauugagaaagaguucucugaaguagaagggagaauacaggaucuggagaaguacguggaggacaccaaaaucgauuuauggagcuauaaugccgaacugcucgucgcacuugagaaccagcacacaauugaccugacugauucagaaaugaacaaguuguucgagaggacccggaaacaacuacgagaaaaugcugaggacaugggcaacggaugcuuuaagaucuaccauaagugugacaaugccugcaucggcaguauucgcaacgggacauacgaucacgacguguauagagaugaggcucugaauaacagguuccagauaaaaggaguugaacucaaguccgguuacaaagacuggauccuguggauuagcuuugccaucucuugcuuccuucuguguguggucuugcucggcuuuauuaugugggcaugccagaaggggaauauccgguguaacauaugcaucuga

SEQ ID NO: 128948 - RNA, 1701 nt, Artificial Sequence
  derived and/or modified CDS sequence (opt3) from hemagglutinin__InfluenzaA__ABE14840
augaagaccaucauugcccugagcuacauacucugccuuguguucgcucagaaacugcccagaaacgacaauuccacagcaacuuuguguuuaggccaccaugccgucccuaacgggacgcugguuaagaccaucacaaaugaucaaauugaggugacuaacgcgaccgagcuaguacagucuucaaguacaggaaggaucugcgacagcccacaccggauucucgaugguaaaaauuguacccugaucgacgcucugcugggcgauccgcauugcgacggguuucagaacaaggaaugggauuuguucguggaacgcuccaaagccuauucuaauuguuaccccuaugacgucccugauuacgcaucgcuccgaucacugguggccagcaguggaacucuggaguuuacaaacgaaggcuucaauuggaccgguguugcucaggacgggaaguccuaugcaugcaagcguggaucugugaacagcuuuuucuccagacucaauugguuacacaaacuggaguacaaguauccagcccuuaacgucacgaugcccaauaacgauaaauuugacaaguuguacauauggggcgugcaucacccuucaacugauagugaccaaaccagccuguacguacaggcuucuggcaggguuacaguguccacuaaacggucacagcagaccgucaucccaaauauugggagccgccccugggugagaggaaucaguucuaggauuuccaucuauuggacaauagugaagccuggugacauucuacucaucagcucgaccggcaaccugauugccccacggggguacuucaagauccgcaacggaaaaucuuccaucaugcgaucagaugcgccgauugacaauuguaacagugagugcauaacgcccaauggcagcaucccuaacgauaagccauuucaaaaugucaacagaauuacuuauggugcaugucccagguacguuaaacagaauacacuuaagcuggccaccgggaugcggaacgugccugaaaaacagacucguggaaucuucggcgcuauagccggcuuuauugagaaugggugggaaggaaugguagacgguugguauggcuuccgccaccagaacuccgaggggacaggacaagcagcugauuugaagucuacccaggccgcgaucgaccagaucaauggcaaacucaacagacugauugagaagacgaaugaaaaguuucaucaaaucgagaaagaguucagcgaaguggaagguaggauucaggauuuagagaaguacgucgaggacaccaaaauagaucuguggucauauaacgccgaacuccuuguggcacuggagaaucagcacacaaucgacuugacugauagugaaaugaacaagcuauucgagcggacccgaaaacagcugcgcgaaaacgcugaggacauggggaauggcugcuuuaagauuuaccauaagugugacaacgccugcaucggauccaucagaaauggcacauacgaucacgacguuuauagggaugaggcucucaacaaucgguuccaaauuaaagggguggaacuuaagagcggauacaaagacuggauacuuuggaucucuuuugccauuucaugcuuccuguugugugucgugcuccuggguuuuaucaugugggcaugccagaagggcaacauucgcuguaguaucugcauauga

SEQ ID NO: 128949 - RNA, 1701 nt, Artificial Sequence
  derived and/or modified CDS sequence (opt3) from hemagglutinin__InfluenzaA__ABE15578
augaagaccaucauugcccugagcuacauacucugccuuguguucgcucagaaacugcccggcaacgacaauuccacagcaacuuuguguuuagggcaccaugccgucccuaacggaacgcugguuaagaccaucacaaaugaucaaauugaggugacuaacgcgaccgaacuuguacagucuucaaguacagguagaaucugcgacagcccacacaggauucucgauggcaaaaauuguacccugaucgacgcucuacugggggauccgcauugcgacggauuucagaacaaggagugggauuuguucguggaacgguccaaagccuauucuaauuguuaccccuaugacgucccugauuacgcaucgcuccgcucacugguggccagcaguggcacucuggaguuuacaaacgaagguuucaauuggaccgggguugcucaggacggaaaguccuaugcaugcaagcgaggcucugugaacagcuuuuucucccgucucaauugguuacacaaacuggaguacaaguauccagcccuuaacgucacgaugcccaauaacgauaaauuugacaaguuguacauauggggcgugcaucacccuucaacugauagugaccaaaccagccuguacguacaggcuucugggagaguuacaguguccacuaaaaggucacagcagaccgucaucccaaauauuggaagccggcccugggugcgcgguaucaguucuagaauuuccaucuauuggacaauagugaagccuggcgacauucuacucaucaacagcaccgggaaccugauugccccaaggggauacuucaagauccggaauggcaaaucgucuaucaugcgcuccgaugcgccgauugacaacuguaauucagagugcauaacgcccaacgguaguaucccuaaugauaagccauuucaaaacgucaaucgaauuacuuauggggcaugucccagauacguuaaacagaacacacuuaagcuggccaccggaaugaggaaugugccugaaaaacagacucggggcaucuucggcgcuauagccggguuuauugagaacggaugggaagguaugguagacggcugguauggguuccgucaccagaauagcgagggaacaggccaagcagcugauuugaaguccacccaggccgcgaucgaccagaucaacgguaaacucaaucgccugauugagaagacgaacgaaaaguuucaucaaaucgagaaagaguucucugaaguggaagggaggauucaggauuuagagaaguacgucgaggacaccaaaauagaucuguggagcuauaaugccgaacuccuuguggcacuggagaaccagcacacaaucgacuugacugauucagaaaugaacaagcuauucgagagaacccggaaacagcugcgagaaaaugcugaggacaugggcaacggaugcuuuaagauuuaccauaagugugacaaugccugcaucggcaguauccgcaacgggacauacgaucacgacguuuauagagaugaggcucucaauaacagguuccaaauuaaaggaguggaacugaaguccgguuacaaagacuggauacuuuggaucagcuuugccauuucuugcuuccuguugugugucgugcuccugggcuuuaucaugugggcaugccagaaggggaauauucgguguucaaucugcauauga

SEQ ID NO: 128950 - RNA, 1701 nt, Artificial Sequence
  derived and/or modified CDS sequence (opt3) from hemagglutinin__InfluenzaA__ABE26991
augaaggccaaacugcucgugcuucugugcgcuuucaccgcaacauacgccgacacuaucuguauuggcuaucacgcgaacaauagcacggauaccgucgacacaguuuuggagaagaacgugacuguaacccauuccgugaauuuacuggaagauucucacaacgggaaacuaugcagacucaagggaacagcuccccugcagcuugguaauuguucagucgccggcuggauacuggggaacccugagugcgaaaguuuguuuagcaaagaguccuggucuuacaucgcagaaaccccaaauccggagaacggaacuuguuaucccggcuacuucgccgacuaugaggaacucagggagcaacugucgucagugagcaguuuugaacgguucgagauuuuuccuaaggaguccucuuggccaaaucauacaguuaccaagggugugacggcuagcugcucccacaacgggaaaucaaguuucuacaagaaucugcucugguuaacugagaaaaacggacuguaucccaaucuuagcaagucuuacgucaacaauaaagaaaaggaaguguugguacuguggggcguucaucacccuuccaacaucggcgaucagcgcgcaauuuaccacaccgagaacgccuaugugucagucgugagcagucauuacucucgacguuuuacaccagaaaucgcuaagagacccaaagugagggaccaggaggggcggauaaauuauuacuggacucuacucgagccuggagauaccaucauuuucgaagccaacgguaaucugaucgcgccaugguaugcauuugcccuuucccgcggcuucgggagcggaauuaucacaucgaacgcuucuaugggcgacugugaugccaagugccagaccccgcaaggugcaauaaauuccucacugcccuuucagaacguccacccuguuacgauuggggaguguccaaaauacgugagaaguacuaaguugaggaugguaacaggacuccggaauauccccagcauucagucccgcggccuguucggcgcuaucgccggguuuaucgaaggagguuggaccggcaugauugacgggugguauggauaccaucaccagaacgagcaaggcucugguuacgcggccgauaaaaagagcacucagaaugcaauagacgggaucacaaacaaaguaaauucagucauugaaaagaugaacacccaguucacggcugugggcaaggaguucaauaaauuagagcgaagaauggaaaaccugaauaagaaaguugaugacggauuucucgacaucuggaccuauaacgccgagcuucugguguugcuagaaaacgagaggacacuggauuuccacgacaguaaugucaagaaccucuacgaaaaagugaagaaucagcugaagaacaaugcuaaagagauaggcaacgggugcuuugaguucuaucauaaguguaauaacgaaugcauggaguccgugaaaaauggaacuuacgauuauccuaaguacagcgaagagucuacccuuaaacgggagaagauugacgguguuaagcuggaaucaaugggcguguaucaaaucuuggccaucuacaguacagucgcaagcucccucgugcuguuagucucucugggggccauuucguuuuggaugugcagcaacggaucccuacagugucguaucugcauuuga

SEQ ID NO: 128951 - RNA, 1701 nt, Artificial Sequence
  derived and/or modified CDS sequence (opt3) from hemagglutinin__InfluenzaA__ABF47550
augaagaccaucauugcccugagcuacauauucugccucguguuugcucagaaacuucccggcaacgacaauuccacagcaacucuguguuuggggcaccaugccgucccuaacggaacguuaguuaagaccaucacaaaugaucaaauugaggugacuaacgcgaccgaacugguacagucuucaaguacagguagaaucugcgacagcccacacaggauucuagauggcaaaaauuguacccucaucgacgcucugcuuggggauccgcauugcgacggauuccagaacgagaagugggaucuguuuguggaacgguccaaagccuauucuaauuguuaccccuaugacgucccugauuacgcaucguugcgcucacucguggccagcaguggcacucuggaguucauaaacgaagacuuuaauuggacagguguuacccaguccgggggaucuuaugcuugcaagcgaggcagcgugaacuccuucuuuucacgucugaauuggcuccacgagagugaguacaaguauccagcauuaaacgucacgaugcccaauaacggcaaauucgauaagcuguacaucuggggagugcaucacccuagcacugacagagaacaaaccaaucuuuacguaagggccucugggcggguuacaguguccacuaaacgcucacagcagaccgucauuccaaacaucgguagcagacccugggugaggggcuugaguucucggauuuccaucuauuggacaauagugaagccuggggauauucugcuaaucaacagcaccggaaaucucauugcuccacgcggcuacuuuaaaauccgaacggguaagucgucuaucaugagauccgacgccccgauugggacuuguucaagugagugcauaacacccaacggaagcaucccuaaugacaagccauuccagaacgucaauaaaauuaccuauggcgcgugucccagguacguuaagcaaaacacucugaaacuugcaacaggcaugcggaaugugccugaaaagcagacccgugggaucuuuggagccauagcugguuucauugagaacggcugggaggggaugguagauggaugguauggcuuucgccaccaaaauuccgaagguacggggcaggccgcagaccugaaaucuacccaggcugccaucgaucagaucaacggcaaguugaauagacucauugagaaaacaaacgaaaaguuccaucagaucgagaaggaguucagcgaaguggagggaaggauucaagaccuggaaaaauacgucgaggauacuaagauagacuuauggucauauaaugcggaacugcucguggcccuugagaaccagcacaccaucgaucugacagacagugaaaugaauaaauuguuugagaagacucggaaacagcuacgagagaacgcagaagauaugggcaacgggugcuucaagauuuaccauaagugugacaaugcuugcaucggauccauccgcaacgguaccuacgaucacgacguuuauagagacgaggcccugaauaacagguuucagauuaaaggcguggaacucaagagcggguacaaagauuggauacuguggaucucuuucgcuauuucaugcuuucuucugugugucguguugcucggauucaucaugugggccugccaaaagggcaauauucgguguaacaucugcauauga

SEQ ID NO: 128952 - RNA, 1698 nt, Artificial Sequence
  derived and/or modified CDS sequence (opt3) from hemagglutinin__InfluenzaA__ABF47561
augaaggccaaacugcucgugcuucugugcaccuucacagcuacuuacgcagacacgaucuguauuggcuaucacgccaacaauagcaccgauacagucgacacuguuuuggagaagaacgugaccguaacacauuccgugaauuuacuggaagauucucacaacgggaaacuaugccuccugaagggaauagcgccccuucagcuggguaauuguucagucgcuggcuggaucuuggggaacccugagugcgaacuccugauuaguaaagagagcugguccuacaucguggaaaccccaaauccggagaacggaacuuguuaucccggcuacuuugccgacuaugaggaacugagagagcaacucucuucgguuagcucauucgaaagguuugagauuuucccuaaggguaguuccuggccaaaucauacagugaccggggucucugcaagcugcucccacaacggaaagucaaguuuuuaccggaauuuacuguggcuuacgggcaaaaacggcuuguaucccaagcugagcaugucuuacgugaauaacaaagagaaggaagugcuaguucucuggggagugcaucacccuccaaauaucggggaucagcgcgcccuguaccacacugagaacgcuuaugucuccguggugucaagccauuacagucgacguuucacccccgaaauagcaaaaagaccuaaggucagggaccaggagggucggaucaacuauuacuggacacuucuggaaccaggcgauacuauuaucuuugaggccaaugggaacuugauugcuccgugguaugccuucgcgcucucucgcggauuuggcuccgguaucauaaccagcaaugcacccaugggggagugugacgccaagugccagacaccucaaggagcuauuaacucgucucugccauuccagaauguucaccccgugaccaucggcgaauguccuaaauacguaagauccgccaaguuaaggauggugacgggccugcggaacauuccaucaauccagagucgcgggcucuuuggagcaaucgcugguuucauugagggcggguggacuggaauggucgauggcugguaugguuaccaucaccagaaugaacaagggagcggcuacgccgcggaccagaaauccacacagaacgccauaaauggaaucaccaacaagguaaauucuguuauugagaaaaugaacacucaguuuacagcagugggcaaggaguucaauaaacuugaacgaagaauggagaaccugaauaagaaggucgaugacggguucuuggauaucuggaccuauaacgcugaacuacuggugcuccuggagaacgaaaggacgcuugacuuucacgacagcaauguuaaaaaccuguacgagaagguaaaaucacaauugaagaauaacgccaaagaaauaggaaaugguugcuucgaguuuuaucauaaguguaacaaugagugcauggaaagugugaagaacggcaccuacgauuaucccaaauacuccgaggaaagcaagcucaaucgggagaaaauugacggggucaagcuggagucuaugggaguguaucagaucuuagcuaucuacucaacagucgccaguagccuggugcuacucguuucccugggcgcaauuucuuucuggaugugcucgaacgguagccuucagugucguaucugcauuuga

SEQ ID NO: 128953 - RNA, 1698 nt, Artificial Sequence
  derived and/or modified CDS sequence (opt3) from hemagglutinin__InfluenzaA__ABF47572
augaaggccaaacugcucgugcuucugugcaccuucacagcuacuuacgcagacacgaucuguauuggcuaucacgccaacaauagcaccgauacagucgacacuguuuuggagaagaacgugaccguaacacauuccgugaauuuacuggaagauucucacaacgggaaacuaugccuccugaagggaauagcgccccuucagcuggguaauuguucagucgcuggcuggaucuuggggaacccugagugcgaacuccugauuaguaaagagagcugguccuacaucguggaaaccccaaauccggagaacggaacuuguuaucccggcuacuuugccgacuaugaggaacugagagagcaacucucuucgguuagcucauucgaaagguuugagauuuucccuaaggguaguuccuggccaaaucauacagugaccggggucucugcaagcugcucccacaacggaaagucaaguuuuuaccggaauuuacuguggcuuacgggcaaaaacggcuuguaucccaaucugagcaugucuuacgugaacaauaaggauaaagagguacuuguucucuggggagugcaucacccuccaaacaucggggaccagcgcgcccuguaccacacugaaaacgcuuaugucuccguggugucaagccauuacagucgacguuucacccccgagauagcaaagagaccuaaagucagggaucaggaaggucggaucaauuauuacuggacacuucuggagccaggcgacacuauuaucuuugaagccaacgggaauuugauugcuccgugguaugccuucgcgcucucucgcggauuuggcuccgguaucauaaccagcaacgcacccaugggggagugugaugccaagugccagacaccucaaggagcuauuaauucgucucugccauuccagaacguucaccccgugaccaucggcgaguguccuaaguacguaagauccgccaaauuaaggauggugacgggccugcggaauauuccaucaauccagagucgcgggcucuuuggagcaaucgcugguuucauugaaggcggguggacuggaauggucgacggcugguaugguuaccaucaccagaacgagcaagggagcggcuacgccgcggaucagaaguccacacagaaugccauaaacggaaucaccaauaaagugaacucuguuauugaaaagaugaauacucaguuuacagcagugggcaaagaguucaacaagcuagaacgaagaauggagaaucugaacaaaaaggucgacgauggguucuuggacaucuggaccuauaacgcugagcuacuggugcuccuggaaaaugagaggacgcuugacuuucacgauagcaacguaaagaaucuguacgaaaaaguuaagucacaauugaaaaacaaugccaaggagauaggaaacgguugcuucgaauuuuaucauaaauguaauaacgagugcauggagagugugaagaauggcaccuacgacuaucccaaguacuccgaagagagcaaacucaaccgggaaaagauugauggggucaaacuggagucuaugggaguguaucagaucuuagcuaucuacucaacagucgccaguagccuggugcuacucguuucccugggcgcaauuucuuucuggaugugcucgaaugguagccuucagugucguaucugcauuuga

SEQ ID NO: 128954 - RNA, 1698 nt, Artificial Sequence; identical to SEQ ID NO: 128848
  derived and/or modified CDS sequence (opt3) from hemagglutinin__InfluenzaA__ABF47583

SEQ ID NO: 128955 - RNA, 1701 nt, Artificial Sequence
  derived and/or modified CDS sequence (opt3) from hemagglutinin__InfluenzaA__ABF47594
augaagaccaucauugcccugagcuacauacucugccuuguguucgcucagaaacugcccggcaacgacaauuccacagcaacuuuguguuuagggcaccaugccgucccuaacggaacgcugguuaagaccaucacaaaugaucaaauugaggugacuaacgcgaccgagcuaguacagucuucaaguacagguagaaucugcgacagcccacacaggauucucgauggcaaaaauuguacccugaucgacgcucugcugggggauccgcauugcgacggauuucagaacaaggaaugggauuuguucguggaacgguccaaagccuauucuaauuguuaccccuaugacgucccugauuacgcaucgcuccgcucacugguggccagcaguggcacucuggaguuuaacaaugaauccuucaacuggacagguguugcucagaaugggaccucuuaugcaugcaagcgacguagcgugaaguccuuuuucucaagacucaacugguuacacaaacuggaguacaaguauccagcccaaaaugucacgaugcccaacaaugacaaauuugauaaacuuuacauauggggagugcaucacccuaguacugacagcgaucagaccucuuuguacguacaggcuuccggcaggguuacagugucaacuaagcggagccagcaaaccgucaucccaaacauuggcagucgccccugggugagaggggugucuuccaggaucagcauuuauuggacaaucgucaagccuggagacauacugcuaauuaacucgaccgguaaucucaucgccccacggggcuacuucaagauucgcucugggaaauccucaaucaugcgaagugacgcgccgaucggaaacuguaauagcgagugcauuacgcccaacggcuccauaccuaaugauaagccauuucagaacguuaauagaaucacuuauggugcaugucccagguacgugaaacagaacacacugaaacuugccaccgggaugcggaauguaccugaaaagcagacucguggaauuuucggcgcuaucgccggcuuuauagagaacgggugggaaggaaugguggacgguugguauggcuuccgccaccaaaauucugaggggacaggacaggcagcugaucuuaagagcacccaggccgcgauuaaccaaaucaauggcaaauugaacagacucaucgagaagacgaaugaaaaguuucaucagauugagaaagaguucucagaagucgaagguaggauccaggaccuggagaaguacguggaggauaccaaaauugacuuauggaguuauaacgccgaacugcucguugcacuugagaaccagcacacaauagaucugacugacuccgaaaugaauaaguuguucgagcggacccgaaaacaacuacgcgaaaacgcugaggauauggggaauggcugcuuuaagaucuaccauaagugugacaacgccugcauuggaagcaucagaaauggcacauacgaucacgacguguauagggacgaggcucugaacaaucgguuccagaucaaaggggucgaacucaagucuggauacaaagauuggauucuguggauaucauuugccaucaguugcuuccuucugugugugguauugcucgguuuuauuaugugggcaugccagaagggcaacauccgcuguaauauuugcaucuga

SEQ ID NO: 128956 - RNA, 1701 nt, Artificial Sequence
  derived and/or modified CDS sequence (opt3) from hemagglutinin__InfluenzaA__ABF47605
augaaggccaaacugcucgugcuucugugcgcuuucaccgcaacauacgccgacacuaucuguauuggcuaucacgcgaacaauagcacggauaccgucgacacaguuuuggagaagaacgugacuguaacccauuccgugaauuuacuggaagauucucacaacgggaaacuaugcagacucaagggaacagcuccccugcagcuugguaauuguucagucgccggcuggauacuggggaacccugagugcgaaaguuuguuuagcaaagaguccuggucuuacaucgcagaaaccccaaauccggagaacggaacuuguuaucccggcuacuucgccgacuaugaggaacucagggagcaacugucgucagugagcaguuuugaacgguucgagauuuuuccuaaggaguccucuuggccaaaucauacaguuaccaagggugugacggcuagcugcucccacaacgggaaaucaaguuucuacaagaaucugcucugguuaacugagaaaaacggacuguaucccaaucuuagcaagucuuacgucaacaauaaagaaaaggaaguguugguacuguggggcguucaucacccuuccaacaucggcgaucagcgcgcaauuuaccacaccgagaacgccuaugugucagucgugagcagucauuacucucgacguuuuacaccagaaaucgcuaagagacccaaagugagggaccaggaggggcggauaaauuauuacuggacucuacucgagccuggagauaccaucauuuucgaagccuccgguaaccugaucgcgccaugguaugcauuugcccuuagccgcggcuucgggucgggaauuaucacaucuaaugcuuccaugggcgagugugacgccaagugccagaccccgcaaggugcaauaaacucaagucugcccuuucagaauguccacccuguuacgauuggggaauguccaaaauacgugagaagcacuaaguugaggaugguaacaggacuccggaacauccccuccauucagucucgcggccuguucggcgcuaucgccggguuuaucgagggagguuggaccggcaugauugaugggugguauggauaccaucaccagaaugaacaaggcagcgguuacgcggccgacaaaaagucaacucagaacgcaauagaugggaucacaaauaaagugaacagugucauugagaagaugaauacccaguucacggcugugggcaaggaguucaacaaauuagaacgaagaaucgagaaucugaacaagaaaguugacgauggauuucucgacauauggaccuauaaugccgaacuucugguguugcuagagaacgaaaggacacuggacuuccacgauuccaacgucaagaaucucuacgagaaagugaagaaccagcugaagaauaacgcuaaagagauuggcaaugggugcuuugaguucuaucauaaguguaacaaugaaugcauggaaagcguuaaaaacggaacuuacgacuauccuaaguacucugaggagucaaaacuuaagcgggaaaagaucgaugguguaaaacuggagaguaugggcguguaucaaaucuuggccauuuacagcaccgucgcauccucucucgugcuguuagucucgcugggggccaucagcuuuuggaugugcuccaauggaucacuacagugucguauuugcauauga

SEQ ID NO: 128957 - RNA, 1701 nt, Artificial Sequence; identical to SEQ ID NO: 128941
  derived and/or modified CDS sequence (opt3) from hemagglutinin__InfluenzaA__ABF47616

SEQ ID NO: 128958 - RNA, 1701 nt, Artificial Sequence
  derived and/or modified CDS sequence (opt3) from hemagglutinin__InfluenzaA__ABF47627
augaaggccaaacugcucgugcuucugugcgcuuucaccgcaacauacgccgacacuaucuguauuggcuaucacgcgaacaauagcacggauaccgucgacacaguuuuggagaagaacgugacuguaacccauuccgugaauuuacuggaagauucucacaacgggaaacuaugcagacucaagggaacagcuccccugcagcuugguaauuguucagucgccggcuggauacuggggaacccugagugcgaaaguuuguuuagcaaagaguccuggucuuacaucgcagaaaccccaaauccggagaacggaacuuguuaucccggcuacuucgccgacuaugaggaacucagggagcaacugucgucagugagcaguuuugaacgguucgagauuuuuccuaaggaguccucuuggccaaaucauacaguuaccaagggugugacggcuagcugcucccacaacgggaaaucaaguuucuacaagaaucugcucugguuaacugagaaaaacggacuguaucccaaucuuagcaagucuuacgucaacaauaaagaaaaggaaguguugguacuguggggcguucaucacccuuccaacaucggcgaucagcgcgcaauuuaccacaccgagaacgccuaugugucagucgugagcagucauuacucucgacguuuuacaccagaaaucgcuaagagacccaaagugagggaccaggaggggcggauaaauuauuacuggacucuacucgagccuggagauaccaucauuuucgaagccaacgguaaucugaucgcgccaugguaugcauuugcccuuucccgcggcuucgggagcggaauuaucacaucgaacgcuucuaugggcgacugugaugccaagugccagaccccgcaaggugcaauaaauuccucacugcccuuucagaacguccacccuguuacgauuggggaguguccaaaauacgugagaaguacuaaguugaggaugguaacaggacuccggaauauccccagcauucagucccgcggccuguucggcgcuaucgccggguuuaucgaaggagguuggaccggcaugauugacgggugguauggauaccaucaccagaacgagcaaggcucugguuacgcggccgauaaaaagagcacucagaaugcaauagacgggaucacaaacaaaguaaauucagucauugaaaagaugaacacccaguucacggcugugggcaaggaguucaauaaauuagagcgaagaauggaaaaccugaauaagaaaguugaugacggauuucucgacaucuggaccuauaacgccgagcuucugguguugcuagaaaacgagaggacacuggauuuccacgacaguaaugucaagaaccucuacgaaaaagugaagaaucagcugaagaacaaugcuaaagagauaggcaacgggugcuuugaguucuaucauaaguguaauaacgaaugcauggaguccgugaaaaauggaacuuacgauuauccuaaguacagcgaagagucuaaacuuaagcgggagaagauugacgguguuaaacuggaaucaaugggcguguaucaaaucuuggccaucuacaguaccgucgcaagcucccucgugcuguuagucucucugggggccauuucguuuuggaugugcagcaacggaucccuacagugucguaucugcauuuga

SEQ ID NO: 128959 - RNA, 1701 nt, Artificial Sequence
  derived and/or modified CDS sequence (opt3) from hemagglutinin__InfluenzaA__ABF47638
augaaggccaaacugcucgugcuucugugcgcuuucaccgcaacauacgccgacacuaucuguauuggcuaucacgcgaacaauagcacggauaccgucgacacaguuuuggagaagaacgugacuguaacccauuccgugaauuuacuggaagauucucacaacgggaaacuaugcagacucaagggaacagcuccccugcagcuugguaauuguucagucgccggcuggauacuggggaacccugagugcgaaaguuuguuuagcaaagaguccuggucuuacaucgcagaaaccccaaauccggagaacggaacuuguuaucccggcuacuucgccgacuaugaggaacucagggagcaacugucgucagugagcaguuuugaacgguucgagauuuuuccuaaggaguccucuuggccaaaucauacaguuaccaagggugugacggcuagcugcucccacaacgggaaaucaaguuucuacaagaaucugcucugguuaacugaaaagaacggacuguaucccaaucuuagcaagucuuacgucaacaauaaagagaaggaaguguugguacuguggggcguucaucacccuuccaacaucggcgaucagcgcgcaauuuaccacaccgagaacgccuaugugucagucgugagcagucauuacucucgacguuuuacaccagaaaucacuaagagacccaaagugagggaccaggaggggcggauaaauuauuacuggacccuacucgagccuggagauacaaucauuuucgaagcuaacgguaaucugaucgccccaugguaugcguuugcacuuucccgcggcuucgggagcggaauuaucaccucgaacgccucuaugggcgagugugacgcuaagugccagacgccgcaaggugccauaaauuccucacugcccuuucagaacguccacccuguuacuauuggggaauguccaaaauacgugagaaguacaaaguugaggaugguaaccggacuccggaauauccccagcauucagucccgcggccuguucggcgcaaucgcuggguuuaucgagggagguuggacuggcaugauugaugggugguauggauaccaucaccagaacgaacaaggcucugguuacgccgcggaccagaaaagcacacagaaugccauagaugggaucaccaacaaggucaauucagugauugagaaaaugaacacgcaguucaccgcagugggcaaggaguucaauaaguuagaacgaagaauggagaaccugaauaaaaagguugacgauggauuucucgacaucuggacauauaacgcugaacuucugguguugcuagagaacgaaaggacucuggacuuccacgauaguaaugucaaaaaccucuacgagaaggugaaaacccaacugaagaauaacgccaaggagauaggcaaugggugcuuugaguucuaucauaaauguaacaaugaaugcauggaauccguaaagaacggaacauacgacuauccuaaauacagcgaggagucuaaacuuaaucgggagaaaauugaugguguuaagcuggaaucaaugggcguguaucagaucuuggcuaucuacaguacugucgccagcucccucgugcuguuagucucucugggggcaauuucguuuuggaugugcagcaacggaucccuacagugucguaucugcauuuga

SEQ ID NO: 128960 - RNA, 1701 nt, Artificial Sequence; identical to SEQ ID NO: 128959
  derived and/or modified CDS sequence (opt3) from hemagglutinin__InfluenzaA__ABF47649

SEQ ID NO: 128961 - RNA, 1701 nt, Artificial Sequence
  derived and/or modified CDS sequence (opt3) from hemagglutinin__InfluenzaA__ABF47660
augaaggccaaacugcucgugcuucugugcgcuuucaccgcaacauacgccgacacuaucuguauuggcuaucacgcgaacaauagcacggauaccgucgacacaguuuuggagaagaacgugacuguaacccauuccgugaauuuacuggaagauucucacaacgggaaacuaugcagacucaagggaacagcuccccugcagcuugguaauuguucagucgccggcuggauacuggggaacccugagugcgaaaguuuguuuagcaaagaguccuggucuuacaucgcagaaaccccaaauccggagaacggaacuuguuaucccggcuacuucgccgacuaugaggaacucagggagcaacugucgucagugagcaguuuugaacgguucgagauuuuuccuaaggaguccucuuggccaaaucauacaguuaccaagggugugacggcuagcugcucccacaacgggaaaucaaguuucuacaagaaucugcucugguuaacugagaaaaacggacuguaucccaaucuuagcaagucuuacgucaacaauaaagaaaaggaaguguugguacuguggggcauccaucacccuuccaacauuggcgaucagcgcgcaaucuaccacaccgagaacgccuauguuucaguggucagcagucauuacucucgacguuuuacaccagaaauagcuaagagacccaaagugagggaccaggaggggcggaucaauuauuacuggacucuacucgagccuggagauaccauuaucuucgaagccaacgguaaucugauugcgccaugguaugcauuugcccuuucccgcggcuucgggagcggaaucauaacaucgaacgcuucuaugggcgacugugaugccaagugccagaccccgcaaggugcaauuaauuccucacugcccuuucagaacgugcacccugucacgaucggggaguguccaaaauacguuagaaguacuaaguugaggauggugacaggacuccggaauauucccagcauccagucccgcggccuguucggcgcuaucgccggguuuauugaaggagguuggaccggcaugauagacgggugguauggauaccaucaccagaacgagcaaggcucugguuacgcggccgauaaaaagagcacucagaaugcaaucgacgggauuacaaacaaaguaaauucagugaucgaaaagaugaacacccaguucacggcugucggcaaggaguucaauaaauuagagcgaagaauggaaaaccugaauaagaaaguggaugacggauuucucgacauauggaccuauaacgccgagcuucugguuuugcuagaaaacgagaggacacuggauuuccacgacaguaaugugaagaaccucuacgaaaaagucaagacucagcugaagaauaacgcuaaagagauuggcaaugggugcuuugaguucuaucauaaguguaacaaugaaugcauggaguccgugaaaaacggaaccuacgauuauccuaaguacagcgaagagucuaaacuuaagcgggagaagaucgacgguguaaaacuggaaucaaugggcguuuaucaaaucuuggccauuuacaguacaguggcaagcucccucguccuguuagugucucugggggccaucucguuuuggaugugcagcaauggaucccuacagugucguauuugcauauga

SEQ ID NO: 128962 - RNA, 1698 nt, Artificial Sequence
  derived and/or modified CDS sequence (opt3) from hemagglutinin__InfluenzaA__ABF47671
augaaggccaaacugcucgugcuucugugcaccuucacagcuacuuacgcagacacgaucuguauuggcuaucacgccaacaauagcaccgauacagucgacacuguuuuggagaagaacgugaccguaacacauuccgugaauuuacuggaagauucucacaacgggaaacuaugccuccugaagggaauagcgccccuucagcuggguaauuguucagucgcuggcuggaucuuggggaacccugagugcgaacuccugauuaguaaagagagcugguccuacaucguggaaaccccaaauccggagaacggaacuuguuaucccggcuacuuugccgacuaugaggaacugagagagcaacucucuucgguuagcucauucgaaagguuugagauuuucccuaaggguaguuccuggccaaaucauacagugaccggggucucugcaagcugcucccacaacggaaagucaaguuuuuaccggaauuuacuguggcuuacgggcaaaaacggcuuguaucccaaucugagcaugucuuacgugaacaauaaggagaaagaaguacuuguucucuggggagugcaucacccuccaaacaucggggaucagcgcgcccuguaccacacugagaacgcuuucgucuccguggugucaagccauuauagucgacguuuuacccccgaaauagcaaagagaccuaaagucagggaccaggagggucggaucaauuacuauuggacacuucuggaaccaggcgauacuauuaucuucgaggccaacgggaauuugauugcuccgugguacgccuuugcgcucucucgcggauucggcuccgguaucauaaccagcaacgcacccauggacgagugugaugccaagugccagacaccucaaggggcuauuaauucgucucugccauuucagaacguucaccccgugaccaucggagaauguccuaaguauguaagauccgccaaauuaaggauggugacgggccugcggaauauuccaucaauccagagucgcggccucuucggggcaaucgcuggauuuauugaggguggcuggacugggauggucgacggaugguacggcuaucaucaccagaacgaacaagguagcggguacgccgcggaucagaaguccacacagaaugccauaaacggcaucaccaauaaagugaacucuguuauugagaagaugaauacucaguucacagcagugggaaaagaguucaacaagcuagaacgaagaauggagaaucugaacaaaaaggucgacgauggcuuuuuggacaucuggaccuacaacgcugaacuacuggugcuccuggagaaugaaaggacgcuugacuuccacgauagcaacguaaagaaucuguaugagaaaguuaagucacaauugaaaaacaaugccaaggaaauagggaacggaugcuuugaguucuaccauaaauguaauaacgagugcauggaaagugugaagaaugguaccuaugacuaccccaaguauuccgaggaaagcaaacucaaccgggagaagauugauggcgucaaacuggagucuauggggguguaccagaucuuagcuaucuauucaacagucgccaguagccuggugcuacucguuucccugggagcaauuucuuuuuggaugugcucgaauggcagccuucagugucguaucugcauuuga

SEQ ID NO: 128963 - RNA, 1701 nt, Artificial Sequence
  derived and/or modified CDS sequence (opt3) from hemagglutinin__InfluenzaA__ABF47693
augaaggccaaacugcucgugcuucugugcgcuuugagcgcaaccgacgccgauacaaucuguauuggcuaccacgcgaacaauuccacugacacggucgauaccguuuuagagaagaacgugacaguaacucauucugugaaucugcuagaagacucacacaacgggaaacucugcagacugaagggaauagcuccccuucagcuggguaaauguaauaucgccggcuggauuuuggggaacccugagugcgaaagucucuucagcaagaaguccuggucuuauaucgcagagaccccaaauucggaaaacggaacauguuacccgggcuauuuugccgauuacgaggagcugagggaacaacugucaagcgucaguuccuucgagcgguuugaaauuuuccccaaagagcgcucuuggccuaagcauaaugugacccgagguguuacugcuagcugcucccacaaagggaagucaaguuuuuaucguaaccucuuauggcugacagagaaaaauggaagcuacccaaaccuuucuaaguccuaugugaauaacaaggaaaaagaggucuuggugcuguggggcguacaucaccccucaaauaucgaagaccagaagaccauauacagaaaagagaacgcauacguuagcguggucaguucuaacuauaauaggcgguucacgccugaaaucgccgagcgcccaaaggugagaggccaggcugggaggauuaacuacuauuggacucuacucgagcccggagauaccaucauuuuugaagccaaugguaaccugaucgcgccuuggcacgcauucgcccuuaaucggggcuuuggguccggaauaauuacaagcaacgcuucgauggacgagugugauacuaaaugccagaccccacaaggcgccaucaauucuucccugccguuccagaacauucaucccgugacaaucggugaauguccuaaguacguccgcucaaccaaauugcgaaugguuacggggcucagaaauaucccaaguauucagagcaggggacuguuuggcgcaauagcuggcuucaucgaagggggauggacugguaugauugacggcugguauggguaccaccaucagaacgagcaaggauccggcuaugccgcggaucagaagucuacacagaaugccaucaacgguauaaccaauaaggugaacagcguaauugagaaaaugaauacucaguuuacagcaguggggaaggaguucaacaaauuagaaaagcggauggagaaccugaauaaaaaggucgacgauggcuuccucgacaucuggaccuacaacgcugaacuucugguguugcuagagaaugaacguacgcuggacuuucacgauucaaacguuaagaaucucuacgagaaagugaagagucaacugaaaaacaaugccaaggagaucggaaacggcugcuucgaauuuuaucacaaauguaauaacgagugcauggaauccgucaagaaugggaccuacgacuaucccaaguacagcgaggagucuaaacuuaaccgcgaaaagauugauggagugaaacuggagucaauggguguauaucagaucuuggcuauuuacaguacaguugccagcucccucgugcuguuagucucucugggcgcaauaucguucuggaugugcagcaaugggucccuacaguguagaaucugcauuuga

SEQ ID NO: 128964 - RNA, 1701 nt, Artificial Sequence; identical to SEQ ID NO: 128963
  derived and/or modified CDS sequence (opt3) from hemagglutinin__InfluenzaA__ABF47704

SEQ ID NO: 128965 - RNA, 1701 nt, Artificial Sequence
  derived and/or modified CDS sequence (opt3) from hemagglutinin__InfluenzaA__ABF47715
augaaggccaaacugcucgugcuucugugcgcuuugagcgcaaccgacgccgauacaaucuguauuggcuaccacgcgaacaauuccacugacacggucgauaccguuuuagagaagaacgugacaguaacucauucugugaaucugcuagaagacucacacaacgggaaacucugcagacugaagggaauagcuccccuucagcuggguaaauguaguaucgccggcuggauuuuggggaauccugagugcgaaagccucuucuccaagaagucuuggucguauaucgcagagaccccaaacucagaaaauggaacauguuacccgggcuauuuugccgauuacgaggagcugagggaacaacugagcagugucuccucuuucgagcgguuugaaauuuuccccaaagagcgcagcuggccuaagcauaacgugacccgagguguuacugcuuccugcucacacaaagggaagaguagcuuuuaucguaaucucuuauggcugacagagaaaaacggaucuuacccaaaucuuuccaagucauaugugaacaauaaggaaaaagaggucuuggugcuguggggcguacaucaccccagcaacaucgaagaccagaagaccauauacagaaaagagaaugcauacguuaguguggucucuuccaacuauaacaggcgguucacgccugaaaucgccgagcgcccaaaggugagaggccaggcugggaggauuaauuacuauuggacucuacucgagcccggagauaccaucauuuuugaagccaacgguaaucugaucgcgccuuggcacgcauucgcccuuaaccggggcuuugggagcggaauaauuacaucgaaugcuucuauggacgagugugauacuaaaugccagaccccacaaggcgccaucaacuccucacugccguuccagaauauucaucccgugacaaucggugaauguccuaaguacguccgcaguaccaaauugcgaaugguuacggggcucagaaacaucccaagcauucaguccaggggacuguuuggcgcaauagcuggcuucaucgaagggggauggacugguaugauugacggcugguauggguaccaccaucagaaugagcaaggaucuggcuaugccgcggaucaaaagagcacacagaacgccaucaaugguauaaccaacaaggugaauagcguaauugagaaaaugaacacucaguuuacagcaguggggaaggaguucaauaaauuagaaaagcggauggagaaccugaacaaaaaggucgacgauggcuuccucgacaucuggaccuacaaugcugaacuucugguguugcuagagaacgaacguacgcuggacuuucacgauaguaauguuaagaaccucuacgagaaagugaagucccagcugaaaaauaacgccaaggagaucggaaauggcugcuucgaauuuuaucacaaauguaacaaugagugcauggaaagcgucaagaacgggaccuacgacuaucccaaguacucugaggagucaaaacuuaaucgcgaaaagauugauggagugaaacuggagaguauggguguauaucagaucuuggcuauuuacagcacaguugccuccucucucgugcuguuagucucgcugggcgcaauaucauucuggaugugcuccaacgggucacuacaguguagaaucugcauuuga

SEQ ID NO: 128966 - RNA, 1701 nt, Artificial Sequence; identical to SEQ ID NO: 128963
  derived and/or modified CDS sequence (opt3) from hemagglutinin__InfluenzaA__ABF47726

SEQ ID NO: 128967 - RNA, 1701 nt, Artificial Sequence; identical to SEQ ID NO: 128963
  derived and/or modified CDS sequence (opt3) from hemagglutinin__InfluenzaA__ABF47737

SEQ ID NO: 128968 - RNA, 1701 nt, Artificial Sequence
  derived and/or modified CDS sequence (opt3) from hemagglutinin__InfluenzaA__ABF47748
augaaggccaaacugcucgugcuucugugcgcuuugagcgcaaccgacgccgauacaaucuguauuggcuaccacgcgaacaauuccacugacacggucgauaccguuuuagagaagaacgugacaguaacucauucugugaaucugcuagaagacucacacaacgggaaacucugcagacugaagggaauagcuccccuucagcuggguaaauguaguaucgccggcuggauuuuggggaauccugagugcgaaagccucuucuccaagaagucuuggucguauaucgcagagaccccaaacucagaaaauggaacauguuacccgggcuauuuugccgauuacgaggagcugagggaacaacugagcagugucuccucuuucgagcgguuugaaauuuuccccaaagagagcuccuggccuaagcauaacgugacccgcgguguuacugcuucaugcagucacaaagggaaaagcucuuuuuaucgaaaucucuuauggcugacagagaaaaacggauccuacccaaaucuuucaaagagcuaugugaacaauaaggaaaaagaggucuuggugcuguggggcguacaucaccccaguaacaucgaagaccagaagaccauauaccguaaagagaaugcauacguuucuguggucuccagccacuauaacagaagguucacgccugaaaucgccaagcggccaaaagugcgcgaucaggagggcagaauuaacuacuauuggacucuacucgagcccggggacaccaucauuuuugaagcuaauggaaaccugaucgccccuugguacgcguucgcacuuucgagggguuuuggcucugggauaauuacauccaaugccucaauggaugagugugacgcuaagugccagacuccacaaggagccaucaacaguagccugccguuccagaaugugcaucccgucaccauuggcgaauguccuaaauauguucgguccacaaaguugcgcauggugaccggucuccgaaacaucccaucuauccagagcagagggcuguuuggagcaauugcuggcuucauagagggcggguggacgggaaugaucgaugguugguacggcuaucaccaucagaaugaacaagggucaggauacgccgcggaccagaagaguacucagaacgccauuaauggcaucacaaacaaaguaaauuccgugauagagaagaugaacacccaguuuacugcagucgguaaagaguucaauaaguuagaaaagaggauggagaaccugaauaagaagguggaugacggguuccucgacauuuggacauacaacgcugaacuucugguuuugcuagagaacgaacggacccuggauuuucacgacagcaaugugaaaaaccucuaugagaaggucaaaucucaacugaagaauaacgccaaagagaucggcaauggaugcuucgaauuuuaccacaaguguaacaaugagugcauggaaucagugaagaacggcacguaugauuaccccaaauauagugaggagagcaaacuuaaucgugaaaagaucgacgggguaaagcuggaguccaugggaguuuaccagauuuuggcuaucuauucuaccguggccucgagccucguccuguuagugucccugggugcaauuucauucuggaugugcaguaacggcucucuacagugucgcauaugcaucuga

SEQ ID NO: 128969 - RNA, 1701 nt, Artificial Sequence
  derived and/or modified CDS sequence (opt3) from hemagglutinin__InfluenzaA__ABF47770
augaaggccaaacugcucgugcuucugugcgcuuugagcgcaaccgacgccgauacaaucuguauuggcuaccacgcgaacaauuccacugacacggucgauaccguuuuagagaagaacgugacaguaacucauucugugaaucugcuagaagacaaccacaaugggaaacucugcaagcugaaaggaauagcuccccuucagcuggguaaguguucaaucgccggcuggauuuuggggaacccugagugcgaaagucucuucagcaagaaauccuggucuuauaucgcagagaccccaaauucggaaaacggaacauguuacccgggcuauuuugccgauuacgaggagcugagagaacaacugucaagcgucaguuccuucgagagguuugaaauuuuccccaaggagucuagcuggccuaaacauaaugugaccaaggguguuacugcuuccugcucacacaaagggaagaguagcuuuuaucggaaccucuuauggcugacagagaagaauggaucuuacccaaaccuuuccaaaucauaugugaauaacaaggaaaaagaggucuuggugcuguggggcguacaucaccccagcaauaucgaagaccagaagaccauauaccgcaaagagaacgcauacguuaguguggucucuucccacuauaaccgacguuucacgccugaaaucgccaagagaccaaaagugaggaaucaggagggccggauuaacuacuauuggacucuacucgagcccggggauaccaucauuuuugaagcuaauggaaaccugaucgccccuugguacgcguucgcacuuagccgcgguuuuggcucggggauaauuacaucuaaugccuccauggacgagugugaugcuaagugccagacuccacaaggagccaucaacucaagucugccguuccagaaugugcaucccgucaccauuggcgaauguccuaaguauguuagaagcacaaaauugaggauggugaccggucuccggaacaucccauccauccagucucgcgggcuguuuggagcaauugcuggcuucauagagggcggguggacgggaaugaucgacgguugguacggcuaucaccaucagaaugaacaagggagcggauacgccgcggaucagaagucaacucagaacgccauuaauggcaucacaaacaaaguaaauaguauaauugagaagaugaacacccaguuuacugcaguggguaaagaguucaauaaguuagaaaagcgaauggagaaccugaacaaaaaggucgacgauggguuccucgacaucuggacauacaaugcugaacuucugguguugcuagagaacgaaagaacccuggacuuucacgauuccaauguuaaaaaccucuaugagaaggugaaaagccaacugaagaauaacgccaaggagaucggcaauggaugcuucgaauuuuaccacaaauguaacaaugagugcauggaaucugucaagaacggcacguaugacuaccccaaauauucagaggagaguaaacuuaauagggaaaagauugauggggugaagcuggagagcaugggaguauaccagaucuuggcuauuuauuccaccguugccucuucgcucgugcuguuagucagccugggugcaauauccuucuggaugugcucaaacggcagucuacagugucggaucugcauuuga

SEQ ID NO: 128970 - RNA, 1701 nt, Artificial Sequence; identical to SEQ ID NO: 128969
  derived and/or modified CDS sequence (opt3) from hemagglutinin__InfluenzaA__ABF47781

SEQ ID NO: 128971 - RNA, 1701 nt, Artificial Sequence; identical to SEQ ID NO: 128969
  derived and/or modified CDS sequence (opt3) from hemagglutinin__InfluenzaA__ABF47792

SEQ ID NO: 128972 - RNA, 1701 nt, Artificial Sequence; identical to SEQ ID NO: 128969
  derived and/or modified CDS sequence (opt3) from hemagglutinin__InfluenzaA__ABF47803

SEQ ID NO: 128973 - RNA, 1701 nt, Artificial Sequence; identical to SEQ ID NO: 128969
  derived and/or modified CDS sequence (opt3) from hemagglutinin__InfluenzaA__ABF47814

SEQ ID NO: 128974 - RNA, 1701 nt, Artificial Sequence; identical to SEQ ID NO: 128969
  derived and/or modified CDS sequence (opt3) from hemagglutinin__InfluenzaA__ABF47825

SEQ ID NO: 128975 - RNA, 1701 nt, Artificial Sequence; identical to SEQ ID NO: 128969
  derived and/or modified CDS sequence (opt3) from hemagglutinin__InfluenzaA__ABF47836

SEQ ID NO: 128976 - RNA, 1701 nt, Artificial Sequence; identical to SEQ ID NO: 128969
  derived and/or modified CDS sequence (opt3) from hemagglutinin__InfluenzaA__ABF47847

SEQ ID NO: 128977 - RNA, 1701 nt, Artificial Sequence
  derived and/or modified CDS sequence (opt3) from hemagglutinin__InfluenzaA__ABF47858
augaagaccaucauugcccugagcuacauacucugccuuguguucgcucagaaacugcccggcaacgacaaugggacagcaacuuuguguuuaggacaccaugccgucccuaacgguacgcugguuaagaccaucacaaaugaucaaauugaggugacuaacgcgaccgaacuuguacaguccucuucaacaggcagaaucugcgacaguccacacaggauucucgaugggaaaaauuguacccugaucgacgcucuacugggagauccgcauugcgacggcuuucagaacaaggagugggauuuguucguggaacggagcaaagccuauuccaauuguuaccccuaugacgucccugauuacgcaucucuccgcucgcugguggccucaagcgguacucuggaguuuauaaacgaagacuucaauuggacagggguugcucaggauggaaagaguuaugcaugcaagcgaggcuccgugaacucuuucuucagccgucucaauugguuacacaaacuggaguacaaguauccagcccuuaacgucaccaugcccaauaacggcaaauuugacaaguuguacaucuggggagugcaucacccuuccacggauucagaccaaaccagucuguacguaagagcuagcgggaggguuacugugucuacaaaacggucccagcagacugucauuccaaauaucgguuuccgccccugggugagaggccuaucaagcaggauuaguaucuauuggaccauagugaagccuggggacauucuccugaucaacucuacaggaaaccuuauugccccacggggcuacuuuaagauccgcaaugguaaauccagcaucaugcgaucggaugcgccgauugggaacuguucuuccgagugcauaacccccaauggaucaaucccuaacgacaagccauuccagaaugucaacagaauuacguauggcgcaugucccagguacguuaaacaaaauacucugaaguuggccacaggcaugcggaacgugccugaaaaacagacccgugggaucuuuggagcuauagccgguuucauugagaauggcugggaagggaugguagauggaugguauggcuuucgccaccagaacagugaggguacugggcaggcagcugaccucaagagcacacaagccgcgaucgaucagaucaauggcaaacugaacagauuaauugagaagaccaaugaaaaguuccaucagaucgagaaagaauuuuccgagguggaaggaaggauucaagaccuggagaaguacgucgaggauacgaaaauagaccucuggucuuauaacgccggccuucugguggcauuggaaaaucagcacaccaucgaucuaacagacagcgagaugaacaagcuguuugaacggacucgaaaacagcuccgcgagaacgcugaagauauggggaauggaugcuucaagauuuaccauaagugugacaacgccugcaucgguucaaucagaaauggcaccuacgaccacgauguuuauagggacgaggcucugaacaaucgguuucagauuaaagggguggagcuuaagaguggauacaaagauuggauacuguggaucuccuucgccauuagcugcuuuuugcucugugucgugcuguuaggcuucaucaugugggcaugccaaaaggguaacauucgcuguaauaucugcauauga

SEQ ID NO: 128978 - RNA, 1698 nt, Artificial Sequence; identical to SEQ ID NO: 128790
  derived and/or modified CDS sequence (opt3) from hemagglutinin__InfluenzaA__ABF47869

SEQ ID NO: 128979 - RNA, 1698 nt, Artificial Sequence; identical to SEQ ID NO: 128790
  derived and/or modified CDS sequence (opt3) from hemagglutinin__InfluenzaA__ABF47880

SEQ ID NO: 128980 - RNA, 1698 nt, Artificial Sequence
  derived and/or modified CDS sequence (opt3) from hemagglutinin__InfluenzaA__ABF47891
augaaggugaaacugcucguccuucugugcaccuucacagccacuuacgcugacacgaucuguauuggcuaucacgcaaacaauagcaccgauacaguugacacuguguuggagaagaacguaaccgugacacauuccgucaauuuacuggaagauucucacaacgggaaacuaugccuccugaagggaauagcgccccuucagcuggguaauuguucaguggccggcuggaucuuggggaacccugagugcgaacuccugauuaguaaagagagcugguccuacaucguugaaaccccaaauccggagaacggaacuuguuaucccggcuacuuugcugacuaugaggaacugagagagcaacucucuucggugagcucauucgaaagguuugagauuuucccuaaggagaguuccuggccaaaucauacagucaccggugugucugccagcugcucccacaacgggaagucaaguuuuuaccggaauuuacuguggcuuacgcgcaaaaacggauuguaucccaaucugagcaagucuuacgcaaacaauaaagaaaaggagguucuaguacucuggggcgugcaucacccuccaaacaucggcgaucagcgagcccuguaccacacugaaaacgcuuaugucuccguggugucaagccauuacagucguagauucacccccgagauagcaaaaaggccuaagguccgggaccaggaagggcgcaucaauuauuacuggacacuucuggagccaggagauacuauuaucuuugaggccaacgguaauuugauugcuccgagauaugccuucgcgcucucuaggggcuuuggguccggaaucauaaccagcaacgcacccauggacgaaugugaugccaagugccagacaccucaaggcgcuauuaauucgucucugccauuccagaacguucaccccgugaccaucggugaguguccuaaauacguacgguccgccaaguuacgcauggugacggggcugcgaaauauuccaucaauccagaguagaggacucuuuggcgcaaucgcuggcuucauugaagggggauggacugguauggucgacggcugguauggguaccaucaccagaacgagcaaggaagcggcuacgccgcggaucagaaauccacacagaaugccauaaacgguaucaccaauaaggugaacucuguuauugaaaagaugaauacucaguuuacagcaguggggaaagaguucaacaaacuugagaggcggauggaaaaucugaacaagaaggucgacgauggcuucuuggacaucuggaccuauaacgcugagcuacuggugcuccuggaaaaugagcguacgcuugacuuucacgauagcaacguuaaaaaucuguacgaaaagguaaaaucacaauugaagaacaaugccaaagagauaggaaacggcugcuucgaguuuuaucauaaguguaauaacgaaugcauggagagugugaagaaugggaccuacgacuaucccaaauacuccgaagagagcaagcucaaccgcgagaaaauugauggagucaagcuggaaucuauggguguguaucagaucuuagcuaucuacucaacagucgccaguagccuggugcuacucguuucccugggcgcaauuucuuucuggaugugcucgaaugggagccuucaguguagaaucugcauuuga

SEQ ID NO: 128981 - RNA, 1701 nt, Artificial Sequence
  derived and/or modified CDS sequence (opt3) from hemagglutinin__InfluenzaA__ABF47902
augaagaccaucauugcccugagcuacauacucugccuuguguucgcucagaaacugcccggcaacgacaauuccacagcaacuuuguguuuagggcaccaugccgucccuaacggaacgcugguuaagaccaucacaaaugaucaaauugaggugacuaacgcgaccgaacuuguacagucuucaaguacagguggcaucugcgacagcccacaccagauucucgauggggagaauuguacccugaucgacgcucuacugggagauccgcauugcgacggcuuucagaacaaagaaugggauuuguucguggagagauccaaggccuauucuaauuguuaccccuaugacgucccugauuacgcaucgcucaggucacugguggccagcagugguacucuggaauuuaacaaugaguccuucaacuggacagggguugcucaaaauggaaccucuagcgcaugcaaacggcgcuccaacaagucauuuuucagucgacucaauugguuacaccagcugaaguauaaauacccagcccuuaacgugacgaugcccaauaacgagaaguuugacaaauuguauauauggggcguccaucacccuagcacugauucugaccagaucucccuguacgcucaggccccaggccgugugaccguaucaacaaagagaagccaacagacuguuauucccaacaucgggaguaggccuugggugcggggagucucuucccgcauuagcaucuacuggaccauagugaaaucgggugauauucuacucaucaauuguacaggcaaccugauugcgccaagaggguauuucaagaucaggucuggaaaguccucaaucaugcggagugacgcaagcauuggcaaaugcaauuccgaauguauaaccccgaacgguucuauccccaaugacaagccuuuucagaacgugaaucgcauuacguacggggccugcccacgauaugucaaacagaacacucuuaagcuggcuacaggaaugagaaauguucccgagaaacaaaccaggggcaucuucggcgccauagcaggguuuauugaaaacggaugggaggguaugguggauggcugguacggguuccggcaccagaauagcgagggaacuggccaggcugccgacuugaagucaacacaagcggccaucaaccagaucaaugguaaacucaaccgucugauugaaaagaccaaugagaaguuucaucagaucgaaaaagaguucagugaaguagaggggcgcauucaggauuuagagaaguauguggaagacacgaaaauagaucugugguccuacaacgcagagcuccuugucgcucuggaaaaccaacacaccaucgacuugacagauagcgagaugaauaagcuauucgaaagaacuaaaaagcagcugagggagaacgccgaggacaugggcaauggauguuuuaagauuuaucauaaaugcgauaacgcuugcaucggcucuauccggaaugggaccuacgaccacgauguguaccgagacgaagcccucaacaaucgcuuccagauuaagggaguugagcugaaaucagguuauaaggacuggauacuuuggaucaguuuugcaauuagcuguuuccuguugugcgugguccuccugggcuuuaucaugugggccugucagaaagggaacauuagaugcaauaucuguauauga

SEQ ID NO: 128982 - RNA, 1698 nt, Artificial Sequence
  derived and/or modified CDS sequence (opt3) from hemagglutinin__InfluenzaA__ABF47955
augaaggccaaacugcucgugcuucuguacgcuuucgucgcaaccgacgccgauacaaucugcauuggcuaucacgcgaacaauagcacugacacgguugauaccauauuugagaagaacguggcuguaacacauuccgugaauuuguuagaagacagacacaacgggaaacuguguaagcuaaaaggaaucgcaccccuccagcuggguaagugcaauauuacuggcuggcuucuggggaacccugagugugauucuuugcucccagccaggucauggaguuacaucgucgaaaccccgaauagcgagaacggagccugcuaucccggcgacuucauugauuacgaggagcugcgggagcaacuguccucugugucgucacucgaacgcuuugagaucuucccuaaggaaagcaguuggccaaaucauacauuuaacgguguuaccguguccuguucucaccgagggaaaagcuccuucuaucguaauuuacuguggcuuacuaagaaaggagacucauaccccaaguugacaaacaguuaugucaauaacaaaggcaaggaggugcugguacuauggggcguucaucacccuucuagcuccgaugagcagcagucacucuacagcaaugggaacgcuuacgugagugucgcaucuuccaacuauaauagaagguuuaccccagaaauagccgcucggcccaaggugaaagaccagcacggacgcaugaacuacuauuggacgcugcuugagccuggugauacuaucauuuucgaagccaccggcaaucugaucgcgccaugguacgcauuugccuugagcagaggguucgagucgggaauuaucacaucuaacgcuuccaugcaugaaugcaauacuaagugucaaaccccgcagggcucaauaaacaguaaucuccccuuucagaacauucacccugugacaaucggugagugcccaaaauaugucaggagcaccaagcugcggaugguuacgggguuacgcaauauucccuccauccaguaccgaggacuguucggcgccaucgcaggcuuuauugaagggggauggacugguaugauagacggcugguauggguaccaucaccaaaacgaacagggaucuggcuacgcugccgaucagaaaagcacacagaaugcgaucaacagaauuaccaauaaggugaacucaguaaucgagaaaaugaauacucaauucacagccguggguaaggaguucaacaaccucgaaaagaggauggaaaaucuuaacaaaaaggucgacgacggguuucuggauauauggaccuauaaugcagaguugcuagugcugcucgagaacgaacggacgcuggacuuccacgaucuuaauguuaaaaaccuguacgagaaggugaaaagucaguugaagaauaacgcuaaggaaauuggcaauggauguuuugaguucuaucauaaaugcgacaacgaauguauggaguccguccguaauggcaccuacgauuauccuaaguacagcgaggaaucuaaacucaaccgcgagaagaucgacggggugaaacuggaaucaaugggaguauaucagaucuuagccauuuacaguacaguugcuagcucccuggugcuacucgucucucugggugccaucucguuuuggaugugcagcaauggcucccuucaaugcagaauuuguauauga

SEQ ID NO: 128983 - RNA, 1698 nt, Artificial Sequence
  derived and/or modified CDS sequence (opt3) from hemagglutinin__InfluenzaA__ABF60576
augaagaccacaaucauucugauacuccuuacucacgccguggacagccagaaccccaucuccggcaauaacacggcuacccugugcuuggggcaucacgcagucgccaauggaacauuaguuaaaacuauuaccgaugaccaaaucgaggugacaaacgcgaccgaacugguacagucuacuucaauugguaagaucuguaauaacccuuacagagugcuagauggcaggaauugcacacucauagacgcuaugcugggggauccacauugugacgucuuccaguaugagaacugggaucuuuuuaucgaacggaguagcgccuucuccaauugcuacccguaugacauucccgauuacgcaucucugcgcucgaucguggccucaagcggaaccuuggaguuuacggcugaaggcuucacuuggaccgguguuacacagaacgggggaaguggcgcaugucgacguggcuccgccgacagcuuuuucucuagacucaauuggcugacuaaauccgggaacucauauccuacccugaaugugacaaugccaaacaaugauaacuuugacaagcucuacauuuggggaauccaccaucccaguaccaacaaugagcaaacgaaauuauauguccaggagcuggguagggugacuguaagcacaaagcggucucagcagaccauaauuccuaacaucggcucccgcccagggguuagaggacaagcuggcaggauuucaaucuacuggacuaucgugaagcccggugauauucuuaugauaaauagcaacgggaauuuggucgccccucggggauacuucaaaaugcgcacaggcaagaguucuaucaugcgauccgacgcgccaauugauaccugcuggagcgaauguaucacgccgaacggcucgauacccaaugacaaaccuuuucagaacgugaauaaggugaccuaugggaaaugcccaaaguacauuaagcagaacacacugaaacuagcaacuggaaugagaaauguccccgagaagcagaucagggguaucuucggcgccauugcuggguuuaucgaaaacggaugggagggcaugguugacgguugguauggguuccgguaccaaaauucugagggcaccggacaggccgcagaucucaaauccacacaggcugccauugaccaaauaaacggcaagcugaaucgugugaucgaacgcacuaacgagaaauuucaccagauugaaaaggaguucucagaaguagaggggagaauccaggaucuugagaaauauguggaagacaccaagaucgaucuguggaguuacaacgcggaguugcucgucgcccuggaaaaucagcacacaauugacuuaaccgaugcagagaugaacaagcuguucgagaaaacuaggcggcaacuccgagaaaaugcugaggacaugggagguggcuguuuuaagauauaucauaaaugcgauaacgccuguaucgggagcauucgcaauggaacguacgaccacuacaucuauagagacgaagcucuuaacaauagguuccagauuaagggcguggagcugaaauccgguuacaaggauuggaucuuguggauaucuuuugccaucagcugcuuccuaauuugcguugugcugcucggguuuaucaugugggcaugugaaaagggcaacauucggugcaauaucuguauauga

SEQ ID NO: 128984 - RNA, 1701 nt, Artificial Sequence
  derived and/or modified CDS sequence (opt3) from hemagglutinin__InfluenzaA__ABF60577
augaagaccaucauugugcugagcuacuucuuuugccucgcccuuucccaggacuauucugagucaaacaauaguacagcuacucuguguuugggccaccaugcaguccccaacgggacgauaguuaaaaccaucacagaugaccaaauugaagugacuaaugccaccgaguuaguacagagcuccucuacaggaaagaucugcaacaauccucacaggauucuggaugguagagacuguacccuaaucgaugcgcuccugggcgacccacauugcgauguguuccaggacgaaacuugggaucuuuacgucgagcggucgucagcuuuuagcaacuguuauccguacgacgugcccgauuaugccagucugcgcuccuugguugcaucuagcgggacacucgaguucauaaccgaaggauuuacguggacuggcgugacccagaaugguggguccaacgccugcaaacgaggaccugcuucaggcuucuuuagucgucugaauuggcugacaaagagcggcucuacuuacccaguccucaacgugaccaugcccaaugacgauaacuucgacaaauuauauguauggggaguucaccauccuuccacaaaucaagagcagaccgaccuguacgugcaggcaucagggagagucacggugagcacuaggcggagucagcaaacaaucauuccaaacaucgguucucgccccugggugagaggccaguccgggaggauuagcaucuacuggaccauagucaagccuggagauguucuugugauuaauucgaacggcaacuugaucgccccacgggguuauuuuaagauucgcacugggaaaucuuccaucaugcgaucagacgcuccgaucgauacauguauuagugaaugcauaacccccaauggaagcaucccuaacgacaagccauuccagaauguaaacaaaauuacguacggcgccugucccaaguaugugaaacaguccacccugaagcuagcgacaggcaugagaaaugucccugagaagaaaacuagggggcucuuuguggcaaucgccggauucauagaaaacgguugggagggcaugauugauugcugguacggguuucggcaccaaaauucugagggaaccggccaggcugccgaccuuaagagcacacaggcagcuaucgaucaaaucaacgguaaacugaaucguguuauugaaaagacuaacgagaaauuccaccagaucgaaaaggaguucucagaaguggaggggcgcauucaggaccuggagaauuaugucgaagauaccaaaauagacuuguggaguuacaacgccgagcuccugguggcguuagaaaaucagcauacaaucgaucugaccgacuccgagaugaacaagcucuuugaaagaacuaggcggcaacuucgagagaaugccgaggacaugggcagcggauguuucaagauuuaucacaaaugcgauaacgcaugcaucgaaucuauccgcaacggcacguacgaccaugauauuuacagagacgaggcucugaauaacagguuucagauaaaggggguagaauugaaaucaggauauaaggauuggauccuauggauuaguuucgccacaagcuguuuucugcucugcguugugcuggguggcuucaucaugugggcuugucagcgggggaauauucgcugcaacaucuguauauga

SEQ ID NO: 128985 - RNA, 1701 nt, Artificial Sequence
  derived and/or modified CDS sequence (opt3) from hemagglutinin__InfluenzaA__ABF60578
augaagaccaucauugugcugagcugcuucuuuugucucgccuucucccaggaccuuucugagaacaauaacaauacagcuacucugugcuugggccaccaugcaguccccaacgggacgauaguuaaaaccaucacagaugaccaaauugaagugacuaaugccaccgaguuaguacagucaaguagcacaggaaagaucuguaacaauccucacaggauucuggaugguagagacugcacccuaaucgaugcgcuccugggcgacccacauugugauguguuucaggacgaaacuugggaucuuuacgucgagcgguccaaaucuuucucgaacugcuauccguacgacgugcccgauuaugcuucacugcgcagcuugguugccaguuccgggacacucgaauuuauaaccgaggcauucacguggacuggagugacccagaauggcgguucuggggccuguaagcgaggaccuggcaacggcuuuuucagccgucugaauuggcugacaaaauccgggucagcuuacccaguccucaacgugacuaugcccaauaacgacaauuuugauaaguuauauguauggggaguucaccauccuaguaccaaccaagagcagacaaaccuguacgugcaggcaagcgguagagucaccgugucuacgaggcggucccagcaaacuaucauuccaaauaucggcucacgccccugggugagagggcagagcaggcggauuaguaucuauuggacaauagucaagccuggagacauucuuguuaucaacucuaauggcaacuugauugccccacgcgguuacuucaaaaugcgaaccgggaaguccagcaucaugagaucggacgcuccgaucgauacuugcauuucugaauguauaacacccaauggauccaucccuaacgacaaaccauuucagaaugugaacaagauuaccuacggcgccugccccaaauauaucaagcagucaacgcugaagcuagcgaccggcaugaggaauguaccugagaaacaaacacgggggcuguucggagcaauagccgguuuuauugaaaacggcugggaggggaugaucgauggaugguacggcuuccgucaccagaauagugaggguacugggcaggcugccgaccucaagagcacccaagcagcuaucgaucagauuaacggcaaacuuaaucgcgugaucgaaaagacaaacgagaaauuccaccagauugaaaaggaguuuuccgaagucgagggaagaauacaggaccuggagaaauauguggaagauacuaagaucgacuuguggucuuacaaugccgauguucucguggcgcuggagaaccaacauaccauugacuuaacagauagcgaaaugaacaagcuguucgagaaaaccaggcggcagcuccgagaaaaugccgaggacaugggcaacggguguuuuaagaucuaucacaaaugcgacaaugcaugcaucgagucaauucgcaacggaacuuacgaucaugacauauauagagaugaagcucuuaauaacagguuccagaucaaggguuguggcgucaaaaguggguacaaggacuggauucuguggaucuccuuugccauuagcugcuucuugcuaugugugguacugcucggauuuaucaugugggcuugccagcggggcaauauacgcuguaacaucugcauuuga

SEQ ID NO: 128986 - RNA, 1701 nt, Artificial Sequence
  derived and/or modified CDS sequence (opt3) from hemagglutinin__InfluenzaA__ABF60579
augaagacccugaucgcccucagcuacauuuucugccuugugcugggccaggacuugcccgggaacggaaauuccacagcuacuuuaugucugggucaccaugcagucccuaacggcacgcuaguuaaaaccauaacagaugaccaaaucgaggugacuaaugccaccgaacucguacagaacuuuucuauggauaagauuugcaauaacccacacagaauccuggacggggcgaauuguacacuuauugaugcucuguugggagacccgcauugcgaugacuuccagaacgagaaaugggaucucuuuguggaaaggucaaaggccuucaguaauuguuaucccuacgacgucccugauuauaccagccugcggucccugaucgcaucuucgggcacucucgaguuuauaaacgaagacuucaauuggacaggugugacccagaacgggggaucaaaugccugcaaacgcggcccagauagcuccuuuuucagucgauuaaacuggcuguacaagucuggcaauacguaucccaugcuuaacguuacuaugccuaacagcgacaauuuugacaaguuguacaucuggggagugcaccauccauccaccgcucgugagcaaacaaaccuguauguccaggcaucagggaaagugacuguaaguaccaagagaagccagcagacaauuauccccaauauugguucuaggccuuggguucggggccuauccucacgcaucagcauauacuggaccauugugaaaccaggggauauccucgucauuaacaguaauggaaaccugaucgccccgagaggcuacuucaagaugcacacggguaggucuuccaucaugcggagcgacgcucccauugauacuuguucgucugagugcauaacaccuaauggguccaucccaaacgacaaacccuuucaaaaugugaacaagauuaccuauggagccuguccuaaguacgugaaacagaauacucuuaagcuggcgacaggcaugcgcaacaucccagaaaaacagacccgaggcauauucggggcaauugccggauuuaucgagaaugguugggaaggcauggucgaugggugguauggauucagacaccagaacucagagggcacgggucaagcugccgacuugaagaguacccaggcagcuaucgaucagauuaaugggaaacucaacaggguuaucgagaagacaaacgaaaaauuccaucaaauugagaaggaauuuagcggcguggagggacggauacaggaccuggaaaaguacguagaggauacuaaaaucgacuuaugguccuauaaugccgagcugcucguggcgcuugaaaaccagcacaccauugaucugacagacucugagaugaauaaguuguucgagaaaacucgucgccagcuaagagaaaacgccgaagacaugggcaaugggugcuuuaagaucuaccauaaaugugauaacgcaugcaucgagagcauuaggaauggaaccuaugaccacaacgaguaccgggaugaagcucugaauaaccgauuccaaauaaagggugucgagcucaagucaggcuacaaagacuggauccuguggauuaguuuugccaucuccugcuuccuucugugugugguuuugcucggguuuauuaugugggcuugccagaagggaaauauccgcuguaacauaugcaucuga

SEQ ID NO: 128987 - RNA, 1701 nt, Artificial Sequence
  derived and/or modified CDS sequence (opt3) from hemagglutinin__InfluenzaA__ABF60580
augaagaccaucauugcccugagcuacauauucugccucgcuuuugcacaggaccuucccggcaacgauaauuccacagccacucuguguuuggggcaccaugcggugccuaacggaacguuagucaaaaccaucacaaaugaccaaauugagguuacuaacgcuaccgaacuggugcagucuucaaguacagguaagaucugcgauaauccacacaggauucuagacggcaucaacuguacccucauagaugcccugcuuggggacccgcauugcgauggauuccagaaugagaaaugggaccuguuuguagaaagaagcaaggcauucuccaacuguuaucccuacgaugugccugacuaugccucuuugcggucgcucgucgcuucaagcggcacucuggaguuuaucaaugaagguuucaacuggacaggggugacccagaauggaggcaguuccgcaugcaaacgcggcccagauaacggguuuuucucucgacugaauuggcucuacaagagcggauccacguaucccguucaaaacgugacuaugccuaauaacgacaacucagauaaguuauacauuugggguguccaccauccaaguaccgacaaagagcagacagaccuguaugugcaggccagcggcaagguaacuguuucuaccaaacguauccagcaaacagugauucccaaugucggguccagaccuugggugaggggacuuucaagccgggugaguaucuacuggaccauagucaagccaggcgauguuuuggugauuaacucuaaugguaaccugaucgcuccgcgcggguacuauaaaaugagaacgggaaaguccagcauuaugaggucggacgcccccaucggcacuuguucuuccgagugcaucacaccuaauggcucaauuccaaacgauaagcccuuucagaauguaaacaaaauaaccuacggggcguguccuaaguaugugaaacagaauacucuaaagcucgcaacaggaaugcggaacgucccagaaaaacagacccgcgguaucuucggcgccauugcuggguuuaucgagaauggaugggaaggcaugauagacgguugguacggguuccgacaccaaaacagugagggcacgggacaggccgcagaucuuaagagcacccaggcugccauugaccaaaucaauggcaaacugaacagagugaucgagaagacaaaugaaaaguuucaccagauugagaaagaguucuccgaaguugaagggaggauccaggaucuggagaaguauguggaggacacuaaaauugauuuguggucuuacaacgcggaaguccucguggcccuggagaaccagcauaccauagacuuaacagauagcgaaaugaauaagcuguucgagaaaacucggcgucaacuccgcgaaaacgcagaggacaugggaaaugguugcuuuaagaucuaucacaagugugacaacgcuugcauuggcucaaucagaaaugggaccuacgaucaugacguauacagggaugaggcccuuaacaaucgguuccagaucaaaggaguugaacugaagaguggcuauaaagacuggauuuuguggauauccuuugcuaucagcugcuuccuacugugugugguccuccuggguuuuauuaugugggccugccagaaggggaacauccgauguaauauuugcaucuga

SEQ ID NO: 128988 - RNA, 1701 nt, Artificial Sequence
  derived and/or modified CDS sequence (opt3) from hemagglutinin__InfluenzaA__ABF60581
augaagaccaucauugugcugagcuacuucuuuugccucgcccuuucccaggacuauucugagucaaacaauaguacagcuacucuguguuugggccaccaugcaguccccaacgggacgauaguuaaaaccaucacagaugaccaaauugaagugacuaaugccaccgaguuaguacagagcuccucuacaggaaagaucugcaacaauccucacaggauucuggaugguagagacuguacccuaaucgaugcgcuccugggcgacccacauugcgauguguuccaggacgaaacuugggaucuuuacgucgagcggucgucagcuuuuagcaacuguuauccguacgacgugcccgauuaugacagucugcgcuccuugguugccucuagcgggacacucgaguucauaaccgaaggauuuacguggacuggcgugacccagaaugguggguccaacgcaugcaaacgaggaccugccucaggcuucuuuagucgucugaauuggcugacaaagagcggcucuacuuacccaguccucaacgugaccaugcccaauaacgauaauuucgacaaauuauauguauggggaguucaccauccuuccacaaaccaagagcagaccaaucuguacgugcaggcuucagggagagucacggugagcacuaggcggagucagcaaacaaucauuccaaacaucgguucucgccccugggugagaggccaguccgggaggauuagcaucuacuggaccauagucaagccuggagacguucuugugauuaacucgaauggcaacuugaucgcaccacgggguuauuuuaagaugcgcacugggaaaucuuccauuaugcgaucagaugccccgaucgacacauguaucagugaaugcauuacccccaauggaagcauaccuaacgauaugccauuccagaauguaaacaagaucacguacggcgcuugucccaaauaugugaagcagggcacccugaaacuagccacagggaugagaaaugucccugagaagcaaacuaggggacucuuuggugcgauugcaggcuucaucgaaaacgggugggagggaaugauagacggcugguacgguuuucggcaccaaaauuccgaggggaccggccaggccgcugaucugaagucuacacaggccgcaauugaccagaucaacggaaaacuuaaucgugugaucgaaaagacuaacgagaaauuccaccagauugaaaaggaguucagcgaaguugagggccgcauccaggaucuggagaaauauguggaagacaccaagauugauuuguggucagacaaugcugagcuccuggucgccuuagaaaaccaacauacaauagaucugaccgacagugagaugaauaaacucuuugaaaagacuagaaggcagcuucgggagaacgcggaggugauggggaacggaugcuucaagaucuaccacaaaugugacaaugccugcauugaauccauccgaaacgguacguaugaucaugacaucuaccgcgaugaggcacugaauaacagauuucagauuaagggcguagaauugaaaagcggguacaaggacuggauacuauggaucucuuucgcuauuucaugcuuucugcucuguguugugcugcuuggauucaucaugugggccugccagaggggcaauauucgguguaacaucugcauauga

SEQ ID NO: 128989 - RNA, 1701 nt, Artificial Sequence; identical to SEQ ID NO: 128788
  derived and/or modified CDS sequence (opt3) from hemagglutinin__InfluenzaA__ABF82651

SEQ ID NO: 128990 - RNA, 1698 nt, Artificial Sequence; identical to SEQ ID NO: 128848
  derived and/or modified CDS sequence (opt3) from hemagglutinin__InfluenzaA__ABF82662

SEQ ID NO: 128991 - RNA, 1698 nt, Artificial Sequence
  derived and/or modified CDS sequence (opt3) from hemagglutinin__InfluenzaA__ABF82673
augaaggccaaacugcucgugcuucugugcaccuucacagcuacuuacgcagacacgaucuguauuggcuaucacgccaacaauagcaccgauacagucgacacuguuuuggagaagaacgugaccguaacacauuccgugaauuuacuggaagauucucacaacgggaaacuaugccuccugaagggaauagcgccccuucagcuggguaauuguucagucgcuggcuggaucuuggggaacccugagugcgaacuccugauuaguaaaggaagcugguccuacaucguggagaccccaaauccggaaaacggcacuuguuaucccgguuacuuugccgacuaugaggagcugagagaacaacucucuucgguuagcucauucgagagguuugaaauuuucccuaaggggaguuccuggccaaaucauacagugaccggagucucugcaagcugcucccacaacggcaagucaaguuuuuaccggaauuuacuguggcuuacgggcaaaaacggguuguaucccaaucugagcaugucuuacgugaacaauaaggagaaagagguacuuguucucuggggagugcaucacccuccaaacaucggugaucagcgcgcccuguaccacacugaaaacgcuuaugucuccguggugucaagccauuacagucgacguuucacccccgagauagcaaagagaccuaaagucagggaccaggaaggccggaucaauuauuacuggacacuucuggagccaggggauacuauuaucuuugaagccaacggaaauuugauugcuccgugguaugccuucgcgcucucucgcggcuuugguuccgggaucauaaccagcaacgcacccaugggagagugugacgccaagugccagacaccucaaggcgcuauuaauucgucucugccauuccagaacguucaccccgugaccaucggcgaguguccuaaguacguaagauccgccaaauuaaggauggugacggggcugcggaauauuccaucaauccagagucgcggacucuuuggugcaaucgcuggcuucauugaagggggauggacuggcauggucgaugguugguauggguaccaucaccagaacgagcaaggcagcggauacgccgcggaccagaaguccacacagaaugccauaaacggcaucaccaauaaagugaacucuguuauugaaaagaugaauacucaguuuacagcaguggggaaagaguucaacaagcuagaacgaagaauggagaaucugaacaaaaaggucgaugacggauucuuggauaucuggaccuauaacgcugagcuacuggugcuccuggaaaaugagaggacgcuugacuuucacgacagcaacguaaagaaucuguacgaaaaaguuaagucacaauugaaaaacaaugccaaggagauagguaacggcugcuucgaauuuuaucauaaauguaauaacgagugcauggagagugugaagaaugggaccuacgauuaucccaaguacuccgaagagagcaaacucaaccgggaaaagauugacggagucaaacuggagucuaugggcguguaucagaucuuagcuaucuacucaacagucgccaguagccuggugcuacucguuucccugggugcaauuucuuucuggaugugcucgaaugggagccuucagugucguaucugcauuuga

SEQ ID NO: 128992 - RNA, 1698 nt, Artificial Sequence; identical to SEQ ID NO: 128889
  derived and/or modified CDS sequence (opt3) from hemagglutinin__InfluenzaA__ABF82684

SEQ ID NO: 128993 - RNA, 1701 nt, Artificial Sequence; identical to SEQ ID NO: 128855
  derived and/or modified CDS sequence (opt3) from hemagglutinin__InfluenzaA__ABF82695

SEQ ID NO: 128994 - RNA, 1701 nt, Artificial Sequence; identical to SEQ ID NO: 128831
  derived and/or modified CDS sequence (opt3) from hemagglutinin__InfluenzaA__ABF82706

SEQ ID NO: 128995 - RNA, 1698 nt, Artificial Sequence; identical to SEQ ID NO: 128347
  derived and/or modified CDS sequence (opt3) from hemagglutinin__InfluenzaA__ABF82819

SEQ ID NO: 128996 - RNA, 1698 nt, Artificial Sequence; identical to SEQ ID NO: 128848
  derived and/or modified CDS sequence (opt3) from hemagglutinin__InfluenzaA__ABF82830

SEQ ID NO: 128997 - RNA, 1698 nt, Artificial Sequence; identical to SEQ ID NO: 128848
  derived and/or modified CDS sequence (opt3) from hemagglutinin__InfluenzaA__ABF82841

SEQ ID NO: 128998 - RNA, 1698 nt, Artificial Sequence; identical to SEQ ID NO: 128848
  derived and/or modified CDS sequence (opt3) from hemagglutinin__InfluenzaA__ABF82852

SEQ ID NO: 128999 - RNA, 1698 nt, Artificial Sequence
  derived and/or modified CDS sequence (opt3) from hemagglutinin__InfluenzaA__ABF82863
augaaggccaaacugcucgugcuucugugcaccuucacagcuacuuacgcagacacgaucuguauuggcuaucacgccaacaauagcaccgauacagucgacacuguuuuggagaagaacgugaccguaacacauuccgugaauuuacuggaagauucucacaacgggaaacuaugccuccugaagggaauagcgccccuucagcuggguaauuguucagucgcuggcuggaucuuggggaacccugagugcgaacuccugauuaguaaagagagcugguccuacaucguggaaaccccaaauccggagaacggaacuuguuaucccggcuacuuugccgacuaugaggaacugagagagcaacucucuucgguuagcagcuucgaaagguuugagauuuucccuaaggguaguuccuggccaaaucauacagugaccggggucucugcaagcugcucccacaacggaaagucaaguuuuuaccggaauuuacuguggcuuacgggcaaaaacggcuuguaucccaaucugagcauguucuacgugaacaauaaggagaaagaaguacuuguucucuggggagugcaucacccuccaaacaucggggaucagcgcgcccuguaccacacugagaacgcuuaugucucugugguguccucacauuacagccgacguuuuacccccgaaauagcaaagagaccuaaagucagggaccaggagggucggaucaauuauuacuggacacuucuggaaccaggcgauacuauuaucuucgaggccaacgggaauuugauugcuccgugguaugccuuugcgcucagucgcggauucggcucugguaucauaaccuccaacgcacccaugggggagugugacgccaagugccagacaccucaaggagcuauuaauagcucgcugccauuucagaacguucaccccgugaccaucggcgaauguccuaaguacguaagaucugccaaauuaaggauggugacgggccugcggaauauuccauccauccagucacgcggacucuucggggcaaucgcugguuuuauugagggcggguggacuggaauggucgauggcugguaugguuaccaucaccagaacgaacaagggaguggcuacgccgcggaccagaagucaacacagaaugccauaaacggaaucaccaauaaagugaacuccguuauugagaagaugaauacucaguucacagcagugggcaaagaguucaacaagcuagaacgaagaauggagaaucugaacaaaaaggucgaugacggguuuuuggauaucuggaccuauaacgcugaacuacuggugcuccuggagaaugaaaggacgcuugacuuccacgacucuaacguaaagaaucuguacgagaaaguuaagagccaauugaaaaacaaugccaaggaaauaggaaacgguugcuuugaguucuaucauaaauguaauaacgagugcauggaaucagugaagaauggcaccuacgauuaucccaaguacagugaggaauccaaacucaaccgggagaagauugacggggucaaacuggagagcaugggaguguaucagaucuuagcuaucuacucuacagucgccucaagucuggugcuacucguuagccugggcgcaauuuccuuuuggaugugcucuaaugguucgcuucagugucguaucugcauuuga

SEQ ID NO: 129000 - RNA, 1698 nt, Artificial Sequence
  derived and/or modified CDS sequence (opt3) from hemagglutinin__InfluenzaA__ABF82874
augaaggccaaacugcucgugcuucugugcaccuucacagcuacuuacgcagacacgaucuguauuggcuaucacgccaacaauagcaccgauacagucgacacuguuuuggagaagaacgugaccguaacacauuccgugaauuuacuggaagauucucacaacgggaaacuaugccuccugaagggaauagcgccccuucagcuggguaauuguucagucgcuggcuggaucuuggggaacccugagugcgaacuccugauuaguaaagagagcugguccuacaucguggaaaccccaaauccggagaacggaacuuguuaucccggcuacuuugccgacuaugaggaacugagagagcaacucucuucgguuagcucauucgaaagguuugagauuuucccuaaggguaguuccuggccaaaucauacagugaccggggucucugcaagcugcucccacaacggaaagucaaguuuuuaccggaauuuacuguggcuuacgggcaaaaacggcuuguaucccaaucugagcaugucuuacgugaacaauaaggagaaagaaguacuuguucucuggggagugcaucacccuccaaacaucggggaucagcgcgcccuguaccacacugagaacgcuuaugucuccguggugucaagccauuacagucgacguuucacccccgaaauagcaaagagaccuaaagucagggaccaggagggucggaucaauuauuacuggacacuucuggaaccaggcgauacuauuaucuuugaggccaacgggaauuugauugcuccgugguaugccuucgcgcucucucgcggauuuggcuccgguaucauaaccagcaacgcacccaugggggagugugacgccaagugccagacaccucaaggagcuauuaauucgucucugccauuccagaacguucaccccgugaccaucggcgaauguccuaaguacguaagauccgccaaauuaaggauggugacgggccugcggaauauuccaucaauccagagucgcgggcucuuuggagcaaucgcugguuucauugagggcggguggacuggaauggucgauggcugguaugguuaccaucaccagaacgaacaagggagcggcuacgccgcggaccagaaguccacacagaaugccauaaacggaaucaccaauaaagugaacucuguuauugagaagaugaauacucaguuuacagcagugggcaaagaguucaacaagcuagaacgaagaauggagaaucugaucaaaaaggucgaugacggguucuuggauauauggaccuauaacgcugaacuacuggugcuccuggagaacgaaaggacgcuugacuuucacgacagcaauguaaagaaccuguacgagaaaguuaagucacaauugaaaaauaacgccaaggaaauuggaaaugguugcuucgaguuuuaucauaaauguaacaaugagugcauggaaagugugaagaacggcaccuacgauuaucccaaguacuccgaggaaagcaaacucaaucgggagaagaucgacggggucaaacuggagucuaugggaguguaucagaucuuagcuauuuacucaacagucgccaguagccuggugcuacucguuucccugggcgcaaucucuuucuggaugugcucgaacgguagccuucagugucguauuugcauauga

SEQ ID NO: 129001 - RNA, 1698 nt, Artificial Sequence; identical to SEQ ID NO: 128848
  derived and/or modified CDS sequence (opt3) from hemagglutinin__InfluenzaA__ABF82885

SEQ ID NO: 129002 - RNA, 1698 nt, Artificial Sequence; identical to SEQ ID NO: 128848
  derived and/or modified CDS sequence (opt3) from hemagglutinin__InfluenzaA__ABF82896

SEQ ID NO: 129003 - RNA, 1698 nt, Artificial Sequence; identical to SEQ ID NO: 128848
  derived and/or modified CDS sequence (opt3) from hemagglutinin__InfluenzaA__ABF82907

SEQ ID NO: 129004 - RNA, 1698 nt, Artificial Sequence; identical to SEQ ID NO: 128892
  derived and/or modified CDS sequence (opt3) from hemagglutinin__InfluenzaA__ABF82929

SEQ ID NO: 129005 - RNA, 1698 nt, Artificial Sequence; identical to SEQ ID NO: 128848
  derived and/or modified CDS sequence (opt3) from hemagglutinin__InfluenzaA__ABF82940

SEQ ID NO: 129006 - RNA, 1701 nt, Artificial Sequence
  derived and/or modified CDS sequence (opt3) from hemagglutinin__InfluenzaA__ABF83447
augaagaccaucauugcccugagcuacauauucugccucgcucuuggccaggaccugcccgggaacgauaauaacacagcaacuuuguguuuaggacaccaugccgugccuaaugguacgcuggucaaaaccaucacagacgaucaaauugagguuacuaacgcgaccgaacuugugcaguccucuucaacaggcaagaucugcaauaacccacacaggauucucgacgggaucgauuguacccugauagacgcucuacugggagauccgcauugcgacguauuucagaaugagacuugggauuuguucguggaaagaaguaaagccuuuagcaacuguuaucccuacgacgucccugauuaugcaucccuccggucucugguggccucgucaggcacacuggaguucaucaccgaagguuuuacguggacugggguuacccagaauggaggcagcaacgcuugcaagcgcggcccagggaguggauucuuuucccgacucaauugguuaacaaaaucugguagcacuuaccccgugcugaacgucaccaugccuaauaacgacaauuucgauaaacuuuauauuuggggcgugcaccauccauccacaaaccaagagcagaccucauuguacguacaggcaagugggggaguuacggugagcacucguagaucucagcaaacaaucauucccaacaucggcuccaggccuuggguccggggucugucaagccgcauaaguauuuauuggaccaucgugaagccaggggacgugcuagucauuaauucuaacggaaaucucaucgccccgagaggcuacuuuaagaugaggacuggcaaguccagcaucaugcggucggacgcucccauugauacauguauaucugagugcaucaccccuaacggguccauuccaaaugacaaacccuuccagaacguuaauaagaucacguacggagccuguccuaaauaugugaagcagaacacccugaaacuugcgacagguaugcgcaauguaccagaaaagcagacucgaggccuguuuggggcaauagccggauucauugagaacggcugggaagguaugaucgaugggugguacggcuuuagacaccaaaauucagagggaaccggccaggcugccgacuugaagaguacacaggcagcuaucgaucaaauuaacgggaaacucaauagggugaucgagaagacuaacgaaaaauuccaccagauugagaaggaguucagcgaagucgaaggacggauacaggaccuggagaaauauguggaggauaccaagaucgacuuaugguccuacaaugccgaacugcucguugcgcuugagaaccagcauacaauugaucugaccgacucugaaaugaacaaguuguuugagaaaacucgucgccaacuaagagaaaaugccgaggauauggguaacggcugcuucaagaucuaucacaaaugugacaaugcaugcaucgagagcauuaggaacgggacguacgaccaugauguguaucgggacgaagcucugaauaaccgauuucagauaaagggagucgagcucaaaucaggcuacaaggauuggauccuguggauuaguuucgccaucuccugcuuucuucugugugugguauugcucgguuucauuaugugggcuugccagcgcgggaauaucagauguaacauaugcaucuga

SEQ ID NO: 129007 - RNA, 1644 nt, Artificial Sequence
  derived and/or modified CDS sequence (opt3) from hemagglutinin__InfluenzaA__ABG20468
auggagaagaucgugcugcuccuugccauugucagccugguuaaauccgaccagauaugcaucggcuaccacgcuaacaauucuaccgaacaaguggauacaauuauggagaagaacguaacugugacgcaugcacaggacaucuuggagaaaacccacaaugggaaguuaugugaucuggacggagucaaaccccuaauucucagagauugcucaguggccggugagaagaucaacccugcgaaugaccuguguuauccaggcaacuucaaugauuacgaagaacuuaagcaucuguugaguaggauaaaccacuuugagaaaauccagauuaucccgaaguccuccuggucugaccaugaggcuucgucagggguuagcagugccugccccuaucagggacgguccucuuucuuucgcaauguggucuggcucauuaaaaagaacaaugcauacccuacaaucaaacgaagcuauaacaauacuaaccaagaggaucugcuggugcucuggggcauacaccacccaaaugacgccgcugaacagacccguuuauaccagaaccccacaaccuauauuuccguagguacuucaacacugaaccagagacuuguuccuaagaucgcaaccaggaguaaggugaaugggcaaagcggacggauggaguucuuuuggacgauuuugaaaccaaacgaugccaucaauuucgagucuaacggcaauuuuaucgcucccgaaaacgccuacaagauugucaaaaagggcgacuccacuauaaugaaaucagagcuggaauacgggaauuguaacaccaagugcgagacaccuaucggagcgauuaauagcaguaugccauuccauaacauccacccgcuaacuauaggugaaugucccaaauaugugaagucuaaucgccucgugcuggcaaccggccuuagaaacuccccucagggggagaggcggcgcaagaaacgaggacuguuuggcgccauugcugguuucaucgaagggggauggcagggcauggucgauggcugguacggguaucaucacagcaaugaacagggaucggguuacgccgcagacaaggagucuacacaaaaagcuaucgacggcguuaccaacaaggugaauagcauuaucgauaaaaugaacacgcaguuugaagccguagggagagaguucaacaauuuggaaaggcggauugagaaccucaauaagaagauggaggacggauuucuggauguguggacuuauaacgcggaauuacugguccucauggagaaugaacguacacuugacuuccacgauucaaacgugaaaaaucuguacgacaagguucgcuugcagcuaagagauaacgccaaagagcugggcaaugguugcuucgaauuuuaucauaggugugacaacgagugcauggagagugugcggaaugggaccuacgauuacccacaauauagcgaagaggcacgacucaagcgcgaagagauauccggcgucaaacuggagucuaucggaacuuaccagauucuuagcaucuauucaacaguggcuaguucccuggccuuggcuaucaugguagccggccucagccuguggauguguucuaacgggucauuacagugcagaauuugcauauga

SEQ ID NO: 129008 - RNA, 1707 nt, Artificial Sequence
  derived and/or modified CDS sequence (opt3) from hemagglutinin__InfluenzaA__ABG20472
auggagaagaucgugcugcuccuugccauugucagccugguuaaauccgaccagauaugcaucggcuaccacgcuaacaauucuaccgaacaaguggauacaauuauggagaagaacguaacugugacgcaugcacaggacaucuuggaaaaagcccacaaugggaaguuaugugaucuggacggagucaaaccccuaauucucagagauugcucaguggcggguuggcugcuuggcaacccuaugugugacgaguuccugaauguuccagaauggaguuauaucguggagaagauaaacccggcuaaugauuugugcuaccccgggaacuuuaaugacuaugaggaacucaagcaucugcugagcaggaucaaccacuucgagaaaauucagaucauuccuaaguccucuuggucggaucaugaagccucaagcggagucaguuccgcauguccauaccagggccggucuagcuuuuuccgcaaugugguauggcucaucaaaaaggacaacgccuaucccaccauaaaacgauccuacaauaacacaaaucaagaggauuuacugguucuuugggguauucaccacccuaacgacgcugcagagcagacucguuuguaucagaacccaaccacauacaucucaguggggaccaguacucugaaucagaggcuaguccccaagauugccacaagaagcaaggugaacggacaaucuggccggauggaauuuuucuggaccauccucaaaccuaaugaugcuaucaacuuugaguccaauggcaacuucauugccccagaaaaugcguacaagauagugaaaaagggggacucaacgaucaugaaaagcgagcuggaauauggaaacugcaauacuaagugucagaccccgauuggugcaaucaacaguucuaugcccuuucauaauauacacccucuuacaauuggcgagugcccaaaauacgucaaguccaaccgccugguuuuggccacugggcucagaaauagcccccagggagagaggcggcgcaagaaacgaggccuguucggugcuaucgccggguuuaucgaaggaggcuggcagggcaugguggacgggugguauggauaccaucacucgaacgagcaagguucuggcuaugcagcugauaaggaauccacccagaaagccauugacgggguaacaaauaaggugaacucaaucauugauaaaaugaacacccaguucgaggcggucggaagagaauuuaauaacuuagagaggcggauagagaaucugaacaagaagauggaagacggcuuccucgauguguggacguacaaugccgagcuucugguuuugauggaaaacgagcguacucuagacuuccacgauaguaaugugaaaaaccuguaugacaagguccgccuccaacugagagauaaugcaaaagaacuugguaacggguguuuugaguucuaccauaggugcgacaaugaguguauggaaagcgugcggaacggcacauacgauuauccucaguacuccgaggaagcucgacugaagcgcgaggagaucucuggaguaaaauuggaaagcauuggcaccuaucagauccucucaaucuacaguacuguugccuccagccuggcuuuagccauuaugguggcagggcugucucuauggaugugcucaaauggaagucuccagugcagaauauguaucuga

SEQ ID NO: 129009 - RNA, 1707 nt, Artificial Sequence
  derived and/or modified CDS sequence (opt3) from hemagglutinin__InfluenzaA__ABG20478
auggagaagaucgugcuccuguucgccauugucagccuuguuaaauccgaccagauaugcaucggcuaccacgcuaacaauucuaccgaacaaguggauacaauuauggagaagaacguaacugugacgcaugcacaggacauccuggagaaaacccacaaugggaaguugugugauuuagacggagucaaaccccugauucuaagagauugcucaguggccgguuggcuccugggcaacccuaugugugacgaauuucuuaauguuccagaauggaguuauaucguggagaagauaaacccggcgaaugaucugugcuaccccgggaacuucaaugacuaugaggaauugaagcaucuccugagcaggaucaaccacuuugagaaaauucagaucauuccuaaguccucuuggucggaucaugaagcuaguagcggagucaguuccgccuguccauaccagggccggucuagcuucuuucgcaaugugguauggcugaucaaaaaggacaacgcauaucccacaauaaaacgauccuacaauaacacuaaucaagaggaucucuuaguucugugggguauucaccacccuaacgacgccgcugagcagacccgucuuuaucagaacccaacaaccuacaucucaguggggacuucaacauugaaucagagacugguccccaagauugcaaccaggagcaaggugaacggacaaucuggccggauggaguucuuuuggacgauccuaaaaccuaaugaugccaucaacuucgaauccaauggcaacuuuauugcuccagaaaaugccuacaagauagugaaaaagggggacucaacuaucaugaaaagcgagcucgaauauggaaacugcaauaccaagugucagacaccgauuggugcgaucaacaguucuaugcccuuccauaauauacacccucugacuauuggcgagugcccaaaauacgucaaguccaaccgccuuguucuggcaaccggguugagaaauagcccccagggagagaggcggcgcaagaaacgaggccucuuuggugccaucgcuggguucaucgaaggaggcuggcagggcaugguggacgggugguauggauaccaucacucgaacgagcaagguucuggcuaugccgcagauaaggaauccacacagaaagcuauugacgggguaaccaauaaggugaacucaaucauugauaaaaugaacacgcaguuugaggccgucggaagagaguucaauaaccuggaaaggcggauagagaauuuaaacaagaagauggaagacggcuuccuggauguguggacuuacaaugcggagcuccuuguucugauggaaaacgagcguacauuggacuuucacgauaguaaugugaaaaaccuauaugacaagguccgccugcaacucagagauaaugccaaagaacuggguaacggguguuucgaguuuuaccauaggugcgacaaugaguguauggaaagcgugcggaacggcaccuacgauuauccucaguacuccgaggaagcacgacuuaagcgcgaggagaucucuggaguaaaacuggaaagcauuggcacuuaucagaucuugucaaucuacaguacaguugcuuccagccucgcccuggcuauuaugguggccggguuaucucuguggaugugcucaaauggaagucuacagugcagaauauguaucuga

SEQ ID NO: 129010 - RNA, 1701 nt, Artificial Sequence; identical to SEQ ID NO: 128831
  derived and/or modified CDS sequence (opt3) from hemagglutinin__InfluenzaA__ABG26758

SEQ ID NO: 129011 - RNA, 1701 nt, Artificial Sequence
  derived and/or modified CDS sequence (opt3) from hemagglutinin__InfluenzaA__ABG26769
augaagaccaucauugcccugagcuacauacucugccuuguguucgcucagaaacugcccggcaacgacaauuccacagcaacuuuguguuuagggcaccaugccgucccuaacggaacgcugguuaagaccaucacaaaugaucaaauugaggugacuaacgcgaccgaacuuguacaaaauucuucaacagguagaaucugcgacaguccacacaggauucucgauggcaaaaacuguacccugaucgacgcucuacugggggauccgcauugcgacggauuucagaauaaggagugggauuuguucguggaacggagcaaagccuauuccaacuguuaccccuaugacgucccugauuacgcaucucuccgcucgcugguggccucaagcggcacucuggaguuuaauaacgaaaguuucaauuggacagguguugcucagaacgggaccuccuaugcaugcaagcgacguucugucaagagcuuuuucuccagacucaauugguuacacaaacuggaguacaaguauccagcccuuaacgugacgaugcccaauaacgacaaauuugauaaguuguacauauggggagugcaucacccuucaacugacagugaucagaccagccuguacguacaggcuucuggcaggguuacaguguccacuaaacggucacagcagaccgucaucccaaacauuggcagcgggcccugggugcgcggagugaguucuagaaucuccauuuauuggacaaucgucaagccuggugacauacuacucauuaauagcaccggcaaccugaucgccccaaggggguacuucaagauucggucgggaaaaucuuccaucaugcgcucagacgcgccgaucggcaauuguaacagugagugcauuacgcccaaugguagcauaccuaacgauaagccauuucaaaauguuaaccgaaucacuuauggggcaugucccagauacgugaaacagaauacacuuaagcuggccaccggaaugaggaacguaccugaaaaacagacucggggcauuuucggcgcuaucgccggguuuauagagaauggaugggaagguaugguggacggcugguauggguuccgucaccagaacuccgagggaacaggccaagcagcugauuugaagucuacccaggccgcgauuaaucagaucaacgguaaacucaaucgccugaucgagaagacgaacgaaaaguuucaucaaauugagaaagaguucagcgaagucgaagggagaauccaggacuuagagaaguacguggaggauaccaaaauugaccuguggucauauaacgccgaacuccuuguugcacuggagaaucagcacacaauagauuugacugacagugaaaugaacaagcuauucgagaggacccggaaacagcugcgagaaaaugcugaggauaugggcaacggaugcuuucgcaucuaccauaagugugacaaugccugcauuggcuccaucagaaacgggacauacgaucacgacguguauagggacgaggcucucaauaaccgguuccaaaucaagggagucgaacugaaaagcgguuacaaggauuggauucuuuggauaucuuuugccaucucaugcuuccuguugugugugguacuccugggcuuuauuaugugggcaugccagaaagggaauauccgcuguaacauuugcaucuga

SEQ ID NO: 129012 - RNA, 1701 nt, Artificial Sequence; identical to SEQ ID NO: 128959
  derived and/or modified CDS sequence (opt3) from hemagglutinin__InfluenzaA__ABG26780

SEQ ID NO: 129013 - RNA, 1701 nt, Artificial Sequence
  derived and/or modified CDS sequence (opt3) from hemagglutinin__InfluenzaA__ABG26791
augaaggccaaacugcucgugcuucugugcgcuuucaccgcaacauacgccgacacuaucuguauuggcuaucacgcgaacaauagcacggauaccgucgacacaguuuuggagaagaacgugacuguaacccauuccgugaauuuacuggaagauucucacaacgggaaacuaugcagacucaagggaacagcuccccugcagcuugguaauuguucagucgccggcuggauacuggggaacccugagugcgaaaguuuguuuagcaaagaguccuggucuuacaucgcagaaaccccaaauccggagaacggaacuuguuaucccggcuacuucgccgacuaugaggaacucaaggagcaacugucgucagugagcaguuuugaaagguucgagauuuuuccuaaggaguccucuuggccaaaucauacaguuaccaaaggugugacggcuagcugcucccacaacgggaagucaaguuucuacaaaaaucugcucugguuaacugaaaagaacggacuguaucccaaucuuagcaaaucuuacgucaacaauaaggagaaggaaguguugguacuguggggcguucaucacccuuccaacaucggcgaucagcgggcaauuuaccacaccgagaacgccuaugugucagucgugagcagucauuacucucgccgauuuacaccagaaaucgcuaaacgucccaaggugagagaccaggaggggaggauaaauuauuacuggacucuacucgagccuggagauaccaucauuuucgaagccaacgguaaucugaucgcgccaugguaugcauuugcccuuucccggggcuucgggagcggaauuaucacaucgaacgcuucuaugggcgagugugacgccaaaugccagaccccgcaaggugcaauaaauuccucacugcccuuucagaacguccacccuguuacgauuggggaauguccaaaguacgugcgcaguacuaaauugagaaugguaacaggacucaggaauauccccagcauucagucccggggccuguucggcgcuaucgccggguuuaucgagggagguuggaccggcaugauugaugggugguauggauaccaucaccagaacgaacaaggcucugguuacgcggccgacaagaaaagcacucagaaugcaauagaugggaucacaaacaaggucaauucagugauugagaagaugaacacccaguucacggcugugggcaaagaguucaauaaguuagaacgccgaauggagaaccugaauaaaaagguugacgauggauuucucgacaucuggaccuauaacgccgaacuucugguguugcuagagaacgaaagaacacuggacuuccacgauaguaaugucaaaaaccucuacgagaaggugaagaaucagcugaaaaacaaugcuaaggagauaggcaacgggugcuuugaguucuaucauaaauguaauaacgaaugcauggaauccguaaagaauggaacuuacgacuauccuaaauacagcgaggagucuaaacuuaagagggaaaagauugaugguguuaagcuggagucaaugggcguguaucaaaucuuggccaucuacaguaccgucgcaagcucccucgugcuguuagucucucugggggccauuucguuuuggaugugcagcaacggaucccuacagugucggaucugcauuuga

SEQ ID NO: 129014 - RNA, 1701 nt, Artificial Sequence
  derived and/or modified CDS sequence (opt3) from hemagglutinin__InfluenzaA__ABG26802
augaagaccaucauugcccugagcuacauauccugccucguguucgcucagaaacuucccggcaacgacaauucuacagcaacucuguguuuggggcaccaugccgucccuaacggaacguuaguuaagaccaucacaaaugaucaaauugaggugacuaacgcgaccgaacugguacagucaaguagcacagguagaaucugcgacuccccacacaggauucuagauggcaaaaauuguacccucaucgacgcucugcuuggggauccgcauugcgacggauuucagaacgagaagugggaucuguucguggaacggucuaaagccuuuucgaauuguuaucccuacgacgucccugauuaugcaucauugcgcagccucguggccaguuccggcacucuggaguucauaaacgaagguuuuaauuggacagggguuacccagucuggaggcagcuacgcuugcaagcgaggcuccgugaacucauucuuuagucgucugaauuggcucuaugagagcgagucuaaguacccagcauuaaacgucacgaugcccaauaacgggaaauucgacaagcuguauaucuggggagugcaccauccuuccacugauaaagaacaaaccaaucuuuacguaagagccucagguaggguuacagugagcacuaagcggagucagcagaccgucauuccaaacaucggcccccgcccuugggugagaggguugucuuccaggauuagcaucuacuggacaauagugaaaccaggagacauucugcuaaucaacucgaccggcaaucucauugcuccgcgggguuauuuuaagauccgcacggggaagucuuccaucaugcgaucagaugcccccauuggaacuuguaguagcggcugcauaacaccuaacggcuccaucccaaaugacaaacccuuccagaacgucaauaagauuaccuacggggcguguccuagauauguuaaacaaaacacucugaaacuugcaacaggaaugaggaaugugccagagaaacagacccgggguaucuuuggcgccauagcuggguucauugaaaacggaugggagggcaugguagacgguugguacggguuucgucaccagaauagcgagggcacgggacaggccgcagaucugaagucuacccaagcugccaucgaccagaucaacggcaaauugaaucgccucauugaaaagacaaacgagaaguuccaccagaucgaaaaagaguucucagaaguggaggggaggauucaagaucuggagaaguaugucgaagacacuaaaauagauuuauggaguuacaaugcggagcugcucguggcccuugaaaaccagcauaccaucgacaugacagauuccgagaugaauaagcuguuugaaaagacuagaaagcaguugcgggagaacgcagaggacaugggaaacgguugcuucaagauuuaucacaaaugugauaaugcuugcaucggcagcauccgaaacgggaccuacgaccaugauguuuaccgcgacgaagcccuaaauaacagauuucagauuaagggaguggagcugaaaucuggcuauaaggacuggauacucuggaucucauucgcuauuaguugcuuucugcuuugugucgugcuguuggguuucaucaugugggccugccaaaaagggaauauuagguguaacaucugcauauga

SEQ ID NO: 129015 - RNA, 1701 nt, Artificial Sequence; identical to SEQ ID NO: 128963
  derived and/or modified CDS sequence (opt3) from hemagglutinin__InfluenzaA__ABG26813

SEQ ID NO: 129016 - RNA, 1701 nt, Artificial Sequence
  derived and/or modified CDS sequence (opt3) from hemagglutinin__InfluenzaA__ABG26824
augaaggccaaacugcucgugcuucugugcgcuuugagcgcaaccgacgccgauacaaucuguauuggcuaccacgcgaacaauuccacugacacggucgauaccguuuuagagaagaacgugacaguaacucauucugugaaucugcuagaagacaaccacaaugggaaacucugcaagcugaaaggaauagcuccccuucagcuggguaaguguucaaucgccggcuggauuuuggggaacccugagugcgaaagucucuucagcaagaaauccuggucuuauaucgcagagaccccaaauucggaaaacggaacauguuacccgggcuauuuugccgauuacgaggagcugagagaacaacugucaagcgucaguuccuucgagagguuugaaauuuuccccaaggagucuagcuggccuaaacauaaugugaccaaggguguuacugcuuccugcucacacaaagggaagaguagcuuuuaucggaaccucuuauggcugacagagaagaauggaucuuacccaaaccuuuccaaaucauaugugaauaacaaggaaaaagaggucuuggugcuguggggcguacaucaccccagcaauaucgaagaccagaagaccauauaccgcaaagagaacgcauacguuaguguggucucuucccacuauaaccgacguuucacgccugaaaucgccaagagaccaaaagugaggaaucaggagggccggauuaacuacuauuggacucuacucgagcccggggauaccaucauuuuugaagcuaauggaaaccugaucgccccuugguacgcguucgcacuuagccgcgguuuuggcucggggauaauuacaucuaaugccuccauggacgagugugaugcuaagugccagacuccacaaggagccaucaacucaagucugccguuccagaaugugcaucccgucaccauuggcgaauguccuaaguauguuagaagcacaaaauugaggauggugaccggucuccggaacaucccauccauccagucucgcgggcuguuuggagcaauugcuggcuucauagagggcggguggacgggaaugaucgacgguugguacggcuaucaccaucagaaugaacaagggagcggauacgccgcggaucagaagucaacucagaacgccauuaauggcaucacaaacaaaguaaauaguauaauugagaagaugaacacccaguuuacugcaguggguaaagaguucaauaaguuagaaaagcgaauggagaaccugaacaaaaaggucgacgauggguuccucgacaucuggacauacaaugcugaacuucugguguugcuagagaacgaaagaacccuggacuuucacgauuccaauguuaaaaaccucuaugagaaggugaaaagccaacugaagaauaacgccaaggagaucggcaauggaugcuucgaauuuuaccacaaauguaacaaugagugcauggaaucugucaagaacggcacguaugacuaccccaaauauucagaggagaguaaacuuaauagggaaaagauugauggggugaagcuggagagcaugggaguauaccagaucuuggcuauuuauuccaccguugccucuucgcucgugcuguuagucagccugggugcaauauccuucuggaugugcucaaacggcagucuacaguguaagaucugcauuuga

SEQ ID NO: 129017 - RNA, 1701 nt, Artificial Sequence; identical to SEQ ID NO: 128969
  derived and/or modified CDS sequence (opt3) from hemagglutinin__InfluenzaA__ABG26835

SEQ ID NO: 129018 - RNA, 1701 nt, Artificial Sequence
  derived and/or modified CDS sequence (opt3) from hemagglutinin__InfluenzaA__ABG26890
augaagaccaucauugcccugagcuacauacucugccuuguguucgcucagaaacugcccggcaacgacaauuccacagcaacuuuguguuuagggcaccaugccgucccuaacggaacgcugguuaagaccaucacaaaugaucaaauugaggugacuaacgcgaccgaacuuguacagaauagcccaacagguagaaucugcgacucaccgcacaggauucucgauggcaaaaacuguacccugaucgacgcucuacugggggauccccauugcgacggauuucagaauaaggagugggauuuguucguggaacggaguaaagccuauagcaacuguuacccuuaugacgucccagauuacgcaucccuccgcucucugguggccucgucaggcacucuggaguuuacaaaugaaaacuucaauuggaccgguguugcucaggacgggaagucuuaugcaugcaagcgaggaagugugaacuccuuuuucucucgucucaauugguuacacaaacuggaguacaaguaucccgcccuuaacgucacgaugccuaauaacggcaaauuugauaaguuguacauauggggcgugcaucacccaagcacugacuccgaucaaaccucacuguacguaagagcuagugggaaaguuacagugagcacuaagaggucucagcagaccgucauccccgacauuggauaucggccuugggugcgcggucuauccucaagaaucagcauuuacuggacaaucgugaagccaggcgacauacuccugauuaacaguaccgggaaucuuaucgccccgaggggauauuucaaaauucggaacggcaagucuuccaucaugcgcagcgaugcgcccaucgguaauuguucgucugagugcauuacgccuaacggguccauaccaaaugacaaacccuuucagaacgucaaucgaaucacuuacggagcauguccuagauauguuaagcaaaacacacugaaauuggccaccggcaugaggaaugugccagaaaagcagacucggggcauuuucggggcuaucgccggauuuauagagaacgguugggaaggcaugguagaugggugguacggauuccgucaccaaaauucagagggcacaggucaggcagcugaccucaaaaguacccaggccgcgauugaucagaucaacgggaagcugaaucgcuuaguggagaagacgaacgaaaaauuucaucagaucgagaaggaguucagcgaagucgaaggcaggauucaagaccuggagaaauauguggaggauaccaagaucgaccucugguccuacaaugccgaacuucugguugcauuggagaaccagcacacaauugaucuaacugacucugaaaugaacaaacuguucgagagaacccggaagcagcuccgagaaaaugcugaggauaugggaaacggcugcuuuaagauauaccauaaaugugacaaugccugcaucgggagcauucgcaacggaacauaugaccacgauguguacagagacgaggcucugaauaacagguuccagaucaagggugucgaacuuaaaucaggcuauaaggauuggauccuguggauuaguuuugccauauccugcuucuugcucugugugguacuguuaggguuuaucaugugggcaugccaaaaaggaaauauucgguguaacaucugcauuuga

SEQ ID NO: 129019 - RNA, 1701 nt, Artificial Sequence
  derived and/or modified CDS sequence (opt3) from hemagglutinin__InfluenzaA__ABG26901
augaagaccaucauugcccugagcuacauacucugccuuguguucgcucagaaacugcccggcaacgacaauuccacagcaacuuuguguuuagggcaccaugccgucccuaacggaacgcugguuaagaccaucacaaaugaucaaauugaggugacuaacgcgaccgaacuuguacaaaauucuccaacagguagaaucugcgacucaccgcacaggauucucgauggcaaaaacuguacccugaucgacgcucuacugggggauccccauugcgacggauuucagaauaaggagugggauuuguucguggaacggaguaaagccuauagcaacuguuacccuuaugacgucccagauuacgcaucccuccgcucucugguggccucgucaggcacucuggaguuuacaaaugaaaacuucaauuggaccgguguugcucaggacggaaagagcuauaguugcaagcgaggguccgugaacucuuucuucagccgucucaauugguuacacaaauccgaguacaaguaucccgcacugaacgucacgaugccuaauaacggcaaauuugauaaacuuuacauauggggcgugcaucacccaucaacugacagugaucagaccagcuuguacguaagagccucugggaagguuacaguguccacuaagaggucacagcagaccgucauccccgacauuggauaucggccuugggugcgcggucugagcaguagaaucucuauuuacuggacaaucgugaagccaggcgacauacuacucauuaacuccaccgggaaucugaucgcuccgaggggauauuucaaaauucggaacggcaagagcucgaucaugcgcucugaugcccccaucgguaauuguuccucagagugcauuacgccuaacgggaguauaccaaaugacaaacccuuucagaacgucaaucgaaucacuuacggagcguguccuagauauguuaagcaaaacacacuuaaacuggcaaccggcaugaggaaugugccagaaaagcagacucggggcauuuucggggccaucgcuggauuuauagagaacgguugggaaggcaugguagaugggugguacggauuccgucaccagaauagcgagggcacaggucaggccgcagacuugaaauccacccaagcugccauugaucagaucaacgggaagcucaaucgccugguggagaagacgaacgaaaaauuucaucagaucgagaaggaauuuucugaggucgaaggcaggauucaagacuuagagaaauauguggaggauaccaagaucgaccuguggagcuacaaugcggaacuccuuguugcccuggagaaccagcacacaauugauuugacugacucagaaaugaacaaacuauucgagagaacccggaagcagcugcgagaaaaugcagaggauaugggaaacggcugcuuuaagauauaccauaaaugugacaaugcuugcaucgggaguauucgcaacggaacauaugaccacgauguguacagagacgaggcccucaauaacagguuccagaucaagggugucgaacugaaauccggcuauaaggauuggauccuuuggauuagcuuugcuauaucuugcuuccuguugugugugguacuccugggguuuaucaugugggccugccaaaaaggaaauauucgguguaacaucugcauuuga

SEQ ID NO: 129020 - RNA, 1701 nt, Artificial Sequence
  derived and/or modified CDS sequence (opt3) from hemagglutinin__InfluenzaA__ABG26912
augaagaccaucauugcccugagcuacauacucugccuuguguucgcucagaaacugcccggcaacgacaauuccacagcaacuuuguguuuagggcaccaugccgucccuaacggaacgcugguuaagaccaucacaaaugaucaaauugaggugacuaacgcgaccgaacuuguacagucuucaaguacagguagaaucugcgacagcccacacaggauucucgauggcaaaaauuguacccugaucgacgcucuacugggggauccgcauugcgacggauuucagaacaaggagugggauuuguucguggaacgguccaaagccuauucuaauuguuaccccuaugacgucccugauuacgcaucgcuccgcucacugguggccagcaguggcacucuggaguuuacaaaggaagguuucaacuggaccgggguugcucaggacggaaaguccuaugcaugcaaacgaggcucugugaauagcuuuuucucccgucucaacugguuacacaagcuggaguacaaauauccagcccuuaaugucacgaugcccaacaaugauaaguuugacaaauuguacauauggggcgugcaucacccuucaacugauagugaccaaaccagccuguacguacaggcuucugggagaguuacaguguccacuaagaggucacagcagaccgucaucccaaacauuggaagccggcccugggugcgcgguaucaguucuagaauuuccaucuauuggacaauagugaagccuggcgacauucuacucaucaauagcaccgggaaccugauugccccaaggggauacuucaaaauccggaacggcaagucgucuaucaugcgcuccgaugcgccgauuucaaauuguaacagugagugcauaacgcccaaugguagcaucccuaacgacaaaccauuucaaaaugucaaccgaauuacuuauggggcaugucccagauacguuaagcagaauacacuuaaacuggccaccggaaugaggaacgugccugaaaagcagacucggggcaucuucggcgcuauagccggguuuauugagaauggaugggaagguaugguagauggcugguauggguuccgucaccagaacuccgagggaacaggccaagcagcugacuugaaaucuacccaggccgcgaucgaucagaucaaugguaagcucaaccgccugauugagaagacgaaugaaaaauuucaucaaaucgagaaggaguucagcgaaguggaagggaggauucaggacuuagagaaauacgucgaggauaccaagauagaccuguggucauauaacgccgaacuccuuguggcacuggagaaucagcacacaaucgauuugacugacagugaaaugaacaaacuauucgagagaacccggaagcagcugcgagaaaacgcugaggauaugggcaauggaugcuuuaagauuuaccauaaaugugacaacgccugcaucggcuccauccgcaaugggacauacgaccacgauguuuauagagacgaggcucucaacaauagguuccaaauuaagggaguggaacugaaaagcgguuacaaggauuggauacuuuggaucucuuuugccauuucaugcuuccuguugugugucgugcuccugggcuuuaucaugugggcaugccagaaagggaacauucgguguaauaucugcauauga

SEQ ID NO: 129021 - RNA, 1698 nt, Artificial Sequence
  derived and/or modified CDS sequence (opt3) from hemagglutinin__InfluenzaA__ABG26945
augaaggccaaacugcucgugcuucugugcaccuucacagcuacuuacgcagacacgaucuguauuggcuaucacgccaacaauagcaccgauacagucgacacuguuuuggagaagaacgugaccguaacacauuccgugaauuuacuggaagauucucacaacgggaaacuaugccuccugaagggaauagcgccccuucagcuggguaauuguucagucgcuggcuggaucuuggggaacccugagugcgaacuccugauuaguaaagagagcugguccuacaucguggaaaccccaaauccggagaacggaacuuguuaucccggcuacuuugccgacuaugaggaacugagagagcaacucucuucgguuagcucauucgaaagguuugagauuuucccuaaggguaguuccuggccaaaucauacagugaccggggucucugcaagcugcucccacaacggaaagucaaguuuuuaccggaauuuacuguggcuuacgggcaaaaacggcuuguaucccaaucugagcaugucuuacgugaacaauaaggagaaagaaguacuuguucucuggggagugcaucacccuccaaacaucgggaaccagcgcgcccuguaccacacugagaaugcuuaugucuccguggugucaagccauuacagucgacguuucacccccgaaauagcaaagagaccuaaagucagggaucaggagggucggaucaacuauuacuggacacuucuggaaccaggcgacacuauuaucuuugaggccucugggaauuugauugcuccgugguaugccuucgcgcucucccgcggauuuggcagcgguaucauaaccucgaacgcacccaugggggagugugaugccaagugccagacaccucaaggagcuauuaauucuucccugccauuccagaacguucaccccgugaccaucggcgaauguccuaaguacguaagaucagccaaauuaaggauggugacgggccugcggaauauuccaaguauccagagccgcgggcucuuuggagcaaucgcugguuucauugagggcggguggacuggaauggucgacggcugguaugguuaccaucaccagaacgaacaaggguccggcuacgccgcggaucagaagucuacacagaaugccauaaacggaaucaccaauaaagugaacagcguuauugagaagaugaauacucaguuuacagcagugggcaaagaguucaacaagcuagaacgaagaauggagaaucugaacaaaaaggucgacgauggguucuuggacaucuggaccuauaacgcugaacuacuggugcuccuggagaaugaaaggacgcuugauuuucacgacucaaacguaaagaaucuguacgagaaaguuaagagucaauugaaaaacaaugccaaggaaauaggaaacgguugcuucgaguuuuaucauaaauguaauaacgagugcauggaauccgugaagaauggcaccuacgacuaucccaaguacagcgaggaaucuaaacucaaccgggagaagauugauggggucaaacuggagucaaugggaguguaucagaucuuagcuaucuacaguacagucgccagcucccuggugcuacucguuucucugggcgcaauuucguucuggaugugcagcaaugguucccuucagugucguaucugcauuuga

SEQ ID NO: 129022 - RNA, 1701 nt, Artificial Sequence
  derived and/or modified CDS sequence (opt3) from hemagglutinin__InfluenzaA__ABG26956
augaagaccaucauugcccugagcuacauacucugccuuguguucgcucagaaacugcccggcaacgacaauagaacagcaacuuuguguuuagggcaccaugccgucccuaacggaacgcugguuaagaccaucacaaaugaucaaauugaggugacuaacgcgaccgaacugguacaguccucuucaacagguaggaucugcgacaguccacaccagauucucgauggcgagaauuguacccugaucgacgcccuucugggggauccgcauugcgacggauuucagaacaaagaaugggauuuguucguggagcggagcaaggcuuauuccaauuguuaccccuaugacgucccugauuacgugucucuccgcucgcugguugcaucaagcggcacucuggaauuuaacaaugagaguuucaacuggacagguguggcccaaaaugggaccuccucugcuugcaaacgacguagcgacaaguccuuuuucucaaagcucaacugguuacaccagcugaaauauaaguacccagcacuuaaugucacgaugcccaacaaugagaaauuugauaaguuguauauauggggagugcaucacccuggcacugacagugaucagaucagccuguacgcccaggcuucuggcagaguaaccguuuccacaaaaaggucacaacagacugugauuccaaacaucgggagccggcccuggguccgcggagugaguucuagaauuuccaucuacuggaccauagugaagccuggugacauucuacucaucaacagcacaggcaaucugauugccccaaggggguauuucaagauccggucgggaaaaucuuccaucaugcgcucagacgcgccgauuggcaaguguaacagugaaugcauaacccccaaugguagcaucccuaacgauaaaccauuucagaaugucaaccgaauuacguacggggcaugucccagauauguuaagcagaauacucuuaaacuggccacaggaaugaggaacgugccugagaagcaaacccggggcaucuucggcgcuauagccggguuuauugaaaauggaugggaggguaugauggacggcugguacggguuccgucaccagaacuccgagggaacuggccaggcagcugauuugaaaucuacacaagccgcgaucaaucagaucaacgguaagcucaaucgccugauugaaaagaccaacgagaaauuucaucagaucgaaaaggaguucagcgaaguagaggggaggauucaggacuuagagaaauauguggaagauacgaagauagaccuguggucauacaaugccgagcuccuugucgcacuggaaaaccaacacaccaucgauuugacagacagugagaugaacaaacuauucgaaagaacuaagaagcagcugcgggagaaugcugaggauaugggcaacggaugcuuuaaaauuuaucauaagugugacaaugccugcaucggcuccauccgaaacgggaccuacgaucacgacguguaccgcgacgaagcucucaauaacagauuccagauuaaaggaguugagcuaaagagcgguuauaaagauugggugcuuuggauaucuuuugccaucucaugcuuccuguuguguauuguccuccugggcuuuaucaugugggcaugccagaaggggaauauuagguguaacaucugcauauga

SEQ ID NO: 129023 - RNA, 1698 nt, Artificial Sequence
  derived and/or modified CDS sequence (opt3) from hemagglutinin__InfluenzaA__ABG37120
augaaggccaaacugcucgugcuucugugcaccuucacagcuacuuacgcagacacgaucuguauuggcuaucacgccaacaauagcaccgauacagucgacacuguuuuggagaagaacgugaccguaacacauuccgugaauuuacuggaagauucucacaacgggaaacuaugccuccugaagggaauagcgccccuucagcuggguaauuguucagucgcuggcuggaucuuggggaacccugagugcgaacuccugauuaguaaagagagcugguccuacaucguggaaaccccaaauccggagaacggaacuuguuaucccggcuacuuugccgacuaugaggaacugagagagcaacucucuucgguuagcucauucgaaagguuugagauuuucccuaaggguaguuccuggccaaaucauacagugaccggggucucugcaagcugcucccacaacggagagucaaguuuuuaccggaauuuacuguggcuuacgggcaagaacggcuuguaucccaaucugagcaugucuuacgugaacaauaaagaaaaggaggugcuaguucucuggggagugcaucacccuccaaacaucgggaaccagcgcgcccuguaccacacugaaaaugcuuaugucuccguggugucaagccauuacagucgacguuucacccccgagauagcaaaaagaccuaaggucagggaucaggaaggucggaucaacuauuacuggacacuucuggagccaggcgacacuauuaucuuugaggccaaugggaacuugauugcuccgugguaugccuucgcgcucucucgcggauuuggcuccgguaucauaaccagcaaugcacccaugggggaaugugaugccaaaugccagacaccucaaggagcuauuaacucgucucugccauuccagaauguucaccccgugaccaucggcgaguguccuaaguacguaagauccgccaaguuaaggauggugacgggccugcggaacauuccaucaauccagagucgcgggcucuuuggagcaaucgcugguuucauugaaggcggguggacuggaauggucgacggcugguaugguuaccaucaccagaaugagcaagggagcggcuacgccgcggaucagaaauccacacagaacgccauaaauggaaucaccaacaagguaaauucuguuauugaaaagaugaacacucaguuuacagcagugggcaaagaguucaauaaacuugagcgaagaauggaaaaccugaacaagaaagucgacgauggguucuuggacaucuggaccuauaaugcugagcuacuggugcuccuggaaaacgagaggacgcuugauuuucacgacagcaauguaaagaaccuguacgaaaagguuaaaucacaauugaagaauaacgccaaagagauaggaaaugguugcuucgaguuuuaucauaaguguaacaaugaaugcauggagagugugaaaaacggcaccuacgacuaucccaaguacuccgaagagagcaagcucaaucgggagaaaauugauggggucaagcuggaaucuaugggaguguaucagaucuuagcuaucuacucaacagucgccaguagccuggugcuacucguuucccugggcgcaauuucuuucuggaugugcucgaacgguagccuucagugucguaucugcauuuga

SEQ ID NO: 129024 - RNA, 1701 nt, Artificial Sequence
  derived and/or modified CDS sequence (opt3) from hemagglutinin__InfluenzaA__ABG37131
augaagaccaucauugcccugagcuacauauccugccucguguucgcucagaaacuucccggcaacgacaauucuacagcaacucuguguuuggggcaccaugccgucccuaacggaacguuaguuaagaccaucacaaaugaucaaauugaggugacuaacgcgaccgaacugguacagucaaguagcacagguagaaucugcgacggcccacaccagauucuagaugggaaaaauuguacccucaucgacgcucugcuuggagauccgcauugcgacggcuuucagaacaaggagugggaucuguucguggaaagguccaaagccuauucuaauuguuaccccuaugacgucccugauuacgcaucguugcggucacucguggccagcagugguacucuggaguuuacaaacgaauccuucaauuggaccgggguugcucaaaacggaacgucuuaugcaugcaagcgcggcagcgugaaguccuuuuucucacgacugaauuggcuccacaaauuagaguacaaguauccagcccugaacgucacuaugcccaauaacgacaaauuugauaagcuguacauauggggcgugcaucacccuaguaccgacagcgaucagacaucuuuguacguacaguccucagggcguguuacugugagcaccaaaagaagucagcaaacagucaccccaaauaucggaucuaggcccugggugcgggguauuuccagccgcaucucgauuuauuggacgaucgugaagccuggcgacauacugcuaauuaacucuacugggaaccucaucgcuccaagaggauacuucaagauuaggcggggcaaauccucaaucaugcgcagugacgccccgaucgauaauuguaacagcgagugcauuacacccaaugguuccauaccuaacgacaagccauuucagaaugucaaccgaaucaccuauggggcgugucccagauacguuaaacagaauacucugaaacuugcaacaggaaugaggaacgugccugaaaagcagacccggggcauuuucggcgccaucgcuggguuuauagagaauggaugggaagguaugguagauggcugguauggguuccgucaccaaaacucugagggaacgggccaggccgcagaccuuaagagcacccaggcugccauuaaucaaaucaacgguaaauugaaucgccucaucgagaagacaaacgaaaaguuucaucagauugagaaagaguucucagaaguggaagggagaauccaggaucuggagaaguacgucgaggacacuaaaauugauuuauggaguuauaaugcggaacugcucguggcccuugagaaccagcacaccauagaccugacagauuccgaaaugaacaaguuguucgagaggacucggaaacaacuacgagaaaaugcagaggacaugggcaacggaugcuuuaagaucuaccauaagugugauaaugcuugcauuggcagcauccgcaacgggaccuacgaccacgacguuuauagagaugaggcccugaauaacagguuccagaucaaaggaguggaacucaagucugguuacaaagacuggauucuguggauaucauuugcuaucaguugcuuccuucugugugucguguugcucggcuuuauuaugugggccugccagaaggggaauauccgguguaacauuugcaucuga

SEQ ID NO: 129025 - RNA, 1701 nt, Artificial Sequence; identical to SEQ ID NO: 128831
  derived and/or modified CDS sequence (opt3) from hemagglutinin__InfluenzaA__ABG37142

SEQ ID NO: 129026 - RNA, 1701 nt, Artificial Sequence
  derived and/or modified CDS sequence (opt3) from hemagglutinin__InfluenzaA__ABG37164
augaagaccaucauugcccugagcuacauacucugccuuguguucgcucagaaacugcccggcaacgacaauuccacagcaacuuuguguuuagggcaccaugccgucccuaacggaacgcugguuaagaccaucacaaaugaucaaauugaggugacuaacgcgaccgaacuuguacagucuucaaguacagguagaaucugcgacagcccacacaggauucucgauggcaaaaauuguacccugaucgacgcucuacugggggauccgcauugcgacgauuuucagaacaaggagugggacuuguucguggaacgguccaaagccuauucuaauuguuaccccuaugaugucccugacuacgcaucgcuccgcucacugguggccagcaguggaacucuggaguuuacaaaggaaggcuucaacuggaccgguguugcucaggaugggaaguccuaugcaugcaaacgaggaucugugaauagcuuuuucucccgucucaacugguuacacaagcuggaguacaaauauccagcccuuaaugucacgaugcccaacaaugacaaguuugauaaauuguacauauggggcgugcaucacccuucaacugacagugaccaaaccagccuguacguacaggcuucuggcagaguuacaguguccacuaagaggucacagcagaccgucaucccaaacauugggagccggcccugggugcgcggaaucaguucuagaauuuccaucuauuggacaauagugaagccuggugauauucuacucaucaauagcaccggcaaccugauugccccaaggggguacuucaaaauccggaacggaaagucgucuaucaugcgcuccgacgcgccgauuggcaauuguaacucagagugcauaacgcccaaugguaguaucccuaacgauaaaccauuucaaaaugucaaccgaauuacuuauggggcaugucccagauacguuaagcagaauacacuuaaacuggccaccggaaugaggaacgugccugaaaagcagacucggggcaucuucggcgcuauagccggguuuauugagaauggaugggaagguaugguagacggcugguauggguuccgucaccagaacagcgagggaacaggccaagcagcugauuugaaauccacccaggccgcgaucgaccagaucaaugguaagcucaaccgccugauugagaagacgaaugaaaaauuucaucaaaucgagaaggaguucucugaaguggaagggaggauucaggauuuagagaaauacgucgaggacaccaagauagaucuguggagcuauaacgccgaacuccuuguggcacuggagaaucagcacacaaucgacuugacugauucagaaaugaacaaacuauucgagagaacccggaagcagcugcgagaaaacgcugaggacaugggcaauggaugcuuuaagauuuaccauaaaugugacaacgccugcaucggcaguauccgcaaugggacauacgaucacgacguuuauagagaugaggcucucaacaauagguuccaaauuaagggaguggaacugaaauccgguuacaaggacuggauacuuuggaucagcuuugccauuucuugcuuccuguugugugucgugcuccugggcuuuaucaugugggcaugccagaaagggaacauucgguguaauaucugcauauga

SEQ ID NO: 129027 - RNA, 1701 nt, Artificial Sequence
  derived and/or modified CDS sequence (opt3) from hemagglutinin__InfluenzaA__ABG37175
augaagaccaucauugcccugagcuacauacucugccagguguucgcuaaaaagcugcccggcaacgacaauuccacagcaacucuuuguuuggggcaccaugccgucccuaacggaacguuaguuaaaaccaucacaaaugaucaaauugaggugacuaacgcgaccgaacugguacagucuucaaguacagguagaaucugcgacagcccacacaggauucuagauggcaagaauuguacccucaucgacgcucugcuuggggauccgcauugcgacggauuucagaacaaagagugggaucuguucguggaacgguccaaggccuauucuaauuguuaccccuaugacgucccugauuacgcaucguugcgcucacucguggccagcaguggcacucuggaguuuacaaacgaagguuucaauuggaccgggguugcucaggacggaaaguccuauucuugcaaacgaggcagcgugaacuccuuuuucucacgucugaauuggcuccacaaguuagaguacaaauauccagcacugaacgucacgaugcccaauaacgauaaguuugacaaacuuuacauauggggcgugcaucacccuaguacugauagcgaccaaaccucuuuguacguacaggccuccgggagaguuacagugucaacuaagaggagccagcagaccgucaucccaaauauuggaagucggcccugggugcgcgguaucucuuccagaauuagcaucuauuggacaauagugaagccuggcgacauucugcuaaucaacucgaccgggaaccucauugcuccaaggggauacuucaaaauccggaauggcaagucuuccaucaugcgcucagaugccccgauugacaacuguaauagugagugcauaacgcccaacgguagcaucccuaaugauaaaccauuucaaaacgucaaucgaauuacuuauggggcgugucccagauacguuaagcagaacacacugaaacuugcaaccggaaugaggaaugugccugaaaagcagacucggggcaucuucggcgccauagcuggguuuauugagaacggaugggaagguaugguagacggcugguauggguuccgucaccaaaauuccgagggaacaggccaggccgcagaucugaaaucuacccaggcugccaucgaccagaucaacgguaaguugaaucgccucauugagaagacgaacgaaaaauuucaucaaaucgagaaggaguucagcgaaguggaagggaggauucaggaucuggagaaauacgucgaggacaccaagauagauuuauggucauauaaugcggaacugcucguggcccuugagaaccagcacacaaucgaccugacugauagugaaaugaacaaauuguucgagagaacccggaagcagcuacgagaaaaugcagaggacaugggcaacggaugcuuuaagauuuaccauaaaugugacaaugcuugcaucggcuccauccgcaacgggacauacgaucacgacguuuauagagaugaggcccugaauaacagguuccaaauuaagggaguggaacucaaaagcgguuacaaggacuggauacuguggaucucuuuugcuauuucaugcuuccuucugugugucguguugcucggcuuuaucaugugggccugccagaaagggaauauucgguguaacaucugcauauga

SEQ ID NO: 129028 - RNA, 1701 nt, Artificial Sequence
  derived and/or modified CDS sequence (opt3) from hemagglutinin__InfluenzaA__ABG37186
augaagaccaucauugcccugagcuacauacucugccagguguucgcucaaaaacuucccggcaacgacaauuccacagcaacucuguguuuggggcaccaugccgucccuaacggaacguuaguuaagaccaucacaaaugaucagauugaggugacuaacgcgaccgaacugguacagucuucaaguacagguagaaucugcgacagcccacacaggauucuagauggcaaaaauuguacccucaucgacgcucugcuuggggauccgcauugcgacggauuucagaacaaggagugggaucuguucguggaacgguccaaagccuauucuaauuguuaccccuaugacgucccugauuacgcaucguugcgcucacucguggccagcaguggcacucuggaguuuacaaacgaagguuucaauuggaccgggguugcucaagacggaaaguccuaugcaugcaagcgaggcucugugaacagcuuuuucucccgucugaauuggcuccacaaauuagaguacaaguauccagcccugaacgucacgaugcccaauaacgauaaauuugacaaacuuuacauauggggcgugcaucacccuucaacugauagugaccagaccagcuuguacguacaggcuucugggagaguuacaguguccacuaagaggucacagcaaaccgucaucccaaauauuggaagccggcccugggugcgcgguaucaguucuagaauuuccaucuauuggacaauagugaagccuggcgacauucugcuaaucagcucgaccgggaaccucauugccccaaggggauacuucaagauccggaacggcaaaucuuccaucaugcgcucagaugcgccgauugacaauuguaacagugagugcauaacgcccaaugguagcaucccuaacgauaagccauuucagaaugucaaccgaguuacuuauggggcaugucccagauacgugaaacagaauacacugaaacuugccaccggaaugaggaacguaccugaaaagcagacucggggcauuuucggcgcuaucgccggguuuauagagaauggaugggaagguaugguggacggcugguauggguuccgucaccaaaacuccgagggaacaggccaggcagcugaucugaagucuacccaggccgcgauugaccaaaucaaugguaaauugaaccgccucaucgagaagacgaaugaaaaguuucaucagauugagaaagaguucagcgaagucgaagggagaauccaggaucuggagaaguacguggaggacaccaaaauugauuuauggucauauaacgccgaacugcucguugcacuugagaaucagcacacaauagaccugacugauagugaaaugaacaaguuguucgagaggacccggaaacaacuacgagaaaacgcugaggacaugggcaauggaugcuuuaagaucuaccauaagugugacaacgccugcauuggcuccauccgcaaugggacauacgaucacgacguguauaaagaugaggcucugaacaauagauuccagaucaagggagucgugcucaaaagcgguuacaaggacuggauucuguggauaucuuuugccaucucaugcuuccuucuguguguaguuuugcucggcuuuauuaugugggcaugccagaaagggaacaucagguguaauauuugcaucuga

SEQ ID NO: 129029 - RNA, 1701 nt, Artificial Sequence
  derived and/or modified CDS sequence (opt3) from hemagglutinin__InfluenzaA__ABG37197
augaagaccaucauugcccugagcuacauacucugccagguguucgcucaaaaacuucccggcaacgacaauuccacagcaacucuguguuuggggcaccaugccgucccuaacggaacguuaguuaagaccaucacaaaugaucagauugaggugacuaacgcgaccgaacugguacagucuucaaguacagguagaaucugcgacagcccacacaggauucuagauggcaaaaauuguacccucaucgacgcucugcuuggggauccgcauugcgacggauuucagaacaaggagugggaucuguucguggaacgguccaaagccuauucuaauuguuaccccuaugacgucccugauuacgcaucguugcgcucacucguggccagcaguggcacucuggaguuuacaaacgaagguuucaauuggaacgggguugcucaagacggaaaguccuaugcaugcaagcgaggcucugugaaauccuuuuucagccgucugaauuggcuccacaaguuagaguacaaauauccagcccugaacgucaccaugcccaauaacgauaaguuugacaaacuuuacauauggggcgugcaucacccuucaacggauagugaccagacuagcuuguacguacaggcuucugggagaguuaccguguccacaaagaggucacagcaaacugucaucccaaauauuggaagccggcccugggugcgcgguaucaguucuagaauuuccaucuauuggaccauagugaagccuggcgacauucugcuaaucaacagcacagggaaccucauugccccaaggggauacuucaaaauccggaauggcaagucgucuaucaugcgcuccgaugcgccgauugacaacuguaauucagagugcauaacccccaacgguaguaucccuaaugauaaaccauuucagaacgucaaucgaauuacguauggggcaugucccagauacguuaagcagaacacucugaaacuugccacaggaaugaggaaugugccugaaaagcagacccggggcaucuucggcgcuauagccggguuuauugagaacggaugggaagguaugguagacggcugguauggguuccgucaccaaaauagcgagggaacuggccaggcagcugaucugaaauccacacaggccgcgaucgaccaaaucaacgguaaguugaaucgccucauugagaagaccaacgaaaaauuucaucagaucgagaaggaguucucugaaguggaagggaggauucaggaucuggagaaauacgucgaggacacgaagauagauuuauggagcuauaaugccgaacugcucguggcacuugagaaccagcacaccaucgaccugacagauucagaaaugaacaaauuguucgagagaacucggaagcaacuacgagaaaaugcugaggacaugggcaacggaugcuuuaagauuuaccauaaaugugacaaugccugcaucggcaguauccgcaacgggaccuacgaucacgacguuuauagagaugaggcucugaauaacagguuccagauuaagggaguggaacucaaauccgguuacaaggacuggauacuguggaucagcuuugccauuucuugcuuccuucugugugucguguugcucggcuuuaucaugugggcaugccagaaagggaauauucgguguaacaucugcauauga

SEQ ID NO: 129030 - RNA, 1701 nt, Artificial Sequence
  derived and/or modified CDS sequence (opt3) from hemagglutinin__InfluenzaA__ABG37208
augaagaccaucauugcccugagcuacauauccugccucguguucgcucagaaacuucccggcaacgacaauucuacagcaacucuguguuuggggcaccaugccgucccuaacggaacguuaguuaagaccaucacaaaugaucaaauugaggugacuaacgcgaccgaacugguacagucaaguagcacagguagaaucugcgacuccccacacaggauucuagauggcaaaaauuguacccucaucgacgcucugcuuggggauccgcauugcgacggauuucagaacgagaagugggaucuguucguggaacggucuaaagccuuuucgaauuguuaucccuacgacgucccugauuaugcaucauugcgcagccucguggccaguuccggcacucuggaguucauaaacgaagguuuuaauuggacagggguuacccagucuggaggcagcuacgcuugcaagcgaggcuccgugaacucauucuuuagucgucugaauuggcucuauaagagcgagucuaaauacccagcauuaaacgucacgaugcccaauaacgggaaguucgacaaacuguauaucuggggagugcaccauccuuccacugauaaggagcaaaccaaucuuuacguaagagccucagguaggguuacagugagcacuaaacggagucagcagaccgucauuccaaacaucggcccccgcccuugggugagaggguugucuuccaggauuagcaucuacuggacaauagugaagccaggagacauucugcuaaucaacucgaccggcaaucucauugcuccgcgggguuauuuuaagauccgcacggggaaaucuuccaucaugcgaucagaugcccccauuggaacuuguaguagcggcugcauaacaccuaacggcuccaucccaaaugacaagcccuuccagaacgucaauaaaauuaccuacggggcguguccuagauauguuaagcaaaacacucugaaacuugcaacaggaaugaggaaugugccagaaaagcagacccgggguaucuuuggcgccauagcuggguucauugagaacggaugggaaggcaugguagacgguugguacggguuucgucaccaaaauucugagggcacgggacaggccgcagaucugaaaagcacccaggcugccaucgaccagaucaacggcaaguugaaucgccucauugagaagacaaacgaaaaauuccaccagaucgagaaggaguucucagaaguggaagggaggauucaagaucuggagaaauaugucgaggacacuaagauagauuuauggaguuacaaugcggaacugcucguggcccuugagaaccagcauaccaucgacaugacagauuccgaaaugaauaaacuguuugagaagacuagaaagcaguugcgggaaaacgcagaggacaugggaaacgguugcuucaaaauuuaucacaagugugauaaugcuugcaucggcagcauccgaaacgggaccuacgaccaugauguuuaccgcgacgaggcccuaaauaacagauuucagauuaaaggaguggaacugaagucuggcuauaaagacuggauacucuggaucucauucgcuauuaguugcuuucugcuuugugucgugcuguuggguuucaucaugugggccugccaaaaggggaauauuagguguaacaucugcauauga

SEQ ID NO: 129031 - RNA, 1701 nt, Artificial Sequence
  derived and/or modified CDS sequence (opt3) from hemagglutinin__InfluenzaA__ABG37230
augaagaccaucauugcccugagcuacauacucugccuuguguucgcucagaaacugcccggcaacgacaauuccacagcaacuuuguguuuagggcaccaugccgucccuaacggaacgcugguuaagaccaucacaaaugaucaaauugaggugacuaacgcgaccgagcuaguacagucuucaaguacagguagaaucugcgacagcccacacaggauucucgauggcaaaaauuguacccugaucgacgcucugcugggggauccgcauugcgacggauuucagaacaaggaaugggauuuguucguggaacgguccaaagccuauucuaauuguuaccccuaugacgucccugauuacgcaucgcuccgcucacugguggccagcaguggcacucuggaguuuauaaacgaagacuucaauuggacagguguugcucaggaugggaaguccuaugcaugcaagcgaggaucugugaacagcuuuuucucccgucucaauugguuacaccaaucaaaauacaaguauccagagcugaacgucaccaugcccaauaacggcaaauuugacaaacuuuacaucuggggcgugcaucacccuaguacggauagcgaccagacuucuuuguacgccagagcuuccgggaggguaaccguuucaacaaagcggagccagcagacugugauuccaaauaucggauuccgccccugggucagaggucugaguucuaggauuuccaucuauuggaccauagugaagccuggcgacauucuacucaucaacagcacagggaaccugauugccccacggggauacuuuaagauccgcaauggcaaaucgucuaucaugcgauccgaugcgccgauugguaacuguucaagugagugcauaacccccaaugggagcaucccuaacgacaagccauuccaaaaugugaacagaauuacguauggagcaugucccagguacgucaaacagaauacucuuaagcuggccacaggcaugcggaacguuccugaaaaacagacccguggcaucuuuggggcuauagccggauucauugagaaugguugggaaggcaugguggaugggugguauggauuucgccaccagaacuccgagggcacuggucaagcagcugacuugaagucuacacaggccgcgaucgaucagaucaaugggaaacucaacagacugauugagaagaccaaugaaaaguuccaucaaaucgagaaagaguucagcgaaguagaaggcaggauucaggacuuagagaaguacguggaggauacgaaaauagaccuguggucauauaacgccggacuccuugucgcacuggaaaaucagcacaccaucgauuugacagacagugagaugaacaagcuauuugaacggacucgaaaacagcugcgcgagaacgcugaagauaugggcaaugggugcuucaagauuuaccauaagugugacaacgccugcaucggauccaucagaaaugguaccuacgaccacgauguguauagggacgaggcucucaacaaucgguuucaaauuaaaggcguugagcuuaagagcggguacaaagauuggauacuuuggaucucuuucgccauuucaugcuuucuguugugugugguccuccugggauucaucaugugggcaugccagaagggcaacauucgcuguaauaucugcauauga

SEQ ID NO: 129032 - RNA, 1701 nt, Artificial Sequence
  derived and/or modified CDS sequence (opt3) from hemagglutinin__InfluenzaA__ABG37241
augaagaccaucauugcccugagcuacauacucugccuuguguucgcucagaaacugcccggcaacgacaauuccacagcaacuuuguguuuagggcaccaugccgucccuaacggaacgcugguuaagaccaucacaaaugaucaaauugaggugacuaacgcgaccgaacuuguacagucuucaccaacagguagaaucugcgacaguccgcacaggauucucgauggcaaaaauuguacccugaucgacgcucuacugggggauccccauugcgacggauuucagaacaaggagugggauuuguucguggaacggagcaaagccuauuccaauuguuacccuuaugacgucccagauuacgcaucucuccgcucgcugguggccucaagcggcacucuggaguuuacaaacgaaaauuucaacuggaccgguguugcucaggacgggaagaguuaugcaugcaagcgaggauccgugaauagcuuuuucucucgucucaacugguuacacaaacuggaguacaaguaucccgcccuuaaugucacgaugccuaacaauggcaaauuugauaaguuguacauauggggcgugcaucacccauccacugacucagaucaaaccagucuguacguaagagcuagcgggaaaguuacagugucuacuaagaggucccagcagaccgucauccccgacauuggauaucggccuugggugcgcggucuaucaagcagaaucaguauuuacuggacaaucgugaagccaggcgacauacuccugauuaacucuaccgggaaccuuaucgccccgaggggauauuucaaaauucggaauggcaaguccagcaucaugcgcucggaugcgcccaucgguaacuguucuuccgagugcauuacgccuaaugggucaauaccaaacgacaaacccuuucagaaugucaaccgaaucacuuacggagcauguccuagauauguuaagcaaaauacacugaaauuggccaccggcaugaggaacgugccagaaaagcagacucggggcauuuucggggcuaucgccggauuuauagagaaugguugggaaggcaugguagaugggugguacggauuccgucaccagaacagugagggcacaggucaggcagcugaccucaaaagcacccaagccgcgauugaucagaucaaugggaagcugaaccgcuuaguggagaagacgaaugaaaaauuucaucagaucgagaaggaguucuccgaagucgaaggcaggauucaagaccuggagaaauauguggaggauaccaagaucgaccucuggucuuacaacgccgaacuucugguugcauuggagaaucagcacacaauugaucuaacugacagcgaaaugaacaaacuguucgagagaacccggaagcagcuccgagaaaacgcugaggauaugggaaauggcugcuuuaagauauaccauaaaugugacaacgccugcaucgggucaauucgcaauggaacauaugaccacgauguguacagagacgaggcucugaacaauagguuccagaucaagggugucgaacuuaaaaguggcuauaaggauuggauccuguggauuuccuuugccauaagcugcuucuugcucugugugguacuguuaggguuuaucaugugggcaugccaaaaaggaaacauucgguguaauaucugcauuuga

SEQ ID NO: 129033 - RNA, 1701 nt, Artificial Sequence
  derived and/or modified CDS sequence (opt3) from hemagglutinin__InfluenzaA__ABG37252
augaagaccaucauugcccugagcuacauacucugccuuguguucgcucagaaacugacaggcaacgacaauuccacugcaacguuguguuuagggcaccaugccguccccaacggaacccugguuaagacaaucacuaaugaucaaauugaggugaccaacgcgacagaacuuguacagucuucaccuaccgguagaaucugcgacaguccacacaggauucucgauggcaaaaauuguacucugaucgacgcucuacugggggauccgcauugcgacggauuucagaacaaggagugggauuuguucguggaacggagcaaagccuauuccaauuguuaccccuaugacgucccugauuacgcaucucuccgcucgcugguggccucaagcggcacacuggaguuuaccaacgaaaauuucaacuggacggguguugcucaggacgggaagaguuaugcaugcaagcgaggauccgugaauagcuuuuucucucgucucaacugguuacacaaacuggaguacaaguauccagcccuuaaugucacuaugcccaacaauggcaaauuugauaaguuguacauauggggcgugcaucacccuuccaccgacucagaucaaacaagucuguacguaagagcuagcgggaaaguuacugugucuaccaagaggucccagcagacagucaucccagacauuggauaucggcccugggugcgcggucuaucaagcagaaucaguauuuacuggaccaucgugaagccuggcgacauacuccugauuaacucuacggggaaccuuaucgccccaaggggauauuucaaaauucggaauggcaaguccagcaucaugcgcucggaugcgccgaucgguaacuguucuuccgagugcauuacucccaaugggucaauaccuaacgacaaaccauuucagaaugucaaccgaaucacauacggagcaugucccagauauguuaagcaaaauacccugaaauuggccacuggcaugaggaacgugccugaaaagcagacacggggcauuuucggggcuaucgccggauuuauagagaaugguugggaaggcaugguagaugggugguacggauuccgucaccagaacagugagggcaccggucaggcagcugaccucaaaagcacgcaagccgcgauugaucagaucaaugggaagcugaaccgcuuaguggagaagaccaaugaaaaauuucaucagaucgagaaggaguucuccgaagucgaaggcaggauucaagaccuggagaaauauguggaggauacaaagaucgaccucuggucuuacaacgccgaacuucugguugcauuggagaaucagcacacuauugaucuaaccgacagcgaaaugaacaaacuguucgagagaacacggaagcagcuccgagaaaacgcugaggauaugggaaauggcugcuuuaagauauaccauaaaugugacaacgccugcaucgggucaauucgcaauggaacuuaugaccacgauguguacagagacgaggcucugaacaauagguuccagaucaagggugucgaacuuaaaaguggcuauaaggauuggauccuguggauuuccuuugccauaagcugcuucuugcucugugugguacuguuaggguuuaucaugugggcaugccaaaaaggaaacauucgguguaauaucugcauuuga

SEQ ID NO: 129034 - RNA, 1701 nt, Artificial Sequence
  derived and/or modified CDS sequence (opt3) from hemagglutinin__InfluenzaA__ABG37263
augaagaccaucauugcccugagcuacauacucugccuuguguucgcucagaaacugcccggcaacgacaauuccacagcaacuuuguguuuagggcaccaugccgucccuaacggaacgcugguuaagaccaucacaaaugaucaaauugaggugacuaacgcgaccgaacuuguacagucuucaaguacagguagaaucugcgacagcccacacaggauucucgauggcaaaaauuguacccugaucgacgcucuacugggggauccgcauugcgacggauuucagaacaaggagugggauuuguucguggaacgguccaaagccuauucuaauuguuaccccuaugacgucccugauuacgcaucgcuccgcucacugguggccagcaguggcacucuggaguuuacaaaggaagguuucaacuggaccgggguugcucaggacggaaaguccuaugcaugcaaacgaggcucugugaauagcuuuuucucccgucucaacugguuacacaagcuggaguacaaauauccagcccuuaaugucacgaugcccaacaaugauaaguuugacaaauuguacauauggggcgugcaucacccuucaacugauagugaccaaaccagccuguacguacaggcuucugggagaguuacaguguccacuaagaggucacagcagaccgucaucccaaacauuggaagccggcccugggugcgcgguaucaguucuagaauuuccaucuauuggacaauagugaagccuggcgacauucuacucaucaauagcaccgggaaccugauugccccaaggggauacuucaaaauccggaacggcaagucgucuaucaugcgcuccgaugcgccgauugguaauuguaacucagagugcauaacgcccaaugggaguaucccuaacgacaaaccauuucaaaaugucaaccgaauuacuuauggagcaugucccagauacguuaagcagaauacacuuaaacuggccaccggcaugaggaacgugccugaaaagcagacucggggcaucuucggggcuauagccggauuuauugagaaugguugggaaggcaugguagaugggugguauggauuccgucaccagaacagcgagggcacaggucaagcagcugacuugaaauccacccaggccgcgaucgaucagaucaaugggaagcucaaccgccugauugagaagacgaaugaaaaauuucaucaaaucgagaaggaguucucugaaguggaaggcaggauucaggacuuagagaaauacgucgaggauaccaagauagaccuguggagcuauaacgccgaacuccuuguggcacuggagaaucagcacacaaucgauuugacugacucagaaaugaacaaacuauucgagagaacccggaagcagcugcgagaaaacgcugaggauaugggaaauggcugcuuuaagauuuaccauaaaugugacaacacaugcaucgggaguauccgcaauggaacuuacgaccacgauguuuauagagacgaggcccucaacaauagguuccaaauuaaggguguggaacugaaauccggcuacaaggauuggauacuuuggaucagcuuugcuauuucuugcuuccuguugugugucgugcuccugggguuuaucaugugggccugccagaaaggaaacauucgguguaauaucugcauauga

SEQ ID NO: 129035 - RNA, 1701 nt, Artificial Sequence
  derived and/or modified CDS sequence (opt3) from hemagglutinin__InfluenzaA__ABG37274
augaagaccaucauugcccugagcuacauacucugccuuguguucgcucagaaacugcccggcaacgacaauuccacagcaacuuuguguuuagggcaccaugccgucccuaacggaacgcugguuaagaccaucacaaaugaucaaauugaggugacuaacgcgaccgaacuuguacagucuucaccaacagguagaaucugcgacaguccgcacaggauucucgauggcaaaaauuguacccugaucgacgcucuacugggggauccccauugcgacggauuucagaacaaggagugggauuuguucguggaacggagcaaagccuauuccaauuguuacccuuaugacgucccagauuacgcaucucuccgcucgcugguggccucaagcggcacucuggaguuuacaaacgaaaauuucaacuggaccgguguugcucaggacgggaagaguuaugcaugcaagcgaggauccgugaauagcuuuuucagccgucucaacugguuacacaaacuggaguacaaguaucccgcccuuaaugucacgaugccuaacaauggcaaauuugauaaguuguacauauggggcgugcaucacccauccacugacucagaucaaaucagucuguacguaagagcuagcgggaaaguuaccgugucuacaaagaggucccagcagacugucauucccgacaucggauaucggccuugggugcgcggucuaucaagcagaauuaguaucuacuggaccauagugaagccaggcgacauucuccugaucucuuccacagggaaccuuauugccccgaggggauauuucaaaauccggaacggcaagagcucgaucaugcgcucugaugcgcccauugguaauuguuccucagagugcauaaccccuaacgggaguaucccaaaugacaaacccuuucagaacgucaaucgaauuacguacggagcauguccuagauauguuaagcaaaacacucugaaauuggccacaggcaugaggaaugugccagaaaagcagacccggggcaucuucggggcuauagccggauuuauugagaacgguugggaaggcaugguagaugggugguacggauuccgucaccagaauagcgagggcacuggucaggcagcugaccucaaauccacacaagccgcgaucgaucagaucaacgggaagcugaaucgcuuaguggagaagaccaacgaaaaauuucaucagauugagaaggaguucucugaagucgaaggcagaauccaagaccuggagaaauauguggaggauacgaagauugaccucuggagcuacaaugccgaacuucugguugcauuggagaaccagcacaccauagaucuaacagacucagaaaugaauaaacuguucgagaggacucggaagcagcuccgagaaaacgcugaggauaugggaaacggcugcuuuaagaucuaccauaaaugugacaaugccugcauugggaguauccgcaacggaaccuaugaccacgauguguacagagacgaggcucugaauaacagguuccagaucaagggugucgaacuuaaauccggcuauaaggauuggauucuguggauaucuuuugccaucucuugcuucuugcucugugugguacuguuaggguuuauuaugugggcaugccaaaaaggaaauauccgguguaacauuugcaucuga

SEQ ID NO: 129036 - RNA, 1701 nt, Artificial Sequence
  derived and/or modified CDS sequence (opt3) from hemagglutinin__InfluenzaA__ABG37285
augaagaccaucauugcccugagcuacauacucugccuuguguucgcucagaaacugcccggcaacgacaauuccacagcaacuuuguguuuagggcaccaugccgucccuaacggaacgcugguuaagaccaucacaaaugaucaaauugaggugacuaacgcgaccgaacuuguacagucuucaccaacagguagaaucugcgacaguccgcacaggauucucgauggcaaaaauuguacccugaucgacgcucuacugggggauccccauugcgacggauuucagaacaaggagugggauuuguucguggaacggagcaaagccuauuccaauuguuacccuuaugacgucccagauuacgcaucucuccgcucgcugguggccucaagcggcacucuggaguuuacaaacgaaaauuucaacuggaccgguguugcucaggacgggaagaguuaugcaugcaagcgaggauccgugaauagcuuuuucucucgucucaacugguuacacaaacuggauuacaaguaucccgcccuuaaugucacgaugccuaacaauggcaaauuugacaaguuguacauauggggcgugcaucacccauccacugauucagaccaaaccagucuguacguaagagcuagcgggaaaguuacagugucuacuaagaggucccagcagaccgucauccccgacauuggauaucggccuugggugcgcggucuaucaagcagaaucaguauuuacuggacaaucgugaagccaggcgauauacuccugauuaacucuaccgggaaccuuaucgccccgaggggauauuucaaaauucggaauggcaaguccagcaucaugcgcucggacgcgcccaucgguaacuguucuuccgagugcauuacgccuaaugggucaauaccaaacgauaaacccuuucagaaugucaaccgaaucacuuacggagcauguccuagauauguuaagcaaaauacacugaaauuggccaccggcaugaggaacgugccagagaagcagacucggggcauuuucggggcuaucgccggauuuauagaaaaugguugggagggcaugguagacgggugguacggauuccgucaccagaacagugaaggcacaggucaggcagcugaucucaaaagcacccaagccgcgauugaccagaucaaugggaagcugaaccgcuuaguggagaagacgaaugagaaauuucaucagaucgaaaaggaguucuccgaagucgagggcaggauucaagaucuggaaaaauauguggaggacaccaagaucgaucucuggucuuacaacgccgagcuucugguugcauuggaaaaucagcacacaauugaccuaacugauagcgagaugaacaaacuguucgaaagaacccggaagcagcuccgagagaacgcugaagacaugggaaauggcugcuuuaagauauaccauaaaugugacaacgccugcaucgggucaauucgcaauggaacauaugaucacgacguguacagagaugaggcucugaacaauagguuccagaucaagggugucgagcuuaaaaguggcuauaaggacuggauccuguggauuuccuuugccauaagcugcuucuugcucuguuuugugcuguuaggguucaucaugugggcaugccaaaaaggaaacauucgguguaauaucugcauuuga

SEQ ID NO: 129037 - RNA, 1701 nt, Artificial Sequence
  derived and/or modified CDS sequence (opt3) from hemagglutinin__InfluenzaA__ABG37296
augaagaccaucauugcccugagcuacauacucugccuuguguucgcucagaaacugcccggcaacgacaauuccacagcaacuuuguguuuagggcaccaugccgucccuaacggaacgcugguuaagaccaucacaaaugaucaaauugaggugacuaacgcgaccgaacuuguacagucuucaaguacagguagaaucugcgacagcccacacaggauucucgauggcaaaaauuguacccugaucgacgcucuacugggggauccgcauugcgacggauuucagaacaaggagugggauuuguucguggaacgguccaaagccuauucuaauuguuaccccuaugacgucccugauuacgcaucgcuccgcucacugguggccagcaguggcacucuggaguuuacaaaggaagguuucaacuggaccgggguugcucaggacggaaaguccuaugcaugcaaacgaggcucugugaauagcuuuuucucccgucucaacugguuacacaagcuggaguacaaauauccagcccuuaaugucacgaugcccaacaaugauaaguuugacaaauuguacauauggggcgugcaucacccuucaacugauagugaccaaaccagccuguacguacaggcuucugggagaguuacaguguccacuaagaggucacagcagaccgucaucccaaacauuggaagccggcccugggugcgcgguaucaguucuagaauuuccaucuauuggacaauagugaagccuggcgacauucuacucaucaauagcaccgggaaccugauugccccaaggggauacuucaaaauccggaacggcaagucgucuaucaugcgcuccgaugcgccgauugguaauuguaacucagagugcauaacgcccaaugggaguaucccuaacgacaaaccauuucaaaaugucaaccgaauuacuuauggagcaugucccagauacguuaagcagaauacacuuaaacuggccaccggcaugaggaacgugccugaaaagcagacucggggcaucuucggggcuauagccggauuuauugagaaugguugggaaggcaugguagaugggugguauggauuccgucaccagaacagcgagggcacaggucaagcagcugacuugaaauccacccaggccgcgaucgaucagaucaaugggaagcucaaccgccugauugagaagacgaaugaaaaauuucaucaaaucgagaaggaguucucugaaguggaaggcaggauucaggacuuagagaaauacgucgaggauaccaagauagaccuguggagcuauaacgccgaacuccuuguggcacuggagaaucagcacacaaucgauuugacugacucagaaaugaacaaacuauucgagagaacccggaagcagcugcgagaaaacgcugaggauaugggaaauggcugcuuuaagauuuaccauaaaugugacaacgccugcaucgggaguauccgcaauggaacauacgaccacgauguuuauagagacgaggcucucaacaauagguuccaaauuaaggguguggaacugaaauccggcuacaaggauuggauacuuuggaucagcuuugccauuucuugcuuccuguugugugucgugcuccugggguuuaucaugugggcaugccagaaaggaaacauucgguguaauaucugcauauga

SEQ ID NO: 129038 - RNA, 1701 nt, Artificial Sequence; identical to SEQ ID NO: 129032
  derived and/or modified CDS sequence (opt3) from hemagglutinin__InfluenzaA__ABG37307

SEQ ID NO: 129039 - RNA, 1701 nt, Artificial Sequence; identical to SEQ ID NO: 129037
  derived and/or modified CDS sequence (opt3) from hemagglutinin__InfluenzaA__ABG37318

SEQ ID NO: 129040 - RNA, 1701 nt, Artificial Sequence
  derived and/or modified CDS sequence (opt3) from hemagglutinin__InfluenzaA__ABG37329
augaagaccaucauugcccugagcuacauacucugccuuguguucgcucagaaacugcccgagaacgacaauuccacagcaacuuuguguuuaggccaccaugccgucccuaacgggacgcugguuaagaccaucacaaaugaucaaauugaagugacuaacgcgaccgagcuaguacagucuucaccaacaggaagaaucugcgacaguccgcacaggauucucgaugguaaaaauuguacccugaucgacgcucugcuuggcgauccccauugcgacggguuucagaacaaggaaugggauuuguucguggagcggagcaaagccuauuccaauuguuacccuuaugacgucccagauuacgcaucucuccgcucgcugguggccucaagcggaacucuggaauuuacaaacgagaauuucaacuggaccggcguugcucaggacgguaagaguuaugcaugcaagcgaggguccgugaauagcuuuuucucucgucucaacugguuacacaaacuggaguacaaguaucccgcccuuaaugucacgaugccuaacaauggaaaauuugauaaguuguacauauggggcgugcaucacccauccacugacucagaucaaaccagucuguacguaagagcuagcggcaaaguuacagugucuacuaagaggucccagcagaccgucauccccgacauuggguaucggccuugggugcgcggacuaucaagcagaaucaguauuuacuggacaaucgugaagccaggugacauacuccugauuaacucuaccggcaaccuuaucgccccgaggggguauuucaaaauucggaauggaaaguccagcaucaugcgcucggaugcgcccaucggcaacuguucuuccgaaugcauuacgccuaaugguucaauaccaaacgacaaacccuuucagaaugucaaccgaaucacuuacggggcauguccuagauauguuaagcaaaauacacugaaauuggccaccggaaugaggaacgugccagagaagcagacucggggcauuuucggcgcuaucgccggguuuauagaaaauggaugggaggguaugguagauggcugguacggguuccgucaccagaacagugagggaacaggccaggcagcugaccucaaaagcacccaagccgcgauugaucagaucaaugguaagcugaaccgcuuaguggaaaagacgaaugagaaauuucaucagaucgaaaaggaguucuccgaagucgaggggaggauucaagaccuggagaaauauguggaagauaccaagaucgaccucuggucuuacaacgccgagcuucugguugcauuggaaaaucagcacacaauugaucuaacugacagcgagaugaacaaacuguucgaaagaacccggaagcagcuccgagagaacgcugaggauaugggcaauggaugcuuuaagauauaccauaaaugugacaacgccugcaucggcucaauucgcaaugggacauaugaccacgauguguacagagacgaagcucugaacaauagguuccagaucaagggagucgagcuuaaaagugguuauaaggauuggauccuguggauuuccuuugccauaagcugcuucuugcucugugugguacuguuaggcuuuaucaugugggcaugccaaaaagggaacauucgguguaauaucugcauuuga

SEQ ID NO: 129041 - RNA, 1701 nt, Artificial Sequence
  derived and/or modified CDS sequence (opt3) from hemagglutinin__InfluenzaA__ABG37340
augaagaccaucauugcccugagcuacauacucugccuuguguucgcucagaaacugcccggcaacgacaauuccacagcaacuuuguguuuagggcaccaugccgucccuaacggaacgcugguuaagaccaucacaaaugaucaaauugaggugacuaacgcgaccgaacuuguacagucuuuuccaacagguagaaucugcgacucaccgcacaggauucucgauggcaaaaauuguacccugaucgacgcucuacugggggauccccauugcgacggauuccagaacaaggagugggauuuguuuguggaacggaguaaagccuauagcaauuguuacccuuaugacgucccagauuacgcaucccuccgcucucugguggccucgucaggcacucuggaguucacaaacgaaaauuuuaacuggaccgguguugcucaggacgggaagucuuauaguugcaagcgaggauccgugaauagcuucuuuagccgucucaacugguuacacaaacuggaguacaaguaucccgcacuuaaugucacgaugccuaacaauggcaaauucgauaaguuguacauauggggcgugcaucacccauccacugacucagaucaaaccagucuguacguaagagccagcgggaaaguuacagugucuacuaagaggucccagcagaccgucauccccgacauuggauaucggccuugggugcgcggucuaucaagcagaaucaguauuuacuggacaaucgugaagccaggcgacauacuccugauuaacucuaccgggaaccuuaucgcuccgaggggauauuuuaaaauucggaauggcaaguccagcaucaugcgcucggaugcccccaucgguaacuguucuuccgagugcauuacgccuaaugggucaauaccaaacgacaaacccuuccagaaugucaaccgaaucacuuacggagcguguccuagauauguuaagcaaaauacacugaaauuggcaaccggcaugaggaacgugccagaaaagcagacucggggcauuuuuggggccaucgcuggauucauagagaaugguugggaaggcaugguagaugggugguacggauuucgucaccagaacagugagggcacaggucaggccgcagaccucaaaagcacccaagcugccauugaucagaucaaugggaagcugaaccgcuuaguggagaagacgaaugaaaaauuccaucagaucgagaaggaguucuccgaagucgaaggcaggauucaagaccuggagaaauauguggaggauaccaagaucgaccucuggucuuacaacgcggaacuucugguugccuuggagaaucagcacacaauugaucuaacugacagcgaaaugaacaaacuguuugagagaacccggaagcagcuccgagaaaacgcagaggauaugggaaauggcugcuucaagauauaccauaaaugugacaacgcuugcaucgggucaauucgcaauggaacauaugaccacgauguguacagagacgaggcccugaacaauagguuucagaucaagggugucgaacuuaaaaguggcuauaaggauuggauccuguggauuuccuucgcuauaagcugcuuuuugcucugugugguacuguuaggguucaucaugugggccugccaaaaaggaaacauucgguguaauaucugcauuuga

SEQ ID NO: 129042 - RNA, 1701 nt, Artificial Sequence
  derived and/or modified CDS sequence (opt3) from hemagglutinin__InfluenzaA__ABG37351
augaagaccaucauugcccugagcuacauacucugccuuguguucgcucagaaacugcccggcaacgacaauuccacagcaacuuuguguuuagggcaccaugccgucccuaacggaacgcugguuaagaccaucacaaaugaucaaauugaggugacuaacgcgaccgaacuuguacagucuucaaguacagguagaaucugcgacagcccacacaggauucucgauggcaaaaauuguacccugaucgacgcucuacugggggauccgcauugcgacggauuucagaacaaggagugggauuuguucguggaacgguccaaagccuauucuaauuguuaccccuaugacgucccugauuacgcaucgcuccgcucacugguggccagcaguggcacucuggaguuuauaaacgaagacuucaauuggacagguguugcucaggaugggaaguccuaugcaugcaagcgaggaucugugaacagcuuuuucucccgucucaauugguuacacaaacuggaguacaaguauccagcccuuaacgucaccaugcccaauaacggcaaauuugacaaguuguacaucuggggcgugcaucacccuucaacggauagugaccaaacuagccuguacguaagagcuucugggaggguuaccguguccacaaaacggucacagcagacugucauuccaaauaucggauuccgccccugggugagaggucuaagcaguaggauuucuaucuauuggaccauagugaagccuggcgacauucuccugaucgauuccacagggaaccuuauugccccacggggauacuuuaagauccgcaacggcaaaagcucgaucaugcgaucugacgcgccgauugguaauuguuccucagagugcauaacccccaacgggaguaucccuaaugauaagccauuccagaacgucaauagaauuacguauggagcaugucccagguacguuaaacaaaacacucugaaguuggccacaggcaugcggaaugugccugaaaaacagacccguggcaucuuuggggcuauagccggauucauugagaacgguugggaaggcaugguagacgggugguauggauuucgccaccagaauagcgagggcacuggucaggcagcugaucucaaguccacacaagccgcgaucgaccagaucaacgggaaacugaauagauuaauugagaagaccaacgaaaaguuccaucagaucgagaaagaguucucugaaguggaaggcaggauucaagaucuggagaaguacgucgaggacacgaaaauagaucucuggagcuauaaugccggacuucugguggcauuggaaaaccagcacaccaucgaccuaacagauucagagaugaauaagcuguuugaacggacucgaaaacagcuccgcgagaacgcugaagacaugggcaacgggugcuucaagauuuaccauaagugugacaaugccugcaucggaaguaucagaaacgguaccuacgaucacgacguuuauagggaugaggcucugaauaaccgguuucagauuaaaggcguggagcuuaaguccggguacaaagacuggauacuguggaucagcuucgccauuucuugcuuuuugcucugugucgugcuguuaggauucaucaugugggcaugccaaaagggcaauauucgcuguaacaucugcauauga

SEQ ID NO: 129043 - RNA, 1698 nt, Artificial Sequence
  derived and/or modified CDS sequence (opt3) from hemagglutinin__InfluenzaA__ABG37362
augaaggugaaacugcucguccuucugugcaccuucacagccacuuacgcugacacgaucuguauuggcuaucacgcaaacaauagcaccgauacaguugacacuguguuggagaagaacguaaccgugacacauuccgucaauuuacuggaagauucucacaacgggaaacuaugccuccugaagggaauagcgccccuucagcuggguaauuguucaguggccggcuggaucuuggggaacccugagugcgaacuccugauuaguaaagagagcugguccuacaucguugaaaccccaaauccggagaacggaacuuguuaucccggcuacuuugcugacuaugaggaacugagagagcaacucucuucggugagcucauucgaaagguuugagauuuucccuaaggagaguuccuggccaaaucauacagucaccggugugucugccagcugcucccacaacgggaagucaaguuuuuaccggaauuuacuguggcuuacgggcaaaaacggauuguaucccaaucugagcaagucuuacgcaaacaauaaagaaaaggaggugcuaguucucuggggcgugcaucacccuccaaacaucgggaaccagcgcgcccuguaccacacugaaaaugcuuaugucuccguggugucaagccauuacagucgacguuucacccccgagauagcaaaaagaccuaaggucagggaucaggaaggacggaucaacuauuacuggacacuucuggagccaggugacacuauuaucuuugaggccaauggcaacuugauugcuccgugguaugccuucgcgcucucucgcggguuuggauccggcaucauaaccagcaaugcacccauggaugaaugugacgccaagugccagacaccucaaggugcuauuaacucgucucugccauuccagaauguucaccccgugaccaucggggaguguccuaaauacguaagauccgccaaguuaaggauggugacgggacugcggaacauuccaucaauccagagucgcggccucuuuggcgcaaucgcuggguucauugaaggagguuggacuggcauggucgaugggugguauggauaccaucaccagaaugagcaaggcagcgguuacgccgcggaccagaaauccacacagaacgccauaaaugggaucaccaacaagguaaauucuguuauugaaaagaugaacacucaguuuacagcagugggcaaagaguucaauaaacuugagcgaagaauggaaaaccugaacaagaaggucgaugacggauucuuggauaucuggaccuauaaugcugagcuacuggugcuccuggaaaacgagaggacgcuugacuuucacgacagcaauguuaaaaaccuguacgaaaagguaaaaucacaauugaagaauaacgccaaagagauaggcaaugggugcuucgaguuuuaucauaaguguaacaaugaaugcauggagagugugaagaacggaaccuacgauuaucccaaauacuccgaagagagcaagcucaaucgggagaaaauugacggugucaagcuggaaucuaugggcguguaucagaucuuagcuaucuacucaacagucgccaguagccuggugcuacucguuucccugggggcaauuucuuucuggaugugcucgaacggaagccuucagugucguaucugcauuuga

SEQ ID NO: 129044 - RNA, 1698 nt, Artificial Sequence; identical to SEQ ID NO: 128848
  derived and/or modified CDS sequence (opt3) from hemagglutinin__InfluenzaA__ABG37384

SEQ ID NO: 129045 - RNA, 1698 nt, Artificial Sequence; identical to SEQ ID NO: 128918
  derived and/or modified CDS sequence (opt3) from hemagglutinin__InfluenzaA__ABG37395

SEQ ID NO: 129046 - RNA, 1701 nt, Artificial Sequence; identical to SEQ ID NO: 128825
  derived and/or modified CDS sequence (opt3) from hemagglutinin__InfluenzaA__ABG37406

SEQ ID NO: 129047 - RNA, 1701 nt, Artificial Sequence
  derived and/or modified CDS sequence (opt3) from hemagglutinin__InfluenzaA__ABG37428
augaagaccaucauugcccugagcuacauacucugccuuguguucgcucagaaacugcccggcaacgacaauuccacagcaacuuuguguuuagggcaccaugccgucccuaacggaacgcugguuaagaccaucacaaaugaucaaauugaggugacuaacgcgaccgaauugguacagucuucaaguacagguagaaucugcgacagcccacaccagauucucgauggcgagaauuguacccugaucgacgcccuucugggggauccgcauugcgacggauuucagaacaaagaaugggauuuguucguggagagguccaaggcuuauucuaauuguuaccccuaugacgucccugauuacgugucgcuccggucacugguugcaagcaguggcacucuggaauuuaacaaugaguccuucaacuggacagguguggcccaaaaugggaccucuagcgcuugcaaacgccgauccgacaagucauuuuucagucgucucaacugguuacaccagcugaaguauaaauacccagcacuuaaugucacgaugcccaacaaugagaaguuugauaaauuguauauauggggagugcaucacccuggcacugacagcgaucagaucucucuguacgcccaggcuuccggcagaguaaccguuucaacaaagaggagccaacagacugugauuccaaacaucgggagucggcccuggguccgcggagugucuuccagaauuagcaucuacuggaccauagugaaaccuggugacauucuacucaucaacucgacaggcaaucugauugccccaaggggguauuucaagauccggucuggaaaguccucaaucaugcgcagugacgcgccgauuggcaaauguaacagcgaaugcauaacccccaaugguuccaucccuaacgauaagccauuucagaaugucaaccgaauuacguacggggcaugucccagauauguuaaacagaauacucuuaagcuggccacaggaaugaggaacgugccugagaaacaaacccggggcaucuucggcgcuauagccggguuuauugaaaauggaugggaggguaugauggacggcugguacggguuccgucaccagaacucugagggaacuggccaggcagcugaucuaaagagcacacaagccgcgaucaaucagaucaacgguaaacucaaucgccugauugaaaagaccaacgagaagucacaucagaucgaaaaagaguuuagugaaguagaggggaggauucaggacuuagagaaguauguggaagauacgaaaauagaccugugguccuacaaugccgagcuccuugucgcacuggaaaaccaacacaccaucgauuugacagacagcgagaugaacaagcuauucgaaagaacuaaaaagcagcugcgggagaaugcugaggauaugggcaacggaugcuucaagauuuaucauaaaugugacaaugccugcaucggcucuauccgaaacgggaccuacgaucacgacguguaccgcgacgaagcucucaauaacagauuucagauuaagggaguugagcugaaaucagguuauaaggauugggugcuuuggauaaguuucgccaucagcugcuuucuguuguguauuguccuccugggcuucaucaugugggcaugccagaaagggaauauuagguguaacaucugcauauga

SEQ ID NO: 129048 - RNA, 1701 nt, Artificial Sequence; identical to SEQ ID NO: 128610
  derived and/or modified CDS sequence (opt3) from hemagglutinin__InfluenzaA__ABG37439

SEQ ID NO: 129049 - RNA, 1701 nt, Artificial Sequence; identical to SEQ ID NO: 128688
  derived and/or modified CDS sequence (opt3) from hemagglutinin__InfluenzaA__ABG37461

SEQ ID NO: 129050 - RNA, 1701 nt, Artificial Sequence
  derived and/or modified CDS sequence (opt3) from hemagglutinin__InfluenzaA__ABG37472
augaagaccaucauugcccugagcuacauacucugccuuguguucgcucagaaacugcccggcaacgacaauuccacagcaacuuuguguuuagggcaccaugccgucccuaacggaacgcugguuaagaccaucacaaaugaucaaauugaggugacuaacgcgaccgaauugguacagucuucaaguacagguagaaucugcgacagcccacaccaggugcucgauggcgagaauuguacccugauugacgcccuucugggggauccgcauugcgacggauuucagaacaaagaaugggauuuguucgucgagagguccaaggcuuauucuaauuguuaccccuaugacgugccugauuacguuucgcuccggucacugguggcaagcaguggcacucuggaauuuaacaaugaguccuucaacuggacaggugucgcccaaaaugggaccucuagcgcuugcaaacgccgauccgacaagucauuuuucagucgucucaacugguuacaccagcugaaguauaaauacccagcacuuaaugugacgaugcccaacaaugagaaguuugauaaauuguauaucuggggaguacaucacccuggcacugacagcgaucagauaucucuguacgcccaggcuuccggcagaguuaccgugucaacaaagaggagccaacagacugucaucccaaacauugggagucggcccugggugcgcggagugucuuccagaaucagcauuuacuggaccaucgucaaaccuggugacauacuacucauuaacucgacaggcaaucugaucgccccaaggggguauuucaagauucggucuggaaaguccucaaucaugcgcagugacgcgccgaucggcaaauguaacagcgaaugcauuacccccaaugguuccauaccuaacgauaagccauuucagaauguuaaccgaaucacguacgggcccuguccuagauaugugaaacagaauacucuuaagcuggcaacaggaaugaggaacguaccagagaaacaaacccggggcauuuucggcgccaucgcuggguuuauagaaaauggaugggaggguaugauggacggcugguacggguuccgucaccagaacucugagggaacuggccaggccgcagaucuaaagagcacacaagcugccauuaaucagaucaacgguaaacucaaucgccugaucgaaaagaccaacgagaaguuucaucagauugaaaaagaguucucagaaguggaggggagaauccaggacuuagagaaguaugucgaagauacgaaaauugaccuguggaguuacaaugcggagcuccuuguggcccuggaaaaccaacacaccauagauuugacagacuccgagaugaacaagcuauucgaaaggacuaaaaagcagcugcgggagaaugcagaggauaugggcaacggaugcuuuaagaucuaucauaaaugugacaaugcuugcauuggcagcauccgaaacgggaccuacgaucacgacguuuaccgcgacgaagcccucaauaacagauuccagaucaagggaguggagcugaaaucugguuauaaggauuggauucuuuggauaucauuugcuaucaguugcuuccuguuguguauuguccuccugggcuuuaucaugugggccugccagaaagggaauauuagguguaacaucugcauauga

SEQ ID NO: 129051 - RNA, 1701 nt, Artificial Sequence; identical to SEQ ID NO: 128610
  derived and/or modified CDS sequence (opt3) from hemagglutinin__InfluenzaA__ABG37483

SEQ ID NO: 129052 - RNA, 1701 nt, Artificial Sequence; identical to SEQ ID NO: 128688
  derived and/or modified CDS sequence (opt3) from hemagglutinin__InfluenzaA__ABG37494

SEQ ID NO: 129053 - RNA, 1701 nt, Artificial Sequence
  derived and/or modified CDS sequence (opt3) from hemagglutinin__InfluenzaA__ABG37505
augaagaccaucauugcccugagcuacauacucugccuuguguucgcucagaaacugcccggcaacgacaauuccauggcaacauuguguuuagggcaccaugccgucccuaacggaacucugguuaagacgaucaccaaugaucaaauugaggugacaaacgcgacugaacuuguacagucuucaaguaccgguagaaucugcgacagcccacaccagauucucgauggcgagaauuguacacugaucgacgcucuacugggggauccgcauugcgacggauuucagaacaaagaaugggauuuguucguggagagguccaaggccuauucuaauuguuaccccuaugacgucccugauuacgugucgcuccggucacugguugcaagcaguggcacccuggaauuuaacaaugaguccuucaacuggacugguguggcccaaaaugggacaucuagcgcuugcaaacgccgauccgacaagucauuuuucagucgucucaacugguuacaccagcugaaguauaaauacccagcacuuaaugucaccaugcccaacaaugagaaguuugauaaauuguauauauggggagugcaucacccuggcacggacagcgaucagaucucucuguacgcccaggcuuccggcagaguaacuguuucaaccaagaggagccaacagacagugauuccaaacaucgggagucggcccuggguccgcggagugucuuccagaauuagcaucuacuggacuauagugaaaccuggugacauucuacucaucaacucgaccggcaaucugauugccccaaggggguauuucaagauccggucuggaaaguccucaaucaugcgcagugacgcgccgauugauaaauguaacagcgaaugcauaacacccaauggcuccaucccuaacgacaagccauuucagaaugucaaccgaauuaccuacggucuuugucccagauauguuaaacagaauacgcugaaguuggcaacugggaugaggaacgugccugagaaacaaacacggggaaucuucggcgccauagcuggcuuuauugaaaaugggugggagggaaugauggaugguugguacggcuuccgucaccagaacucugaggggaccggacaggccgcagaccucaagagcacucaagcugccaucaaucagaucaacggcaaacugaaucgcuuaauugaaaagacaaacgagaaguuucaucagaucgaaaaagaguucucagaaguagaggguaggauucaggaucuggagaaguauguggaagacaccaaaauagaucucuggaguuacaaugcggagcuucuggucgccuuggaaaaccaacacacgaucgaccuaaccgauuccgagaugaacaagcuguucgaaagaacuaaaaagcagcuccgggagaaugcagaggacauggggaacggcugcuuuaagauuuaucauaaaugugauaaugcuugcaucggaagcauccgaaacggcacauacgaccacgacguguaccgcgaugaagcccugaauaacagauuccagauuaaggggguugagcuuaaaucuggauauaaggacuggauacuguggaucucauuugcuauuaguugcuucuugcucuguaucgugcuguuagguuuuauuaugugggccugccagaaaggcaauaucagguguaacauaugcaucuga

SEQ ID NO: 129054 - RNA, 1701 nt, Artificial Sequence; identical to SEQ ID NO: 128564
  derived and/or modified CDS sequence (opt3) from hemagglutinin__InfluenzaA__ABG37516

SEQ ID NO: 129055 - RNA, 1701 nt, Artificial Sequence; identical to SEQ ID NO: 128564
  derived and/or modified CDS sequence (opt3) from hemagglutinin__InfluenzaA__ABG37527

SEQ ID NO: 129056 - RNA, 1701 nt, Artificial Sequence; identical to SEQ ID NO: 128564
  derived and/or modified CDS sequence (opt3) from hemagglutinin__InfluenzaA__ABG37538

SEQ ID NO: 129057 - RNA, 1701 nt, Artificial Sequence; identical to SEQ ID NO: 128564
  derived and/or modified CDS sequence (opt3) from hemagglutinin__InfluenzaA__ABG37549

SEQ ID NO: 129058 - RNA, 1701 nt, Artificial Sequence; identical to SEQ ID NO: 128564
  derived and/or modified CDS sequence (opt3) from hemagglutinin__InfluenzaA__ABG37560

SEQ ID NO: 129059 - RNA, 1701 nt, Artificial Sequence; identical to SEQ ID NO: 128564
  derived and/or modified CDS sequence (opt3) from hemagglutinin__InfluenzaA__ABG37571

SEQ ID NO: 129060 - RNA, 1701 nt, Artificial Sequence
  derived and/or modified CDS sequence (opt3) from hemagglutinin__InfluenzaA__ABG37582
augaagaccaucauugcccugagcuacauacucugccuuguguucgcucagaaacugcccggcaacgacaauuccacagcaacuuuguguuuagggcaccaugccgucccuaacggaacgaucguuaagaccauuacaaaugaucaaaucgaggugacuaacgcgaccgaacugguacagauuucuucaacagguggcaucugcgacaguccacaccagauacuagauggggagaauuguacccucaucgacgcucugcuuggagauccgcagugcgacggcuuucaaaacaaaaagugggaucuguucguggaaagaagcaaagccuauuccaauuguuaccccuaugacgucccugaucaugcaucuuugaggucgcucguggccucaagcgguacucuggaguuuaacaaugaaaguuucgacuggacagggguuacccagaacggaacguccucugcuugcaagcggcgcagcaauaaguccuuuuucucacgacugaacuggcucacucacuuaaaauacaaguauccagcacugaaugugaccaugcccaacaaugagaaauuugauaaacuuuacauuuggggcguccaucacccuggcacagacagugaucagaucagcuuguaugcccaggcuucugggcguauuacuguguccaccaagagaucacaacagacaguaaucccaaacauaggaagcaggccccggguucgcgacgugaguucuagaauuuccaucuacuggaccauugucaagccuggugacauccugcuaaucaacagcacgggcaaucucauugccccaaggggguacuucaagauacggucgggaaaaucuuccaucaugcgcucagaugcgccgauuggcaaguguaacagugagugcaucacucccaaugguagcauaccuaacgacaaaccauuucagaaugugaaccgaauuacauauggggcaugucccagauacgugaagcagaauacccugaaacuugccacuggaaugaggaacgucccugaaaagcaaacacggggcaucuucggcgcuaucgccggguuuauugagaauggaugggaagguaugguugauggcugguauggguuccgucaccagaacuccgagggaaccggccaggcagcugaccugaaaucuacgcaagccgcgaucaaucagauuaacgguaaguugaaucgccucauagggaagaccaacgagaaauuucaucagaucgaaaaggaguucagcgaaguggagggcaggauucaggaucuggaaaaauacguagaggacacaaagaucgauuuauggucauauaaugccgagcugcucguggcacuugaaaaccaacacacuaucgaccugaccgauagugagaugaacaaauuguucgaaagaacaaagaagcagcuacgggagaaugcugaagacaugggaaacggcugcuuuaaaauuuaccauaagugugauaaugccugcauaggguccauccgaaacggaacuuaugaccacgacgucuaccgcgaugaggcucugaauaacagauuccagauuaaagguguggagcucaagagcggcuacaaagacuggauccuguggauuucuuuugccaucucaugcuuccuucuguguguugcauugcucggguuuauaaugugggccugccagaagggaaauaucagguguaacauuugcaucuga

SEQ ID NO: 129061 - RNA, 1701 nt, Artificial Sequence; identical to SEQ ID NO: 128564
  derived and/or modified CDS sequence (opt3) from hemagglutinin__InfluenzaA__ABG37604

SEQ ID NO: 129062 - RNA, 1701 nt, Artificial Sequence; identical to SEQ ID NO: 128564
  derived and/or modified CDS sequence (opt3) from hemagglutinin__InfluenzaA__ABG37615

SEQ ID NO: 129063 - RNA, 1698 nt, Artificial Sequence; identical to SEQ ID NO: 128790
  derived and/or modified CDS sequence (opt3) from hemagglutinin__InfluenzaA__ABG47807

SEQ ID NO: 129064 - RNA, 1698 nt, Artificial Sequence; identical to SEQ ID NO: 128789
  derived and/or modified CDS sequence (opt3) from hemagglutinin__InfluenzaA__ABG47818

SEQ ID NO: 129065 - RNA, 1701 nt, Artificial Sequence
  derived and/or modified CDS sequence (opt3) from hemagglutinin__InfluenzaA__ABG47829
augaaggccaaacugcucgugcuucugugcgcuuucaccgcaacauacgccgacacuaucuguauuggcuaucacgcgaacaauagcacggauaccgucgacacaguuuuggagaagaacgugacuguaacccauuccgugaauuuacuggaagauucucacaacgggaaacuaugcagacucaagggaacagcuccccugcagcuugguaauuguucagucgccggcuggauacuggggaacccugagugcgaaaguuuguuuagcaaagaguccuggucuuacaucgcagaaaccccaaauccggagaacggaacuuguuaucccggcuacuucgccgacuaugaggaacucagggagcaacugucgucagugagcaguuuugaacgguucgagauuuuuccuaaggaguccucuuggccaaaucauacaguuaccaagggugugacggcuagcugcucccacaacgggaaaucaaguuucuacaagaaucugcucugguuaacugaaaagaacggacuguaucccaaucuuagcaagucuuacgucaacaauaaagagaaggaaguguugguacuguggggcguucaucacccuuccaacaucggcgaucagcgcgcaauuuaccacaccgagaacgccuaugugucagucgugagcagucauuacucucgacguuuuacaccagaaaucacuaagagacccaaagugaggaaucaggaggggcggauaaacuauuacuggacccuacucgagccuggagacacaaucauuuucgaagcuaaugguaaccugaucgccccaugguaugcguuugcacuuucccgcggcuucgggagcggaauuaucaccucgaaugccucuaugggcgagugugaugcuaagugccagacgccgcaaggugccauaaacuccucacugcccuuucagaauguccacccuguuacuauuggggaauguccaaaauacgugagaaguacaaaguugaggaugguaaccggacuccggaacauccccagcauucagucccgcggccuguucggcgcaaucgcuggguuuaucgagggagguuggacuggcaugauugacgggugguauggauaccaucaccagaaugaacaaggcucugguuacgccgcggaucagaaaagcacacagaacgccauagacgggaucaccaauaaggugaacucagucauugagaaaaugaauacgcaguucaccgcagugggcaaggaguucaacaaguuagaacgaagaauggagaaucugaacaaaaagguugaugacggauuucucgauaucuggacauauaacgcugaacuucugguguugcuagagaaugaaaggacucuggacuuccacgacaguaacgucaaaaaucucuacgagaaggugaaaacccaacugaagaacaaugccaaggagauaggcaacgggugcuuugaguucuaucauaaauguaauaacgaaugcauggaauccguaaagaauggaacauacgauuauccuaaauacagcgaggagucuaaacuuaaccgggagaaaauugacgguguuaagcuggaaucaaugggcguguaucagaucuuggcuaucuacaguacugucgccagcucccucgugcuguuagucucucugggggcaauuucguuuuggaugugcagcaauggaucccuacagugucguaucugcauuuga

SEQ ID NO: 129066 - RNA, 1701 nt, Artificial Sequence
  derived and/or modified CDS sequence (opt3) from hemagglutinin__InfluenzaA__ABG47840
augaaggugaaacugcucguccuucugugcgccuucaccgcuacauacgcagacacuaucuguauuggcuaucacgccaacaauagcacggauaccguugacacaguguuggagaagaacguaacugugacccauuccgucaauuuacuggaagauucucacaacgggaaacuaugcagacucaagggaacagcgccccugcagcuugguaauuguucaguggcuggcuggauacuggggaacccugagugcgaaaguuuguuuagcaaagaguccuggucuuacaucgccgaaaccccaaauccggagaacggaacuuguuaucccggcuacuucgcagacuaugaggaacucagggagcaacugucgucaguuagcaguuuugaacgguucgagauuuuuccuaaggaguccucuuggccaaaucauacagugaccaagggugucacggccagcugcucccacaacgggaaaucaaguuucuacaagaaucugcucugguuaacugaaaagaacggacuguaucccaaucuuagcaagucuuacgugaacaauaaagagaaggaaguauugguucuguggggcgugcaucacccuuccaacaucggcgaucagcgcgcuauuuaccacaccgagaacgcauaugucucaguggugagcagucauuacucucgacguuuuacaccagaaaucgccaagagacccaaagucagggaccaggaggggcggauaaauuauuacuggacucuacucgagccuggagauaccaucauuuucgaagcuaacgguaaucugaucgccccaugguaugcguuugcacuuucccgcggcuucgggagcggaauuaucacaucgaacgccucuauguccgagugugacgcuaagugccagaccccgcaaggcgccauaaauucaagucugcccuuucagaacguucacccugugacgauuggugaauguccaaaauacguaagaagcacuaaguugaggauggugacagggcuccggaauauccccuccauucagucucgcggacuguucggcgcaaucgcuggcuuuaucgaagggggauggaccgguaugauugauggcugguauggguaccaucaccagaacgaacaaggaagcggcuacgccgcggaccagaaaucaacucagaaugccauagaugguaucacaaacaaggucaauagugugauugagaaaaugaacacccaguucacggcaguugggaaggaguucaauaaguuagaacgaagaauggagaaccugaauaaaaagguggacgauggcuuucucgacaucuggaccuauaacgcugaacuucuggucuugcuagagaacgaaaggacacuggacuuccacgauuccaaugugaaaaaccucuacgagaagguuaaaaaucaacugaagaacaaugccaaggagauaggaaacggcugcuuugaguucuaucauaaauguaauaacgagugcauggaaagcguaaagaaugggacuuacgacuauccuaaauacucugaggagucaaaacuuaaccgggagaaaauugauggagugaagcuggaaaguaugggugucuaucagaucuuggcuaucuacagcaccguggccuccucucucguccuguuagugucgcugggcgcaauuagcuuuuggaugugcuccaaugggucacuacagugucguaucugcauuuga

SEQ ID NO: 129067 - RNA, 1701 nt, Artificial Sequence
  derived and/or modified CDS sequence (opt3) from hemagglutinin__InfluenzaA__ABG47851
augaagaccaucauugcccugagcuacauacucugccuuguguucgcucagaaacugcccggcaacgacaauuccacagcaacuuuguguuuagggcaccaugccgucccuaacggaacgcugguuaagaccaucacaaaugaucaaauugaggugacuaacgcgaccgaacuuguacagucuucaaguacagguagaaucugcgacagcccacacaggauucucgauggcaaaaauuguacccugaucgacgcucuacugggggauccgcauugcgacggauuucagaacaaggagugggauuuguucguggaacgguccaaagccuauucuaauuguuaccccuaugacgucccugauuacgcaucgcuccgcucacugguggccagcaguggcacucuggaguuuacaaacgaagguuucaauuggaccgggguugcucaggacggaaaguccuaugcaugcaagcgaggcucugugaacagcuuuuucucccgucucaauugguuacacaaacuggaguacaaguauccagcccuuaacgucacgaugcccaauaacgauaaauuugacaaguuguacauauggggcgugcaucacccuucaacugauagugaccaaaccagccuguacguacaggcuucugggagaguuacaguguccacuaaaaggucacagcagaccgucaucccaaauauuggaagccggcccugggugcgcgguaucaguucuagaauuuccaucuauuggacaauagugaagccuggcgacauucuacucaucaacagcaccgggaaccugauugccccaaggggauacuucaagauccggaauggcaaaucgucuaucaugcgcuccgaugcgccgauugacaacuguaauucagagugcauaacgcccaacgguaguaucccuaaugauaagccauuucaaaacgucaaucgaauuacuuauggggcaugucccagauacguuaaacagaacacacuuaagcuggccaccggaaugaggaaugugccugaaaaacagacucggggcaucuucggcgcuauagccggguuuauugagaacggaugggaagguaugguagacggcugguauggguuccgucaccagaauagcgagggaacaggccaagcagcugauuugaaguccacccaggccgcgaucgaccagaucaacgguaaacucaaucgccugauugagaagacgaacgaaaaguuucaucaaaucgagaaagaguucucugaaguggaagggaggauucaggauuuagagaaguacgucgaggacaccaaaauagaucuguggagcuauaaugccgaacuccuuguggcacuggagaaccagcacacaaucgacuugacugauucagaaaugaacaagcuauucgagagaacccggaaacagcugcgagaaaaugcugaggacaugggcaacggaugcuuuaagauuuaccauaagugugacaaugccugcaucggcaguauccgcaacgggacauacaaucacgauguuuauagagacgaggcucucaacaauagguuccaaauuaaaggaguggaacugaaguccgguuacaaagauuggauacuuuggaucagcuuugccauuucuugcuuccuguugugugucgugcuccugggcuuuaucaugugggcaugccagaaggggaacauucgguguucaaucugcauauga

SEQ ID NO: 129068 - RNA, 1701 nt, Artificial Sequence
  derived and/or modified CDS sequence (opt3) from hemagglutinin__InfluenzaA__ABG47862
augagaaccaucauugcccugagcuacauacucugccuuguguucgcucagaagcugcccggcaacgacaauuccacagcaacuuuguguuuagggcaccaugccgucccuaacggaacgcugguuaaaaccaucacaaaugaucaaauugaggugacuaacgcgaccgaacuuguacagucuucaaguacagguaggaucugcaauagcccacaccggauucucgacggcaagaacuguacccugaucgaugcucuacugggggacccgcauugcgauggauuucagaauaaagagugggacuuguucguggaacgcuccaaggccuauucuaacuguuaccccuaugaugucccugacuacgcaucgcuccgaucacugauagccagcaguggcacucuggaguuuacaaaugaagguuucaacuggaccgggguggcucaggauggaacguccuaugcaugcaaacguggcucuguuaagagcuuuuucuccagacucaauugguuacacaagcuggaguacaaauauccagcccuuaacgugacuaugcccaauaacgacaaguuugauaaauuguacaucuggggcguccaucacccuucaaccgacagugaucaaacaagccuguacgugcaggcuucugggaggguaacuguuuccaccaagcggucacagcagacagugauuccaaauaucggaagccgccccugggucagaggugugaguucuaggauuuccaucuauuggaccauagugaaaccuggcgacauucuacucaucaacagcacggggaaccugauugccccacggggauacuucaagauccgcucgggcaagucuuccaucaugcgaucagacgcgccgauugguaauuguaacagugagugcauaacucccaaugggagcaucccuaacgauaaaccauuucaaaaugucaacagaauuacauauggagcaugucccagguacguuaagcagaauacccuuaaacuggccacuggcaugcggaacgugccugaaaagcagacacguggcaucuucggggcuauagccggauuuauugagaaugguugggaaggcaugguagacgggugguauggauuccgccaccagaacuccgagggcaccggucaagcagcugauuugaaaucuacgcaggccgcgaucaaucagaucaacgggaagcucaauagacugauugagaaaaccaacgaaaaguuucaucaaaucgagaaggaguucagcgaaguggaaggcaggauucaggacuuagagaaauacgucgaggauacaaagauagaccuguggucauauaaugccgaacuccuuguggcacuggagaaccagcacacuaucgauuugaccgacagugaaaugaacaaacuauucgagcggacacgaaagcagcugcgcgaaaaugcugaggauaugggaaacggcugcuuuaaaauuuaccauaagugugacaaugccugcaucggguccaucagaaacggaacuuacgaucacgacguuuauagggacgaggcucucaauaaccgguuccaaauuaaggguguggaacugaaaagcggcuacaaggauuggauacuuuggaucucuuuugccauuucaugcuuccuguugugugucgugcuccugggguuuaucaugugggcaugccagaaaggaaauauucgcuguaacaucugcauauga

SEQ ID NO: 129069 - RNA, 1701 nt, Artificial Sequence; identical to SEQ ID NO: 129032
  derived and/or modified CDS sequence (opt3) from hemagglutinin__InfluenzaA__ABG47873

SEQ ID NO: 129070 - RNA, 1701 nt, Artificial Sequence; identical to SEQ ID NO: 129037
  derived and/or modified CDS sequence (opt3) from hemagglutinin__InfluenzaA__ABG47895

SEQ ID NO: 129071 - RNA, 1701 nt, Artificial Sequence; identical to SEQ ID NO: 129032
  derived and/or modified CDS sequence (opt3) from hemagglutinin__InfluenzaA__ABG47906

SEQ ID NO: 129072 - RNA, 1701 nt, Artificial Sequence
  derived and/or modified CDS sequence (opt3) from hemagglutinin__InfluenzaA__ABG47917
augaagaccaucauugcccugagcuacauacucugccuuguguucgcucagaaacugcccggcaacgacaauuccacagcaacuuuguguuuagggcaccaugccgucccuaacggaacgcugguuaagaccaucacaaaugaucaaauugaggugacuaacgcgaccgaacuuguacagucuucaaguacagguagaaucugcgacagcccacacaggauucucgauggcaaaaauuguacccugaucgacgcucuacugggggauccgcauugcgacggauuucagaacaaggagugggauuuguucguggaacgguccaaagccuauucuaauuguuaccccuaugacgucccugauuacgcaucgcuccgcucacugguggccagcaguggcacucuggaguuuauaaacgaagacuucaauuggacagguguugcucaggaugggaaguccuaugcaugcaagcgaggaucugugaacagcuuuuucucccgucucaauugguuacacaaacuggaguacaaguauccagcccuuaacgucaccaugcccaauaacggcaaauuugacaaguuguacaucuggggcgugcaucacccuucaacggauagugaccaaacuagccuguacguaagagcuucugggaggguuaccguguccacaaaacggucacagcagacugucauuccaaauaucggauuccgccccugggugagaggucuaagcaguaggauuucuaucuauuggaccauagugaagccuggcgacauucuccugaucaacuccacagggaaccuuauugccccacggggauacuuuaagauccgcaauggcaaaagcucgaucaugcgaucugaugcgccgauugguaacuguuccucagagugcauaacccccaaugggaguaucccuaacgacaagccauuccagaaugucaacagaauuacguauggagcaugucccagguacguuaaacaaaauacucugaaguuggccacaggcaugcggaacgugccugaaaaacagacccguggcaucuuuggggcuauagccggauucauugagaaugguugggaaggcaugguagaugggugguauggauuucgccaccagaacagcgagggcacuggucaggcagcugaccucaaguccacacaagccgcgaucgaucagaucaaugggaaacugaacagauuaauugagaagaccaaugaaaaguuccaucagaucgagaaagaguucucugaaguggaaggcaggauucaagaccuggagaaguacgucgaggauacgaaaauagaccucuggagcuauaacgccggacuucugguggcauuggaaaaucagcacaccaucgaucuaacagacucagagaugaacaagcuguuugaacggacucgaaaacagcuccgcgagaacgcugaagauaugggcaaugggugcuucaagauuuaccauaagugugacaacgccugcaucggaaguaucagaaaugguaccuacgaccacgauguuuauagggacgaggcucugaacaaucgguuucagauuaaaggcguggagcuuaaguccggguacaaagauuggauacuguggaucagcuucgccauuucuugcuuuuugcucugugucgugcuguuaggauucaucaugugggcaugccaaaagggcaacauucgcuguaauaucugcauauga

SEQ ID NO: 129073 - RNA, 1701 nt, Artificial Sequence; identical to SEQ ID NO: 129072
  derived and/or modified CDS sequence (opt3) from hemagglutinin__InfluenzaA__ABG47928

SEQ ID NO: 129074 - RNA, 1701 nt, Artificial Sequence
  derived and/or modified CDS sequence (opt3) from hemagglutinin__InfluenzaA__ABG47939
augaagaccaucauugcccugagcuacauacucugccuuguguucgcucagaaacugcccggcaacgacaauuccacagcaacuuuguguuuagggcaccaugccgucccuaacggaacgcugguuaagaccaucacaaaugaucaaauugaggugacuaacgcgaccgaacuuguacagucuucaaguacagguagaaucugcgacagcccauauaggauucucgauggcaaaaauuguacccugaucgacgcucuacugggggauccgcacugcgacggauuucagaacaaggagugggauuuguucguggaacgguccaaagccuacucuaauuguuaucccuacgacgucccugauuaugcaucgcuccgcucacugguggccagcaguggcacucuggaguuuauaaacgaagacuucaauuggacagguguugcucaggaugggaaguccuacgcaugcaagcgaggaucugugaacagcuuuuucucccgucucaauugguuacauaaacuggaguauaaguacccagcccuuaacgucaccaugcccaauaacggcaaauuugacaaguuguacaucuggggcgugcaccauccuucaacggauagugaccaaacuagccuguauguaagagcuucugggaggguuaccguguccacaaaacggucacagcagacugucauuccaaauaucggauuccgccccugggugagaggucuaagcaguaggauuucuaucuacuggaccauagugaagccuggcgacauucuccugaucaacuccacagggaaccuuauugccccacggggauauuuuaagauccgcaauggcaaaagcucgaucaugcgaucugaugcgccgauugguaacuguuccucagagugcauaacccccaaugggaguaucccuaacgacaagccauuccagaaugucaacagaauuacguacggagcaugucccagguauguuaaacaaaauacucugaaguuggccacaggcaugcggaacgugccugaaaaacagacccguggcaucuuuggggcuauagccggauucauugagaaugguugggaaggcaugguagaugggugguacggauuucgccaccagaacagcgagggcacuggucaggcagcugaccucaaguccacacaagccgcgaucgaucagaucaaugggaaacugaacagauuaauugagaagaccaaugaaaaguuccaccagaucgagaaagaguucucugaaguggaaggcaggauucaagaccuggagaaguaugucgaggauacgaaaauagaccucuggagcuacaacgccggacuucugguggcauuggaaaaucagcauaccaucgaucuaacagacucagagaugaacaagcuguuugaacggacucgaaaacagcuccgcgagaacgcugaagauaugggcaaugggugcuucaagauuuaccacaagugugacaacgccugcaucggaaguaucagaaaugguaccuaugaccaugauguuuacagggacgaggcucugaacaaucgguuucagauuaaaggcguggagcuuaaguccggguauaaagauuggauacuguggaucagcuucgccauuucuugcuuuuugcucugugucgugcuguuaggauucaucaugugggcaugccaaaagggcaacauucgcuguaauaucugcauauga

SEQ ID NO: 129075 - RNA, 1701 nt, Artificial Sequence
  derived and/or modified CDS sequence (opt3) from hemagglutinin__InfluenzaA__ABG47950
augaagaccaucauugcccugagcuacauacucugccuuguguucgcucagaaacugcccggcaacgacaauuccacagcaacuuuguguuuagggcaccaugccgucccuaacggaacgcugguuaagaccaucacaaaugaucaaauugaggugacuaacgcgaccgagcuaguacagucuucaaguacagguagaaucugcgacagcccacacaggauucucgauggcaaaaauuguacccugaucgacgcucugcugggggauccgcauugcgacggauuucagaacaaggaaugggauuuguucguggaacgguccaaagccuauucuaauuguuaccccuaugacgucccugauuacgcaucgcuccgcucacugguggccagccugggcacucucgaguuuauaaacgaagacuucaauuggacagguguugcucaggaugggaagaguuauuccugcaagcgaggaucugugaacagcuuuuucucccguuuaaauuggcugcacaaacuugaguacaaguauccagcauugaacgucaccaugcccaauaacggcaaauuugacaagcuguacaucuggggcgugcaucacccuucaacggauagugaccaaacuagccuauacgccagagcuucugggaggguaaccguuuccacaaaacggucacagcagacugugauuccaaauaucggauuccgccccugggucagaggucucagcaguaggauuucuaucuauuggaccauagugaagccuggcgacauucugcuuaucaacuccacagggaaccugauugccccacggggauacuuuaagauccgcaccggcaaaagcucgaucaugcgaucugaugcgccgauugguaauuguuccucagagugcauaacgcccaacgggaauaucccuaacgacaagccauuccagaaugugaacagaauuacuuauggagcaugucccagguacgucaaacaaaauacauugaagcucgccaccggcaugcggaacguuccugaaaaacagacucguggcaucuuuggggcuauagccggauucauugagaaugguugggaaggcaugguggaugggugguauggauuucgccaccagaacagugagggcacaggucaggcagcugaccuuaagagcacccaagccgcgaucgaucagaucaaugggaaauuaaacagacugauugagaagacgaaugaaaaguuccaucagaucgagaaagaguucuccgaaguagaaggcaggauucaagaccucgagaaguacguggaggauaccaaaauagaccuuuggucuuauaacgccggauuucuggucgcauuggaaaaucagcacacaaucgaucuaacugacagcgagaugaacaagcuguucgaacggacccgaaaacagcuccgcgagaacgcugaagauaugggcaaugggugcuuuaagauuuaccauaagugugacaacgccugcaucggaucaaucagaaaugguacauacgaccacgauguguauagggacgaggcucugaacaaucgguuccagauuaaaggcguugagcuuaagaguggguacaaagauuggauacuguggaucuccuuugccauuagcugcuucuugcucugugugguccuguuaggauuuaucaugugggcaugccaaaagggcaacauucgcuguaauaucugcauauga

SEQ ID NO: 129076 - RNA, 1701 nt, Artificial Sequence
  derived and/or modified CDS sequence (opt3) from hemagglutinin__InfluenzaA__ABG47961
augaagaccaucauugcccugagcuacauacucugccuuguguucgcucagaaacugcccggcaacgacaauuccacagcaacuuuguguuuagggcaccaugccgucccuaacggaacgcugguuaagaccaucacaaaugaucaaauugaggugacuaacgcgaccgaacuuguacagucuucaaguacagguagaaucugcgacagcccacacaggauucucgauggcaaaaauuguacccugaucgacgcucuacugggggauccgcauugcgacggauuucagaacaaggagugggauuuguucguggaacgguccaaagccuauucuaauuguuaccccuaugacgucccugauuacgcaucgcuccgcucacugguggccagcaguggcacucuggaguuuauaaacgaagacuucaauuggacagguguugcucaggaugggaaguccuauucuugcaagcgaggaagcgugaacuccuuuuucucacgucucaauugguuacacaaacuggaguacaaguauccagcacuuaacgucaccaugcccaauaacggcaaauuugacaaguuguacaucuggggcgugcaucacccuaguacggauagcgaccaaacuucucuguacguaagagccuccgggggaguuaccgugucaacaaaaaggagccagcagacugucauuccaaauaucgguagucggcccugggugcgcggccuaucuuccagaauuagcaucuauuggaccauagugaagccuggggacauucuccugaucaacucgacaggaaaccuuauugcuccaaggggcuacuucaagaugcggaaugguaaaucuuccaucaugcgcucagaugccccgaucgggaacuguaguagcgagugcauuacccccaauggauccauaccuaacgacaagccauuucagaaugucaaccgaaucacguauggcgcgugucccagauacguuaaacaaaauacucugaaguuggcaacaggcaugaggaacgugccugaaaaacagacccgggggauuuucggagccaucgcugguuuuauagagaauggcugggaagggaugguagauggaugguauggcuuccgucaccagaacucugaggguacugggcaggccgcagaccucaagagcacacaagcugccauugaucagaucaauggcaaacugaaccgcuuaaucggaaagaccaaugagaaguuucaucagauugaaaaagaguucucagaaguggagggcagaauccaagaccuggaaaaguacgucgaggauacgaaaauugaccucuggaguuauaacgcggagcuucugguggccuuggaaaaucagcacaccauagaucuaacagacuccgagaugaacaagcuguucgaaaggacucggaaacagcuccgagagaacgcagaagauauggggaauggaugcuuuaagaucuaccauaagugugacaacgcuugcauugguagcauccgcaauggcaccuacgaccacgauguuuauagagacgaggcccugaacaauagguuccagaucaaagggguggagcuuaagucuggauacaaagauuggauucuguggauaucauuugcuaucaguugcuucuugcucugugucgugcuguuaggcuuuauuaugugggccugccaaaaggguaacauccgguguaauauuugcaucuga

SEQ ID NO: 129077 - RNA, 1701 nt, Artificial Sequence; identical to SEQ ID NO: 129072
  derived and/or modified CDS sequence (opt3) from hemagglutinin__InfluenzaA__ABG47972

SEQ ID NO: 129078 - RNA, 1701 nt, Artificial Sequence; identical to SEQ ID NO: 129072
  derived and/or modified CDS sequence (opt3) from hemagglutinin__InfluenzaA__ABG47983

SEQ ID NO: 129079 - RNA, 1701 nt, Artificial Sequence; identical to SEQ ID NO: 129072
  derived and/or modified CDS sequence (opt3) from hemagglutinin__InfluenzaA__ABG47994

SEQ ID NO: 129080 - RNA, 1701 nt, Artificial Sequence
  derived and/or modified CDS sequence (opt3) from hemagglutinin__InfluenzaA__ABG48005
augaagaccaucauugcccugagcuacauacucugccuuguguucgcucagaaacugcccggcaacgacaauuccacagcaacuuuguguuuagggcaccaugccgucccuaacggaacgcugguuaagaccaucacaaaugaucaaauugaggugacuaacgcgaccgaacuuguacagucuucaaguacagguagaaucugcgacagcccacacaggauucucgauggcaaaaauuguacccugaucgacgcucuacugggggauccgcauugcgacggauuucagaacaaggagugggauuuguucguggaacgguccaaagccuauucuaauuguuaccccuaugacgucccugauuacgcaucgcuccgcucacugguggccagcaguggcacucuggaguuuauaaacgaagacuucaauuggacagguguugcucaggaugggaaguccuaugcaugcaagcgaggaucugugaacagcuuuuucucccgucucaauugguuacacaaacuggaguacaaguauccagcccuuaacgucaccaugcccaauaacggcaaauuugacaaguuguacaucuggggcgugcaucacccuucaacggauagugaccaaacuagccuguacguaagagcuucugggaggguuaccguguccacaaaacggucacagcagacugucauuccaaauaucggauuccgccccugggugagaggucuaagcaguaggauuucuaucuauuggaccauagugaagccuggcgacauucuccugaucaacuccacagggaaccuuauugccccacggggauacuuuaagauccgcaauggcaaaagcucgaucaugcgaucugaugcgccgauugguaacuguuccucagagugcauaacccccaaugggaguaucccuaacgacaagccauuccagaaugucaacagaauuacguauggagcaugucccagguacguuaaacaaaauacucugaaguuggccacaggcaugcggaacgugccugaaaaacagacccguggcaucuuuggggcuauagccggauucauugagaaugguugggaaggcaugguagaugggugguauggauuucgccaccagaacagcgagggcacuggucaggcagcugaccucaaguccacacaagccgcgaucaaucagaucaacgggaaacugaauagauuaauugagaagaccaacgaaaaguuccaucagaucgagaaagaguucucugaaguggaaggcaggauucaagaucuggagaaguacgucgaggacacgaaaauagaucucuggagcuauaaugccggacuucugguggcauuggaaaaccagcacaccaucgaccuaacagauucagagaugaacaagcuguuugaacggacucgaaaacagcuccgcgagaaugcugaagacaugggcaacgggugcuucaagauuuaccauaagugugauaaugccugcaucggaaguaucagaaacgguaccuacgaccacgacguuuauagggaugaggcucugaauaaccgguuucagauuaaaggcguggagcuuaaguccggguacaaagacuggauacuguggaucagcuucgccauuucuugcuuuuugcucugugucgugcuguuaggauucaucaugugggcaugccaaaagggcaauauucgcuguaacaucugcauauga

SEQ ID NO: 129081 - RNA, 1701 nt, Artificial Sequence; identical to SEQ ID NO: 129072
  derived and/or modified CDS sequence (opt3) from hemagglutinin__InfluenzaA__ABG48016

SEQ ID NO: 129082 - RNA, 1701 nt, Artificial Sequence; identical to SEQ ID NO: 129072
  derived and/or modified CDS sequence (opt3) from hemagglutinin__InfluenzaA__ABG48027

SEQ ID NO: 129083 - RNA, 1698 nt, Artificial Sequence
  derived and/or modified CDS sequence (opt3) from hemagglutinin__InfluenzaA__ABG48049
augaaggugaaacugcucguccuucugugcaccuucacagccacuuacgcugacacgaucuguauuggcuaucacgcaaacaauagcaccgauacaguugacacuguguuggagaagaacguaaccgugacacauuccgucaauuuacuggaagauucucacaacgggaaacuaugccuccugaagggaauagcgccccuucagcuggguaauuguucaguggccggcuggaucuuggggaacccugagugcgaacuccugauuaguaaagagagcugguccuacaucguugaaaccccaaauccggagaacggaacuuguuaucccggcuacuuugcugacuaugaggaacugagagagcaacucucuucggugagcucauucgaaagguuugagauuuucccuaaggagaguuccuggccaaaucauacagucaccggugugucugccagcugcucccacaacgggaagucaaguuuuuaccggaauuuacuguggcuuacgggcaaaaacggauuguaucccaaucugagcaagucuuacgcaaacaauaaagaaaaggagguucuaguacucuggggcgugcaucacccuccaaacaucggggaucagcgcgcccuguaccacacugaaaacgcuuaugucuccguggugucaacccauuacagccgacguuucacacccgagauagcaaaaagaccuaaggucagggaccaggaaggacggaucaauuauuacuggacucuucuggagccaggugauaccauuaucuuugaggccaacggcaauuugauugcuccgcgcuaugccuucgcgcucaguagaggguuuggaucuggcaucauaacauccaacgcacccauggacgaaugugaugccaagugccagaccccucaaggugcuauuaauagcucgcugccauuccagaacguucaccccgugacgaucggggaguguccuaaauacguaaggucugccaaguuacggauggugacuggacugcgcaauauuccauccauccagucacgaggccucuuuggcgcaaucgcuggguucauugaaggagguuggacaggcauggucgacgggugguauggauaccaucaccagaacgagcaaggcagugguuacgccgcggaucagaaaagcacccagaaugccauaaacgggaucacuaauaaggugaacuccguuauugaaaagaugaauacacaguuuaccgcagugggcaaagaguucaacaaacuugagagaaggauggaaaaucugaacaagaaggucgacgauggauucuuggacaucuggacguauaacgcugagcuacuggugcuccuggaaaaugagcggacccuugacuuucacgauucuaacguuaaaaaucuguacgaaaagguaaaaagccaauugaagaacaaugccaaagagauaggcaacgggugcuucgaguuuuaucauaaguguaauaacgaaugcauggagucagugaagaauggaacauacgacuaucccaaauacagugaagaguccaagcucaaccgugagaaaauugauggugucaagcuggaaagcaugggcguguaucagaucuuagcuaucuacucuacugucgccucaagucuggugcuacucguuagccugggggcaauuuccuucuggaugugcucuaauggaucgcuucagugucgcaucugcauuuga

SEQ ID NO: 129084 - RNA, 1701 nt, Artificial Sequence; identical to SEQ ID NO: 128698
  derived and/or modified CDS sequence (opt3) from hemagglutinin__InfluenzaA__ABG48060

SEQ ID NO: 129085 - RNA, 1701 nt, Artificial Sequence; identical to SEQ ID NO: 128698
  derived and/or modified CDS sequence (opt3) from hemagglutinin__InfluenzaA__ABG48071

SEQ ID NO: 129086 - RNA, 1701 nt, Artificial Sequence
  derived and/or modified CDS sequence (opt3) from hemagglutinin__InfluenzaA__ABG48082
augaagaccaucauugcccugagcuacauacucugccuuguguucgcucagaaacugcccggcaacgacaauuccacagcaacuuuguguuuagggcaccaugccgucccuaacggaacgcugguuaagaccaucacaaaugaucaaauugaggugacuaacgcgaccgaacuuguacagucuucaaguacagguagaaucugcgacagcccacaccagauucucgauggcgagaauuguacccugaucgacgcucuacugggggauccgcauugcgacggauuucagaacaaagaaugggauuuguucguggagagguccaaggccuauucuaauuguuaccccuaugacgucccugauuacgugucgcuccggucacugguugcaagcaguggcacucuggaauuuaacaaugaguccuucaacuggacagguguggcccaaaaugggaccucuagcgcuugcaaacgccgauccgacaagucauuuuucagucgucucaacugguuacaccagcugaaguauaaauacccagcacuuaaugucacgaugcccaacaaugagaaguuugauaaauuguauauauggggagugcugcauccuggcacugacagcgaucagaucucucuauacgcccaggcuuccggcagaguaaccguuucaacaaagaggagccaacagacugugauuccaaacaucgggagucggcccuggguccgcggagugucuuccagaauuagcaucuacuggaccauagugaaaccuggugacauucuccugaucaacucgacaggcaaucuuauugccccaaggggguauuucaagauccggucuggaaaguccucaaucaugcgcagugacgcgccgauuggcaaauguaacagcgaaugcauaacccccaaugguuccaucccuaacgggaagccauuucagaaugucaaccgaauuacguacggagcaugucccagauauguuaaacagaauacucugaaguuggccacaggcaugaggaacgugccugagaaacaaacccggggcaucuucggggcuauagccggauuuauugaaaaugguugggagggcaugauggaugggugguacggauuccgucaccagaacucugagggcacuggucaggcagcugaccucaagagcacacaagccgcgaucaaucagaucaacgggaaacugaaucgcuuaauugaaaagaccaacgagaaguuucaccagaucgaaaaagaguucucagaaguagagggcaggauucaggaucuggagaaguauguggaagacacgaaaauagaucucuggaguuacaaugccgagcuucuggucgcauuggaaaaccaacauaccaucgaccuaacagauuccgagaugaacaagcuguucgaaagaacuaaaaagcagcuccgggagaaugcugaggacaugggaaacggcugcuuuaagauuuaucacaaaugugauaaugccugcaucgggagcauccgaaacggaaccuacgaccaugauguguaccgcgacgaagcucugaauaacagauuccagauuaaggguguugagcuuaaaucuggcuauaaggacuggauacuguggaucucauuugccauuaguugcuucuugcucuguaucgugcuguuaggguuuauuaugugggcaugccagaaaggaaauaucagguguaacauaugcaucuga

SEQ ID NO: 129087 - RNA, 1701 nt, Artificial Sequence
  derived and/or modified CDS sequence (opt3) from hemagglutinin__InfluenzaA__ABG48104
augaagaccaucauugcccugagcuacauacucugccuuguguucgcucagaaacugcccggcaacgacaauuccacagcaacuuuguguuuagggcaccaugccgucccuaacggaacgcugguuaagaccaucacaaaugaucaaauugaggugacuaacgcgaccgaacuuguacagucuucaaguacagguagaaucugcgacagcccacaccagauucucgauggcgagaauuguacccugaucgacgcucuacugggggauccgcauugcgacggauuucagaacaaagaaugggauuuguucguggagaggucccgggccuauucuaauuguuaccccuaugacgucccugauuacgugucgcuccgcucacugguugcaagcaguggcacucuggaauuuaacaaugaguccuucaacuggacagguguggcccaaaaugggaccucuagcgcuugcaagcgacguuccgacaaaucauuuuucaguagacucaacugguuacaccagcugaaguauaaguacccagcacuuaaugucacgaugcccaacaaugagaaauuugauaaguuguauauauggggagugcaucacccuggcacugacagcgaucagaucucucuguacgcccaggcuuccggcaggguaaccguuucaacaaaacggagccaacagacugugauuccaaacaucgggagucgccccugggucagaggagugucuuccaggauuagcaucuacuggaccauagugaagccuggugacauucuacucaucaacucgacaggcaaucugauugccccacggggguauuucaaaauccgcucuggaaaguccucaaucaugcgaagugacgcgccgauuggcaaguguaacagcgaaugcauaacccccaaugguuccaucccuaacgauaaaccauuucagaaugucaacagaauuacguacgggcccuguccuagguauguuaagcagaauacucuuaaacuggcaacaggaaugcggaacgugccagagaagcaaacccguggcaucuucggcgccauagcuggguuuauugaaaauggaugggaggguaugauggacggcugguacggguuccgccaccagaacucugagggaacuggccaggccgcagauuugaaaagcacacaagcugccaucaaucagaucaacgguaagcucaauagacugauugagaaaaccaacgaaaaguuucaucagaucgaaaaggaguucucagaaguagaggggaggauucaggacuuagagaaauauguggaagauacgaagauagaccuguggaguuacaaugcggagcuccuugucgcccuggaaaaccaacacaccaucgauuugacagacuccgagaugaacaaacuauucgaacggacuaagaaacagcugcgagagaaugcagaggauaugggcaacggaugcuuuaagauuuaucauaagugugacaaugcuugcaucggcagcauccgcaacgggaccuacgaucacgacguguacagagacgaagcccucaauaacagguuccagauuaaaggaguugagcugaagucugguuauaaagauuggauacuuuggaucucauuugcuauuaguugcuuccuguuguguaucgugcuccugggcuuuauuaugugggccugccagaaggggaauauccgguguaacauaugcaucuga

SEQ ID NO: 129088 - RNA, 1701 nt, Artificial Sequence; identical to SEQ ID NO: 128688
  derived and/or modified CDS sequence (opt3) from hemagglutinin__InfluenzaA__ABG48115

SEQ ID NO: 129089 - RNA, 1701 nt, Artificial Sequence; identical to SEQ ID NO: 128695
  derived and/or modified CDS sequence (opt3) from hemagglutinin__InfluenzaA__ABG48126

SEQ ID NO: 129090 - RNA, 1701 nt, Artificial Sequence; identical to SEQ ID NO: 128610
  derived and/or modified CDS sequence (opt3) from hemagglutinin__InfluenzaA__ABG48148

SEQ ID NO: 129091 - RNA, 1701 nt, Artificial Sequence; identical to SEQ ID NO: 128610
  derived and/or modified CDS sequence (opt3) from hemagglutinin__InfluenzaA__ABG48159

SEQ ID NO: 129092 - RNA, 1701 nt, Artificial Sequence
  derived and/or modified CDS sequence (opt3) from hemagglutinin__InfluenzaA__ABG48170
augaagaccaucauugcccugagcuacauacucugccuuguguucgcucagaaacugcccggcaacgacaauuccacagcaacuuuguguuuagggcaccaugccgucccuaacggaacgcugguuaagaccaucacaaaugaucaaauugaggugacuaacgcgaccgaacugguacagucuucaaguacagguagaaucugcgacagcccacaccagauucucgauggcgagaauuguacccugaucgacgcccuucugggggauccgcauugcgacggauuucagaacaaagaaugggauuuguucguggagagguccaaggcuuauucuaauuguuaccccuaugacgucccugauuacgugucgcuccggucacugguugcaagcaguggcacucuggaauuuaacaaugaguccuucaacuggacagguguggcccaaaaugggaccucuagcgcuugcaaacgccgauccgacaagucauuuuucagucgucucaacugguuacaccagcugaaguauaaauacccagcacuuaaugucacgaugcccaacaaugagaaguuugauaaauuguauauauggggagugcaucacccuggcacugacagcgaucagaucucucuguacgcccaggcuuccggcagaguaaccguuucaacaaagaggagccaacagacugugauuccaaacaucgggagucggcccuggguccgcggagugucuuccagaauuagcaucuacuggaccauagugaaaccuggugacauucuacucaucaacucgacaggcaaucugauugccccaaggggguauuucaagauccggucuggaaaguccucaaucaugaaaagugacgcgccgauuggcaaguguaacuuugaaugcauaacccccaaugguagcaucccuaacgggaaaccauuccagaaugucaaccgcauuacguacggagcauguccccgauauguuaagcagaauacucuuaaacuggccacaggcaugagaaacgugccugagaagcaaaccaggggcaucuuuggggcuauagccggauucauugaaaaugguugggagggcaugauggaugggugguacggauuucggcaccagaacuccgagggcacuggucaggcagcugacuugaaaucuacacaagccgcgaucaaucagaucaacgggaagcucaaucgucugauugaaaagaccaacgagaaauuccaucagaucgaaaaggaguucagcgaaguagagggccgcauucaggauuuagagaaauauguggaagacacgaagauagaucuguggucauacaaugccgagcuccuugucgcacuggaaaaccaacacaccaucgacuugacagauagugagaugaacaaacuauuugaaagaacuaagaagcagcugagggagaaugcugaggacaugggaaacggcugcuucaaaauuuaucauaagugugauaaugccugcaucggguccauccggaacggaaccuacgaccacgauguguaccgagacgaagcucucaauaaccgcuuucagauuaaagguguugagcuaaagagcggcuauaaagacuggauacuuuggaucucuuucgccauuucaugcuuucuguuguguaucgugcuccugggguucauuaugugggcaugccagaagggaaauaucagauguaacauaugcaucuga

SEQ ID NO: 129093 - RNA, 1701 nt, Artificial Sequence
  derived and/or modified CDS sequence (opt3) from hemagglutinin__InfluenzaA__ABG48181
augaagaccaucauugcccugagcuacauacucugccuuguguucgcucagaaacugcccggcaacgacaauuccacagcaacuuuguguuuagggcaccaugccgucccuaacggaacgcugguuaagaccaucacaaaugaucaaauugaggugacuaacgcgaccgaacuuguacagucuucaaguacagguagaaucugcgacagcccacaccagauucucgauggcgagaauuguacccugaucgacgcucuacugggggauccgcauugcgacggauuucagaacaaagaaugggauuuguucguggagagguccaaggccuauucuaauuguuaccccuaugacgucccugauuacgugucgcuccggucacugguugcaagcaguggcacucuggaauuuaacaaugaguccuucaacuggacagguguggcccaaaaugggaccucuuaugcuugcaaacgccgaagcgacaaguccuuuuucucacgucucaacugguuacaccagcugaaguacaaauauccagcacuuaaugucacgaugcccaacaaugagaaguuugauaaauuguacauauggggagugcaucacccuggcacugacagugaucagaucagccuguacgcccaggcuucuggcagaguaaccguuuccacaaagaggucacaacagacugugauuccaaacaucgggagccggcccuggguccgcggagugaguucuagaauuuccaucuauuggaccauagugaaaccuggugacauucuacucaucaacagcacaggcaaucugauugccccaaggggguacuucaagauccggucgggaaagucuuccaucaugcgcucagacgcgccgauuggcaaauguaacagugaaugcauaacccccaaugguagcaucccuaacgauaagccauuucagaaugucaaccgaauuacguauggggcaugucccagauacguuaaacagaauacucuuaagcuggccacaggaaugaggaacgugccugagaaacaaacccggggcaucuucggcgcuauagccggguuuauugaaaauggaugggaggguaugauggacggcugguauggguuccgucaccagaacuccgagggaacuggccaggcagcugauuugaagucuacacaagccgcgaucaaucagaucaacgguaaacucaaucgccugauugaaaagaccaacgagaaguuucaucagaucgaaaaagaguucagcgaaguagaggggaggauucaggacuuagagaaguacguggaagauacgaaaauagaccuguggucauauaaugccgagcuccuugucgcacuggaaaaccaacacaccaucgauuugacagacagugagaugaacaagcuauucgaaagaacuaaaaagcagcugcgggagaaugcugaggauaugggcaacggaugcuuuaagauuuaccauaaaugugacaaugccugcaucggcuccauccgaaacgggaccuacgaucacgacguguaucgcgacgaagcucucaauaacagauuccagauuaagggaguugagcugaaaagcgguuacaaggauugggugcuuuggauaucuuuugccaucucaugcuuccuguuguguauuguccuccugggcuuuaucaugugggcaugccagaaagggaauauuagguguaacaucugcauauga

SEQ ID NO: 129094 - RNA, 1701 nt, Artificial Sequence; identical to SEQ ID NO: 128610
  derived and/or modified CDS sequence (opt3) from hemagglutinin__InfluenzaA__ABG48192

SEQ ID NO: 129095 - RNA, 1701 nt, Artificial Sequence
  derived and/or modified CDS sequence (opt3) from hemagglutinin__InfluenzaA__ABG48203
augaagaccaucauugcccugagcuacauacucugccuuguguucgcucagaaacugcccggcaacgacaauuccacagcaacuuuguguuuagggcaccaugccgucccuaacggaacgaucguuaagaccauuacaaaugaucaaaucgaggugacuaacgcgaccgaacugguacagucuucaaguacagguggcauuugcgacagcccacaccagauccuagauggggagaauuguacccucauagacgcucugcuuggagauccgcagugcgacggcuuucaaaacaaaaagugggaucuguucguggaaagauccaaagccuauucuaauuguuaccccuaugacgucccugaucaugcaucguugaggucacucguggccagcagugguacucuggaguuuaacaaugaauccuucgacuggacagggguuacccagaacggaacgucuagcgcuugcaagcggcgcuccaauaagucauuuuucagucgacugaacuggcucacucacuuaaaauacaaguauccagcacugaaugugaccaugcccaacaaugagaaauuugauaaacuuuacaucuggggcguccaucacccuggcacagacagcgaucagauuucuuuguaugcccaggcuuccgggcguaucacugugucaaccaagagaagccaacagacaguaauuccaaacaucggaaguaggccccggguucgcgacgugucuuccagaauaagcauuuacuggaccaucgucaagccuggugacauucugcuaaucaacucgacgggcaaucucaucgccccaaggggguacuucaagauucggucuggaaaauccucaauaaugcgcagugaugcgccgaucggcaaguguaacagcgagugcauuacucccaaugguuccaucccuaacgacaaaccauuucagaaugugaaccgaauaacauauggggcaugucccagauacgugaagcagaauacccugaaacuugccacuggaaugaggaacgucccugaaaagcaaacacggggcauuuucggcgcuaucgccggguuuaucgagaauggaugggaagguaugguugauggcugguauggguuccgucaccagaacucugagggaaccggccaggcagcugaccugaaaagcacgcaagccgcgauuaaucagaucaacgguaaguugaaucgccucauugggaagaccaacgagaaauuucaucagauagaaaaggaguucucagaaguggagggcagaauccaggaucuggaaaaauacguagaggacacaaagauugauuuauggaguuauaaugccgagcugcucguggcacuugaaaaccaacacacuaucgaccugaccgauuccgagaugaacaaauuguucgaaaggacaaagaagcagcuacgggagaaugcugaagacaugggaaacggcugcuuuaaaaucuaccauaagugugauaaugccugcauugggagcauacgaaacggaacuuaugaccacgacgucuaccgcgaugaggcucugaauaacagauuccagaucaaagguguggagcucaagucuggcuacaaagacuggauucuguggaucucauuugccauuaguugcuuccuucuguguguugcauugcucggguuuaucaugugggccugccagaagggaaauauaagguguaacgugugcaucuga

SEQ ID NO: 129096 - RNA, 1701 nt, Artificial Sequence; identical to SEQ ID NO: 128564
  derived and/or modified CDS sequence (opt3) from hemagglutinin__InfluenzaA__ABG48214

SEQ ID NO: 129097 - RNA, 1701 nt, Artificial Sequence; identical to SEQ ID NO: 128564
  derived and/or modified CDS sequence (opt3) from hemagglutinin__InfluenzaA__ABG48236

SEQ ID NO: 129098 - RNA, 1701 nt, Artificial Sequence
  derived and/or modified CDS sequence (opt3) from hemagglutinin__InfluenzaA__ABG48247
augaagaccaucauugcccugagcuacauacucugccuuguguucgcucagaaacugcccggcaacgacaauaacacagcaacuuuguguuuagggcaccaugccgucccuaauggaacgaucguuaagaccauuacaaacgaucaaaucgaggugacuaaugcgaccgaacugguacaguccucuucaacagguggcauuugcgacaguccacaccagauccuagauggggagaacuguacccucauagacgcucugcuuggagauccgcagugcgacggcuuucaaaauaaaaagugggaucuguucguggaaagaagcaaagccuauuccaacuguuaccccuaugacgucccugaucaugcaucuuugaggucgcucguggccucaagcgguacucuggaguuuaauaacgaaaguuucgacuggacagggguuacccagaauggaacguccucugcuugcaagcggcgcagcaacaaguccuuuuucucacgacugaauuggcucacucacuuaaaauacaaguauccagcacugaacgugaccaugcccaauaacgagaaauuugauaaacuuuacaucuggggcguccaucacccuggcacagacagugaucagauuagcuuguaugcccaggcuucugggcguaucacuguguccaccaagagaucacaacagacaguaauuccaaacaucggaagcaggccccggguucgcgacgugaguucuagaauauccauuuacuggaccaucgucaagccuggugacauucugcuaaucaauagcacgggcaaccucaucgccccaaggggguacuucaagauucggucgggaaaaucuuccauaaugcgcucagaugcgccgaucggcaaguguaauagugagugcauuacucccaacgguagcaucccuaaugacaaaccauuucagaacgugaaucgaauaacauauggggcaugucccagauacgugaagcagaacacccugaaacuugccacuggaaugaggaaugucccugaaaagcaaacacggggcauuuucggcgcuaucgccggguuuaucgagaacggaugggaagguaugguugauggcugguauggguuccgucaccaaaauuccgagggaaccggccaggcagcugaccugaaaucuacgcaggccgcgauuaaccagaucaaugguaaguugaaccgccucauugggaagaccaaugagaaauuucaucagauagaaaaggaguucagcgaaguggagggcagaauccaggaucuggaaaaauacguagaggacacaaagauugauuuauggucauauaacgccgagcugcucguggcacuugaaaaccaacacacuaucgaccugaccgauagugagaugaauaaauuguucgaaaggacaaagaagcagcuacgggagaacgcugaagacaugggaaauggcugcuuuaaaaucuaccauaagugugauaacgccugcauuggguccauacgaaauggaacuuaugaccacgacgucuaccgcgaugaggcucugaacaauagauuccagaucaaagguguggagcucaagagcggcuacaaagacuggauucuguggaucucuuuugccauuucaugcuuccuucuguguguugcauugcucggguuuaucaugugggccugccagaagggaaacauaagguguaauaucugcauuuga

SEQ ID NO: 129099 - RNA, 1701 nt, Artificial Sequence
  derived and/or modified CDS sequence (opt3) from hemagglutinin__InfluenzaA__ABG48269
augaagaccaucauugcccugagcuacauacucugccuuguguucgcucagaaacugcccggcaacgacaauuccacagcaacuuuguguuuagggcaccaugccgucccuaacggaacgaucguuaagaccauuacaaaugaucaaaucgaggugacuaacgcgaccgaacugguacagucuucaccaacagguggcauuugcgacaguccgcaccagauccuagauggggagaauuguacccucauagacgcucugcuuggagauccccagugcgacggcuuucaaaacaaaaagugggaucuguucguggaaagaagcaaagcccauuccaauuguuauccuuacgacgucccagauuaugcaucuuugaggucgcucguggccucaagcgguacucuggaguuuaacaaugaaaguuucaacuggacagggguuacccagaauggaacguccucugcuugcaagcggcgcagcaacaaguccuuuuucucacgacugaauuggcucacucacuuaaaauuuaaguaccccgcacugaacgugaccaugccuaauaacgagaaauucgacaaacuuuauaucuggggcguccaucacccaggcacagauaacgaccagauuaguuuguacgcccaggcuagcgggcguaucacugugucuaccaagagaucccaacagacaguaauucccaauaucggaucaaggccucggguucgcgaugugccaagcagaauaaguauuuauuggaccaucgucaagccgggugacauucugcuaaucaacucuacgggcaaucucaucgcccccaggggguacuuuaagauucgguccggaaaaagcucgauaaugcgcucugacgcgccuaucggcaaguguaacuccgagugcauuacuccaaaugguucaauccccaacgauaaaccuuuccagaaugugaaccgaauaacauacggggcauguccaagauaugugaagcagaauacccugaaacuugccacuggaaugaggaacguccccgaaaagcaaacacggggcauuuuuggcgcuaucgccggguucaucgagaauggaugggaagguaugguugacggcugguacggguuucgucaccagaacagugagggaaccggccaggcagcugaucugaaaagcacgcaagccgcgauuaaucagaucaacgguaaguugaaucgccucauugggaagaccaacgagaaauuccaucagauagaaaaggaguucuccgaaguggagggcagaauccaggaccuggaaaaauauguagaggauacaaagauugacuuauggucuuacaacgccgagcugcucguggcacuugaaaaucaacacacuaucgaucugaccgacagcgagaugaacaaauuguuugaaaggacaaagaagcagcuacgggagaaugcugaagauaugggaaacggcugcuucaaaaucuaucauaagugugacaaugccugcauugggucaauacgaaacggaacuuacgaucacgacgucuaucgcgacgaggcucugaauaacagauuucagaucaaagguguggagcucaagaguggcuacaaagauuggauucuguggaucuccuucgccauuagcugcuuucuucuguguguugcauugcucggguucaucaugugggccugccagaagggaaauauaagguguaacaucugcauuuga

SEQ ID NO: 129100 - RNA, 1701 nt, Artificial Sequence
  derived and/or modified CDS sequence (opt3) from hemagglutinin__InfluenzaA__ABG48291
augaagaccaucauugcccugagcuacauacucugccuuguguucgcucagaaacugcccggcaacgacaauuccacagcaacuuuguguuuagggcaccaugccgucccuaacggaacgcugguuaagaccaucacaaaugaucaaauugaggugacuaacgcgaccgaacuuguacagucuucaaguacagguagaaucugcgacagcccacacaggauucucgauggcaaaaauuguacccugaucgacgcucuacugggggauccgcauugcgacggauuucagaacaaggagugggauuuguucguggaacgguccaaagccuauucuaauuguuaccccuaugacgucccugauuacgcaucgcuccgcucacugguggccagcaguggcacucuggaguuuauaaacgaagacuucaauuggacagguguugcucaggaugggggauccuaugcaugcaagcgaggcucugugaacagcuuuuucucccgucucaauugguuacacaagucagaguacaaauauccagcccugaacgucaguaugcccaauaacggcaaguuuaauaaacuuuacaucuggggagugcaucacccuagcaccgacucugaucaaacguccuuguacguaagagcuucagggaggguuacugugagcaccaagcggagucagcagacagucacuccaaacauugguucucgccccugggugagaggccuguccagcaggaucucgauuuauuggaccaucgugaaaccuggggacauacuacucauuaacucuacaggaaaucugaucgccccacggggcuacuucaagauucgcaacgguaaguccucaaucaugcgaagugacgcgccgaucgggaccuguagcuuugagugcauuacgcccaauggauccauaccuaacgauaaaccauuccagaaugucaacagaaucacuuauggcgcaugucccagguacguuaagcaaaauacacuuaaacuggccaccggcaugcggaacgugccugaaaagcagacucgugggauuuuuggagcuaucgccgguuucauagagaauggcugggaagggaugguagacggaugguauggcuuucgccaccagaacucugaggguacagggcaggcagcugauuugaaaagcacccaagccgcgauugaccagaucaauggcaagcucaacagacugaucgagaaaacgaaugaaaaguuccaucagauugagaaggaguucucagaaguggaaggaaggauccaagauuuagagaaauacgucgaggacaccaagauugaucuguggaguuauaacgccgaacuccuuguggcacuggagaaucagcacacaauagacuugacugauuccgaaaugaacaaacuauuugagaagacccggaaacagcugcgagaaaacgcugaggacaugggcaaugggugcuucaagaucuaccauaagugugauaacgccugcauuggaagcauccgcaaugguacauacgaccacgacguuuauagagaugaggcucucaacaauagguuucagaucaaaggcguggaacugaagucuggguacaaagacuggauucuuuggauaucauucgccaucaguugcuuucuguugugugucgugcuccugggauucauuaugugggcaugccaaaagggcaacauccgguguaauauuugcaucuga

SEQ ID NO: 129101 - RNA, 1701 nt, Artificial Sequence
  derived and/or modified CDS sequence (opt3) from hemagglutinin__InfluenzaA__ABG48335
augaagaccaucauugcccugagcuacauacucugccuuguguucgcucagaaacugcccggcaacgacaauuccacagcaacuuuguguuuagggcaccaugccgucccuaacggaacgcugguuaagaccaucacaaaugaucaaauugaggugacuaacgcgaccgaacuuguacagucuucaaguacagguagaaucugcgacagcccacacaggauucucgauggcaaaaauuguacccugaucgacgcucuacugggggauccgcauugcgacggauuucagaacaaggagugggauuuguucguggaacgguccaaagccuauucuaauuguuaccccuaugacgucccugauuacgcaucgcuccgcucacugguggccagcaguggcacucuggaguuuauaaacgaagacuucaauuggacagguguugcucaggaugggaaguccuaugcaugcaagcgaggaucugugaacagcuuuuucucccgucucaauugguuacacaaacuggaguacaaguauccagcccuuaacgucaccaugcccaauaacggcaaauuugacaaguuguacaucuggggcgugcaucacccuucaacggauagugaccaaacuagccuguacguaagagcuucugggaggguuaccguguccacaaaacggucacagcagacugucauuccaaauaucggaagccgccccugggugagaggucuaaguucuaggauuuccaucuauuggaccauagugaagccuggcgacauucuccugaucaacagcacagggaaccuuauugccccacggggauacuucaagauccgcaauggcaaaucgucuaucaugcgauccgaugcgccgauugguaacuguucaagugagugcauaacccccaaugggagcaucccuaacgacaagccauuucagaaugucaacagaauuacguauggagcaugucccagguacguuaaacaaaauacucugaaguuggccacaggcaugcggaacgugccugaaaaacagacccguggcaucuucggggcuauagccggauuuauugagaaugguugggaaggcaugguagaugggugguauggauuccgccaccagaacuccgagggcacuggucaggcagcugaccucaagucuacacaagccgcgaucgaucagaucaaugggaaacugaacagauuaauugagaagaccaaugaaaaguuucaucagaucgagaaagaguucagcgaaguggaaggcaggauucaagaccuggagaaguacgucgaggauacgaaaauagaccucuggucauauaacgccgaacuucugguggcauuggagaaucagcacaccaucgaucuaacagacagugaaaugaacaagcuguucgagcggacucgaaaacagcuccgcgaaaacgcugaggauaugggaaauggcugcuuuaagauuuaccauaagugugacaacgccugcaucggguccaucagaaauggaaccuacgaccacgauguuuauagggacgaggcucugaacaaucgguuccagauuaaagguguggaacuuaagagcggcuacaaagauuggauacuguggaucucuuuugccauuucaugcuucuugcucugugucgugcuguuaggguuuaucaugugggcaugccaaaagggaaacauucgcuguaauaucugcauauga

SEQ ID NO: 129102 - RNA, 1701 nt, Artificial Sequence
  derived and/or modified CDS sequence (opt3) from hemagglutinin__InfluenzaA__ABG48346
augaagaccaucauugcccugagcuacauacucugccuuguguucgcucagaaacugcccggcaacgacaauuccacagcaacuuuguguuuagggcaccaugccgucccuaacggaacgcugguuaagaccaucacaaaugaucaaauugaggugacuaacgcgaccgaacuuguacagucuucaaguacagguagaaucugcgacagcccacacaggauucucgauggcaaaaauuguacccugaucgacgcucuacugggggauccgcauugcgacggauuucagaacaaggagugggauuuguucguggaacggaauaaagccuauuccaacuguuaccccuaugacgucccugauuacgcaucucuccgcucgcugguggccucaagcggcacucuggaguuuauaaaugaagacuucaacuggacagguguugcucaggaugggaagaguuaugcaugcaagcgaggauccgugaauaguuucuucagccgucucaacugguuacacaaacuggaguacaaguauccagcccuuaaugucaccaugcccaacaauggcaaauuugacaaguuguacaucuggggcgugcaucacccuuccacggauucagaccaaacuucucuguacguaagagcuagcgggaggguuaccgugucuacaaaacggucccagcagacugucauuccaaacaucggaucacgccccugggugagaggucuaagcaguaggauuucuaucuauuggaccauagugaagccuggcgacauucuccugaucaacuccacagggaaucuuauugccccacggggauacuucaagauccgcaacggcaaaagcucgaucaugcgaucugaugcgccgauugguaauuguuccucagagugcauaacccccaacgggaguaucccuaaugacagaccauuucagaacgucaauaggauuacguauggagcauguccccgguacguuaagcaaaacacucugaaauuggccacaggcaugcguaaugugccugaaaagcagacccgcggcaucuucggggcuauagccggauuuauugagaacgguugggaaggcaugguagaugggugguauggauucagacaccagaauagcgagggcacuggucaggcagcugaccucaaauccacacaagccgcgaucgaucagaucaacgggaagcugaauagguuaauugagaaaaccaacgaaaaguuucaucagaucgagaaggaauuuucugagguggaaggccggauucaagaccuggagaaauacgucgaggauacgaagauagaccucuggagcuauaaugccgaacuucugguggcauuggagaaccagcacaccaucgaucuaacagacucagaaaugaacaaacuguucgagcgaacucgcaagcagcucagagaaaaugcugaggauaugggaaacggcugcuuuaaaauuuaccauaagugugacaaugccugcaucgggaguaucaggaacggaaccuacgaccacgauguuuaucgggacgaggcucugaauaaccgcuuccagauuaaggguguggaacuuaaauccggcuacaaggauuggauacuguggaucagcuuugccauuucuugcuucuugcucugugucgugcuguuaggguuuaucaugugggcaugccaaaaaggaaauauuagauguaacaucugcauauga

SEQ ID NO: 129103 - RNA, 1701 nt, Artificial Sequence; identical to SEQ ID NO: 129101
  derived and/or modified CDS sequence (opt3) from hemagglutinin__InfluenzaA__ABG48357

SEQ ID NO: 129104 - RNA, 1701 nt, Artificial Sequence
  derived and/or modified CDS sequence (opt3) from hemagglutinin__InfluenzaA__ABG48368
augaagaccaucauugcccugagcuacauacucugccuuguguucgcucagaaacugcccggcaacgacaauuccacagcaacuuuguguuuagggcaccaugccgucccuaacggaacgcugguuaagaccaucacaaaugaucaaauugaggugacuaacgcgaccgaacuuguacagucuucaaguacagguagaaucugcgacagcccacacaggauucucgauggcaaaaauuguacccugaucgacgcucuacugggggauccgcauugcgacggauuucagaacaaggagugggauuuguucguggaacgguccaaagccuauucuaauuguuaccccuaugacgucccugauuacgcaucgcuccgcucacugguggccagcaguggcacucuggaguuuauaaacgaagacuucaauuggacagguguugcucaggaugggaaguccuaugcaugcaagcgaggaucugugaacagcuuuuucucccgucucaauugguuacacaaacuggaguacaaguauccagcccuuaacgucaccaugcccaauaacggcaaauuugacaaguuguacaucuggggcgugcaucacccuucaacggauagugaccaaacuagccuguacguaagagcuucugggaggguuaccguguccacaaaacggucacagcagacugucauuccaaauaucggaagccgccccugggugagaggucuaaguucuaggauuuccaucuauuggaccauagugaagccuggcgacauucuccugaucaacagcacagggaaccuuauugccccacggggauacuucaagauccgcaauggcaaaucgucuaucaugcgauccgaugcgccgauugguaacuguucaagugagugcauaacccccaaugggagcaucccuaacgacaagccauuucagaaugucaacagaauuacguauggagcaugucccagguacguuaaacaaaauacucugaaguuggccacaggcaugcggaacgugccugaaaaacagacccguggcaucuucggggcuauagccggauuuauugagaaugguugggaaggcaugguagaugggugguauggauuccgccaccagaacuccgagggcacuggucaggcagcugaccucaagucuacacaagccgcgaucgaucagaucaaugggaaacugaacagauuaauugagaagaccaaugaaaaguuucaucagaucgagaaagaguucagcgaaguggaaggcaggauucaagaccuggagaaguacgucgaggauacgaaaauagaccucuggucauauaacgccgaacuucugguggcauuggagaaucagcacaccaucgaucuaacagacagugaaaugaacaagcuguucgagcggacucgaaaacagcuccgcgaaaacgcugaggauaugggaaauggcugcuuuaagguuuaccauaagugugacaacgccugcauugaguccaucagaaaugggaccuacgaccacgauguguauagggacgaagcucugaacaaucgguuccagaucaaaggagucgagcuuaagagcgguuacaaagauuggauucuguggauaucuuuugccaucucaugcuucuugcucugugugguacuguuaggcuuuauuaugugggcaugccaaaaggggaacauccgcuguaauauuugcaucuga

SEQ ID NO: 129105 - RNA, 1701 nt, Artificial Sequence; identical to SEQ ID NO: 128955
  derived and/or modified CDS sequence (opt3) from hemagglutinin__InfluenzaA__ABG67135

SEQ ID NO: 129106 - RNA, 1701 nt, Artificial Sequence; identical to SEQ ID NO: 128831
  derived and/or modified CDS sequence (opt3) from hemagglutinin__InfluenzaA__ABG67146

SEQ ID NO: 129107 - RNA, 1701 nt, Artificial Sequence
  derived and/or modified CDS sequence (opt3) from hemagglutinin__InfluenzaA__ABG67157
augaagaccaucauugcccugagcuacauacucugccuuguguucgcucagaaacugcccggcaacgacaauuccacagcaacuuuguguuuagggcaccaugccgucccuaacggaacgcugguuaagaccaucacaaaugaucaaauugaggugacuaacgcgaccgaacuuguacagucuucaccaacagguagaaucugcaauaguccgcacaggauuaucgacggcaaaaacuguacccucauagaugcucugcuuggggacccccauugcgauggauuucagaauaaggagugggaccuguucguggaacggagcaaagccuauuccaacuguuacccuuaugaugucccagacuacgcaucuuugcgcucgcucguggccucaagcggcacucuggaguuuaucaaugaaaacuucaauuggacagguguugcucaggaugggaagaguuaugcaugcaagcgaggauccgugaacucuuucuucagccgucugaauuggcuccacaaauuagaguacaaguaucccgcccugaacgucaccaugccuaauaacggcaaauuugacaagcuauacauuuggggcgugcaucacccauccacggauucagaccaaaccaguuuguacguaagagcuagcgggaggguuacugugucuacaaaacggucccagcagacugucauccccgauauuggauaucgcccuugggugagaggucugucaagcaggaucaguauauacuggaccauugugaagccaggcgacauccuacucauuaacucuacagggaaucugaucgccccgcggggauauuucaaacuucgcaacggcaaguccagcaucaugcgaucggacgcgcccauugguaauuguucuuccgagugcauaaccccuaacgggucaaucccaaaugauaagcccuuucagaacgucaauagaauuacguacggagcauguccuagguauaucaaacaaaacacucugaaguuggccacaggcaugcggaauguuccagaaaaacagacccguggcauauucggggcuauugccggauuuaucgagaacgguugggaaggcaugguggacgggugguacggauuccgccaccagaauagugagggcacuggucaggcagcugaucucaagagcacacaagccgcgaucgaccagauuaacgggaaacugaauagauuaguagagaagaccaacgaaaaguuucaucagaucgagaaagaauuuuccgagguggaaggcaggauucaagaucuggagaaguaugucgaggacacgaaaauagaucucuggucuuacaaugccgaacuucugguggcauuggagaaccagcacaccaucgaccuaacagauagcgaaaugaacaagcuguucgagcggacuaaaaagcagcuccgagaaaaugcugaggacaugggaaacggcugcuuuaagauuuaccauaaaugugauaaugccugcaucgggucaauccgcaacggaaccuaugaccacgacguuuacagagaugaggcucugaauaacagguuccagauuaaggguguggaacuuaaaaguggcuauaaggacuggauacuguggaucuccuuugccauuagcugcuucuugcucugugucgugcuguuaggguuuaucaugugggcaugccaaaaaggaaauauucgguguaacaucugcauauga

SEQ ID NO: 129108 - RNA, 1701 nt, Artificial Sequence; identical to SEQ ID NO: 129032
  derived and/or modified CDS sequence (opt3) from hemagglutinin__InfluenzaA__ABG67168

SEQ ID NO: 129109 - RNA, 1701 nt, Artificial Sequence; identical to SEQ ID NO: 129032
  derived and/or modified CDS sequence (opt3) from hemagglutinin__InfluenzaA__ABG67179

SEQ ID NO: 129110 - RNA, 1701 nt, Artificial Sequence
  derived and/or modified CDS sequence (opt3) from hemagglutinin__InfluenzaA__ABG67190
augaagaccaucauugcccugagcuacauacucugccuuguguucgcucagaaacugcccggcaacgacaauuccacagcaacuuuguguuuagggcaccaugccgucccuaacggaacgcugguuaagaccaucacaaaugaucaaauugaggugacuaacgcgaccgaacuuguacagucuuuuccaacagguagaaucugcgacucaccgcacaggauucucgauggcaaaaauuguacccugaucgacgcucuacugggggauccccauugcgacggauuccagaacaaggagugggauuuguuuguggaacggaguaaagccuauagcaauuguuacccuuaugacgucccagauuacgcaucccuccgcucucugguggccucgucaggcacucuggaguucacaaacgaaaauuuuaacuggaccgguguugcucaggacgggaaguccuaugcaugcaagcgaggaagugugaauagcuucuuuucucgucucaacugguuacacaaacuggaguacaaguaucccgcccuuaaugucacgaugccuaacaauggcaaauucgauaaguuguacauauggggcgugcaucacccaagcacugacuccgaucaaaccucacuguacguaagagcuagugggaaaguuacagugagcacuaagaggucucagcagaccgucauccccgacauuggauaucggccuugggugcgcggucuauccucaagaaucagcauuuacuggacaaucgugaagccaggcgacauacuccugauuaacaguaccgggaaccuuaucgccccgaggggauauuuuaaaauucggaauggcaagucuuccaucaugcgcagcgaugcgcccaucgguaacuguucgucugagugcauuacgccuaauggguccauaccaaacgacaaacccuuccagaaugucaaccgaaucacuuacggagcauguccuagauauguuaagcaaaauacacugaaauuggccaccggcaugaggaacgugccagaaaagcagacucggggcauuuuuggggcuaucgccggauucauagagaaugguugggaaggcaugguagaugggugguacggauuucgucaccagaacucagagggcacaggucaggcagcugaccucaaaaguacccaagccgcgauugaucagaucaaugggaagcugaaccgcuuaguggagaagacgaaugaaaaauuccaucagaucgagaaggaguucagcgaagucgaaggcaggauucaagaccuggagaaauauguggaggauaccaagaucgaccucugguccuacaacgccgaacuucugguugcauuggagaaucagcacacaauugaucuaacugacucugaaaugaacaaacuguuugagagaacccggaagcagcuccgagaaaacgcugaggauaugggaaauggcugcuucaagauauaccauaaaugugacaacgccugcaucgggagcauucgcaauggaacauaugaccacgauguguacagagacgaggcucugaacaauagguuucagaucaagggugucgaacuuaaaucaggcuauaaggauuggauccuguggauuaguuucgccauauccugcuuuuugcucugugugguacuguuaggguucaucaugugggcaugccaaaaaggaaacauucgguguaauaucugcauuuga

SEQ ID NO: 129111 - RNA, 1701 nt, Artificial Sequence
  derived and/or modified CDS sequence (opt3) from hemagglutinin__InfluenzaA__ABG67212
augaagaccaucauugcccugagcuacauacucugccuuguguucgcucagaaacugcccggcaacgacaauuccacagcaacuuuguguuuagggcaccaugccgucccuaacggaacgcugguuaagaccaucacaaaugaucaaauugaggugacuaacgcgaccgaacuuguacagucuucaaguacagguagaaucugcgacagcccacacaggauucucgauggcaaaaauuguacccugaucgacgcucuacugggggauccgcauugcgacggauuucagaacaaggagugggauuuguucguggaacgguccaaagccuauucuaauuguuaccccuaugacgucccugauuacgcaucgcuccgcucacugguggccagcaguggcacucuggaguuuauaaacgaagacuucaauuggacagguguugcucaggaugggaaguccuaugcaugcaagcgaggaucugugaacagcuuuuucucccgucucaauugguuacacaaacuggaguacagauauccagcccuuaacgucaccaugcccaauaacggcaaguuugacaaauuguacaucuggggcgugcaucacccuucaacggauagugaccaaacuagccuguacguaagggcuucugggcggguuaccguguccacaaagcgcucacagcagacugucauuccaaauaucggauucagacccugggugaggggucuaagcagucggauuucuaucuauuggaccauagugaaaccuggcgacauucuccugaucaacuccacagggaaccuuauugccccacgcggauacuuuaagauccgaaauggcaagagcucgaucaugagaucugaugcgccgauugguaacuguuccucagagugcauaacccccaaugggaguaucccuaacgacaaaccauuccagaaugucaacaggauuacguauggagcauguccccgguacguuaagcaaaauacucugaaauuggccacaggcaugcguaacgugccugaaaagcagacccgcggcaucuuuggggcuauagccggauucauugagaaugguugggaaggcaugguagaugggugguauggauuuagacaccagaacagcgagggcacuggucaggcagcugaccucaaauccacacaagccgcgaucgaucagaucaaugggaagcugaacagguuaauugagaaaaccaaugaaaaguuccaucagaucgagaaggaguucucugaaguggaaggccggauucaagaccuggagaaauacgucgaggauacgaagauagaccucuggagcuauaacgccggacuucugguggcauuggaaaaucagcacaccaucgaucuaacagacucagagaugaacaaacuguuugaacgaacucgcaagcagcucagagagaacgcugaagauaugggcaaugggugcuucaaaauuuaccauaagugugacaacgccugcaucggaaguaucaggaaugguaccuacgaccacgauguuuaucgggacgaggcucugaacaaucgcuuucagauuaagggcguggagcuuaaauccggguacaaggauuggauacuguggaucagcuucgccauuucuugcuuuuugcucugugucgugcuguuaggauucaucaugugggcaugccaaaaaggcaacauuagauguaauaucugcauauga

SEQ ID NO: 129112 - RNA, 1701 nt, Artificial Sequence; identical to SEQ ID NO: 129072
  derived and/or modified CDS sequence (opt3) from hemagglutinin__InfluenzaA__ABG67223

SEQ ID NO: 129113 - RNA, 1701 nt, Artificial Sequence
  derived and/or modified CDS sequence (opt3) from hemagglutinin__InfluenzaA__ABG67234
augaagaccaucauugcccugagcuacauacucugccuuguguucgcucagaaacugcccggcgacgauaacuccacagcaacuuuguguuuagggcaccaugccgucccuaauggaacgcugguuaagaccaucacaaacgaccaaauugaggugacuaaugcgaccgaacuuguacagucuucaaguacagguagaaucugcgauagcccacacaggauucucgacggcaaaaacuguacccugaucgaugcucuacugggggacccgcauugcgauggauuucagaauaaggagugggacuuguucguggaacgguccaaagccuauucuaacuguuaccccuaugaugucccugacuacgcaucgcuccgcucacugguggccagcaguggcacucuggaguuuauaaaugaagauuucaacuggacagguguugcucaggacgggaaguccuaugcaugcaagcgaggaucugugaauagcuuuuucucccgucucaacugguuacacaaacuggaguacaaguauccagcccuuaaugucaccaugcccaacaauggcaaauuugauaaguuguacaucuggggcgugcaucacccuucaacggacagugaccaaacuagccuguacguaagagcuucugggaggguuaccguguccacaaaacggucacagcagacugucauuccaaacaucggauuccgccccugggugagaggucuaagcaguaggauuucuaucuauuggaccauaguggagccuggcgauauucuccugaucaauuccacagggaaccuuauugccccacggggauacuuuaagauccgcaacggcaagagcucgaucaugcgaucugacgcgccgauugguaauuguuccucagaaugcauaacccccaacgggaguaucccuaaugauaaaccauuccagaacgucaauagaauuacguauggagcaugucccagguacguuaagcaaaacacucugaaauuggccacaggcaugcggaaugugccugagaagcagacccguggcaucuuuggggcuauagccggauucauugaaaacgguugggagggcaugguagacgggugguauggauuucgccaccagaauagcgagggcacuggucaggcagcugaucucaaauccacacaagccgcgaucgaccagaucaacgggaagcugaauagauuaauugagaaaaccaacgaaaaguuccaucagaucgaaaaggaguucucugaaguggagggcaggauucaagaucuggagaaauacgucgaagacacgaagauagaucucuggagcuauaaugccggacuucugguggcauuggagaaccagcacaccaucgaccuaacagauucagaaaugaauaaacuguuugagcggacucgaaagcagcuccgcgaaaacgcugaggacaugggcaacgggugcuucaaaauuuaccauaagugugacaaugccugcaucggaaguaucagaaacgguaccuacgaucacgacguuuauagggaugaggcucugaauaaccgguuucagauuaagggcguggaacuuaaauccggguacaaggacuggauacuguggaucagcuucgccauuucuugcuuuuugcucugugucgugcuguuaggauucaucaugugggcaugccaaaaaggcaauauucgcuguaacaucugcauauga

SEQ ID NO: 129114 - RNA, 1701 nt, Artificial Sequence
  derived and/or modified CDS sequence (opt3) from hemagglutinin__InfluenzaA__ABG67245
augaagaccaucauugcccugagcuacauacucugccuuguguucgcucagaaacugcccggcaacgacaauuccacagcaacuuuguguuuagggcaccaugccgucccuaacggaacgcugguuaagaccaucacaaaugaucaaauugaggugacuaacgcgaccgaacuuguacagucuucaaguacagguagaaucugcgacagcccacacaggauucucgauggcaaaaauuguacccugaucgacgcucuacugggggauccgcauugcgacggauuucagaacaaggagugggauuuguucguggaacgguccaaagccuauucuaauuguuaccccuaugacgucccugauuacgcaucgcuccgcucacugguggccagcaguggcacucuggaguuuauaaacgaagacuucaauuggacagguguugcucaggaugggaaguccuaugcaugcaagcgaggaucugugaacagcuuuuucucccgucucaauugguuacacaaacuggaguacaaguauccagcccuuaacgucaccaugcccaauaacggcaaauuugacaaguuguacaucuggggcgugcaucacccuucaacggauagugaccaaacuagccuguacguaagagcuucugggaggguuaccguguccacaaaacggucacagcagacugucauuccaaauaucggauuccgccccugggugagaggucuaagcaguaggauuucuaucuauuggaccauagugaagccuggcgacauucuccugaucaacuccacagggaaccuuauugccccacggggauacuuuaagauccgcaauggcaaaagcucgaucaugcgaucugaugcgccgauugguaacuguuccucagagugcauaacccccaaugggaguaucccuaacgacaagccauuccagaaugucaacagaauuacguauggagcaugucccagguacguuaaacaaaauacucugaaguuggccacaggcaugcggaacgugccugaaaaacagacccguggcaucuuuggggcuauagccggauucauugagaaugguugggaaggcaugguagaugggugguauggauuucgccaccagaacagcgagggcacuggucaggcagcugaccucaaguccacacaagccgcgaucgaucagaucgacgggaaacugaauagauuaauugagaagaccaacgaaaaguuccaucagaucgagaaagaguucucugaaguggaaggcaggauucaagaucuggagaaguacgucgaggacacgaaaauagaucucuggagcuauaaugccggacuucugguggcauuggaaaaccagcacaccaucgaccuaacagauucagagaugaauaagcuguuugaacggacucgaaaacagcuccgcgagaacgcugaagacaugggcaacgggugcuucaagauuuaccauaagugugacaaugccugcaucggaaguaucagaaacgguaccuacgaucacgacguuuauagggaugaggcucugaauaaccgguuucagauuaaaggcguggagcuuaaguccggguacaaagacuggauacuguggaucagcuucgccauuucuugcuuuuugcucugugucgugcuguuaggauucaucaugugggcaugccaaaagggcaauauucgcuguaacaucugcauauga

SEQ ID NO: 129115 - RNA, 1698 nt, Artificial Sequence; identical to SEQ ID NO: 128790
  derived and/or modified CDS sequence (opt3) from hemagglutinin__InfluenzaA__ABG67477

SEQ ID NO: 129116 - RNA, 1698 nt, Artificial Sequence; identical to SEQ ID NO: 128848
  derived and/or modified CDS sequence (opt3) from hemagglutinin__InfluenzaA__ABG67491

SEQ ID NO: 129117 - RNA, 1701 nt, Artificial Sequence
  derived and/or modified CDS sequence (opt3) from hemagglutinin__InfluenzaA__ABG67502
augaagaccaucauugcccugagcuacauacucugccuuguguucgcucagaaacugcccggcaacgacaauuccacagcaacuuuguguuuagggcaccaugccgucccuaacggaacgcugguuaagaccaucacaaaugaucaaauugaggugacuaacgcgaccgaacuuguacagucuucaaguacagguagaaucugcgacagcccacaccagauucucgauggcgagaauuguacccugaucgacgcucuacugggggauccgcauugcgacggauuucagaacaaagaaugggauuuguucguggagagguccaaggccuauucuaauuguuaccccuaugacgucucggauuacgugucacuccggagccugguugcaaguuccggcacucuggaauuuaacaaugagucuuucaacuggacagguguggcccaaaaugggaccagcuccgcuugcaaacgccgaucagacaagagcuuuuucagucgucucaacugguuacaccagcugaaguauaaauacccugcacuuaaugucacgaugccaaacaaugagaaguuugauaaauuguauauauggggagugcaucaccccggcacugacucugaucagaucucccuguacgcccaggcuucaggcagaguaaccguuagcacaaagaggagucaacagacugugauuccuaacaucgggucucggccauggguccgcggaauuuccagcagaaucucgauauacuggaccauugugaaacccggugacauccuacucauuaacucuacaggcaaucugaucgccccuaggggguauuucaagauccgguccggaaagucaaguauuaugcgcagcgacgcgccaauaggcaaauguaacuccgaaugcaucaccccgaaugguucuauucccaacgauaagccuuuucagaaugugaaccgaaucacguacgggccaugucccagauaugucaaacagaauacucuuaagcuggcaacaggaaugaggaacguuccugagaaacaaacccggggcauauucggcgccauugcuggguuuaucgaaaauggaugggaggguaugauggacggcugguacggguuccgucaccagaacagcgagggaacuggccaggccgcagauuugaagucaacacaagcugccaucaaucagauuaacgguaaacucaaucgccugaucgaaaagaccaacgagaaguuucaucagauugaaaaagaguucagugaaguggaggggagaauacaggacuuagagaaguauguagaagauacgaaaaucgaccugugguccuacaaugcggagcuccuuguggcccuggaaaaccaacacaccauugauuugacagacagcgagaugaacaagcuauucgaaaggacuaaaaagcagcugcgggagaaugcagaggauaugggcaacggaugcuuuaagaucuaucauaaaugugacaaugcuugcaucggcucuauucgaaacgggaccuacgaucacgacgucuaccgcgacgaagcccucaauaacagauuccagauaaagggaguggagcugaaaucagguuauaaggauuggauccuuuggauuaguuuugcuaucagcugcuuccuguuguguauuguucuccugggcuuuaucaugugggccugccagaaagggaauauaagguguaacaucugcauuuga

SEQ ID NO: 129118 - RNA, 1701 nt, Artificial Sequence
  derived and/or modified CDS sequence (opt3) from hemagglutinin__InfluenzaA__ABG67524
augaagaccaucauugcccugagcuacauacucugccuuguguucgcucagaaacugcccggcaacgacaauuccacagcaacuuuguguuuagggcaccaugccgucccuaacggaacgcugguuaagaccaucacaaaugaucaaauugaggugacuaacgcgaccgaacuuguacagucuucaaguacagguagaaucugcgacagcccacaccagauucucgauggcgagaauuguacccugaucgacgcucuacugggggauccgcauugcgacggauuucagaacaaagaaugggauuuguucguggagaggucccgggccuauucuaauuguuaccccuaugacgucccugauuacgugucgcuccgcucacugguugcaagcaguggcacucuggaauuuaacaaugaguccuucaacuggacagguguggcccaaaaugggaccucuagcgcuugcaagcgacguuccgacaaaucauuuuucaguagacucaacugguuacaccagcugaaguauaaguacccagcacuuaaugucacgaugcccaacaaugagaaauuugauaaguuguauauauggggagugcaucacccuggcacugacagcgaucagaucucucuguacgcccaggcuuccggcaggguaaccguuucaacaaaacggagccaacagacugugauuccaaacaucgggagucgccccugggucagaggagugucuuccaggauuagcaucuacuggaccauagugaagccuggugacauucuacucaucaacucgacaggcaaucugauugccccacggggguauuucaaaauccgcucuggaaaguccucaaucaugcgaagugacgcgccgauuggcaaguguaacagcgaaugcauaacccccaaugguuccaucccuaacgauaaaccauuucagaaugucaacagaauuacguacgggcccuguccuagguauguuaagcagaauacucuuaaacuggcaacaggaaugcggaacgugccagagaagcaaacccguggcaucuucggcgccauagcuggguuuauugaaaauggaugggaggguaugauggacggcugguacggguuccgccaccagaacucugagggaacuggccaggccgcagauuugaaaagcacacaagcugccguaaaucagaucaacgguaagcucaauagacugaucgagaaaaccaacgaaaaguuucaucagauugaaaaggaguucucagaaguggaggggaggauccaggacuuagagaaauaugucgaagauacgaagauugaccuguggaguuacaaugcggagcuccuuguggcccuggaaaaccaacacaccauagauuugacagacuccgagaugaacaaacuauucgaacggacuaagaaacagcugcgagagaaugcagaggauaugggcaacggaugcuuuaagaucuaucauaagugugacaaugcuugcauuggcagcauccgcaacgggaccuacgaucacgacguuuacagagacgaagcccucaauaacagguuccagaucaaaggaguggagcugaagucugguuauaaagauuggauucuuuggauaucauuugcuaucaguugcuuccuguuguguauuguccuccugggcuuuaucaugugggccugccagaaggggaauauucgguguaacaucugcauauga

SEQ ID NO: 129119 - RNA, 1701 nt, Artificial Sequence; identical to SEQ ID NO: 128610
  derived and/or modified CDS sequence (opt3) from hemagglutinin__InfluenzaA__ABG67535

SEQ ID NO: 129120 - RNA, 1701 nt, Artificial Sequence; identical to SEQ ID NO: 128564
  derived and/or modified CDS sequence (opt3) from hemagglutinin__InfluenzaA__ABG67546

SEQ ID NO: 129121 - RNA, 1701 nt, Artificial Sequence
  derived and/or modified CDS sequence (opt3) from hemagglutinin__InfluenzaA__ABG67557
augaagaccaucauugcccugagcuacauacucugccuuguguucgcucagaaacugcccggcaacgacaauuccacagcaacuuuguguuuagggcaccaugccgucccuaacggaacgaucguuaagaccauuacaaaugaucaaaucgaggugacuaacgcgaccgaacugguacagucuucaaguacagguggcauuugcgacagcccacaccagauccuagauggggagaauuguacccucauagacgcucugcuuggagauccgcagugcgacggcuuucaaaacaaaaagugggaucuguucguggaaagauccaaagccuauucuaauuguuaccccuaugacgucccugaucaugcaucguugaggucacucguggccagcagugguacucuggaguuuaacaaugaauccuucgacuggacagggguuacccagaacggaacgucuagcgcuugcaagcggcgcuccaauaagucauuuuucagucgacugaacuggcucacucacuuaaaauacaaguauccagcacugaaugugaccaugcccaacaaugagaaauuugauaaacuuuacaucuggggcguccaucacccuggcacagacagcgaucagauuucuuuguaugcccaggcuuccgggcguaucacugugucaaccaagagaagccaacagacaguaauuccaaacaucggaaguaggccccggguucgcgacgugucuuccagaauaagcauuuacuggaccaucgucaagccuggugacauucugcuaaucaacucgacgggcaaucucaucgccccaaggggguacuucaagauucggucuggaaaauccucaauaaugcgcagugaugcgccgaucggcaaguguaacagcgagugcauuacucccaaugguuccaucccuaacgacaaaccauuucagaaugugaaccgaauaacauauggggcaugucccagauacgugaagcagaauacccugaaacuugccacuggaaugaggaacgucccugaaaagcaaacacggggcauuuucggcgcuaucgccggguuuaucgagaauggaugggaagguaugguugauggcugguauggguuccgucaccagaacucugagggaaccggccaggcagcugaccugaaaagcacgcaagccaccauuaaucagaucaacgguaaguugaaucgccucauugggaagacaaacgagaaauuucaucagauagaaaaggaguucucagaaguggagggcagaauccaggaucuggaaaaauacguagaggacacuaagauugauuuauggaguuauaaugcggagcugcucguggcccuugaaaaccaacacaccaucgaccugacagauuccgagaugaacaaauuguucgaaaggacuaagaagcagcuacgggagaaugcagaagacaugggaaacggcugcuuuaaaaucuaccauaagugugauaaugcuugcauugggagcauacgaaacggaaccuaugaccacgacgucuaccgcgaugaggcccugaauaacagauuccagaucaaagguguggagcucaagucuggcuacaaagacuggauucuguggaucucauuugcuauuaguugcuuccuucuguguguugccuugcucggguuuaucaugugggcaugccagaagggaaauauaagguguaacaucugcauuuga

SEQ ID NO: 129122 - RNA, 1701 nt, Artificial Sequence; identical to SEQ ID NO: 128564
  derived and/or modified CDS sequence (opt3) from hemagglutinin__InfluenzaA__ABG67568

SEQ ID NO: 129123 - RNA, 1701 nt, Artificial Sequence; identical to SEQ ID NO: 128564
  derived and/or modified CDS sequence (opt3) from hemagglutinin__InfluenzaA__ABG67579

SEQ ID NO: 129124 - RNA, 1701 nt, Artificial Sequence; identical to SEQ ID NO: 128564
  derived and/or modified CDS sequence (opt3) from hemagglutinin__InfluenzaA__ABG67590

SEQ ID NO: 129125 - RNA, 1701 nt, Artificial Sequence; identical to SEQ ID NO: 128564
  derived and/or modified CDS sequence (opt3) from hemagglutinin__InfluenzaA__ABG67601

SEQ ID NO: 129126 - RNA, 1701 nt, Artificial Sequence; identical to SEQ ID NO: 128564
  derived and/or modified CDS sequence (opt3) from hemagglutinin__InfluenzaA__ABG67612

SEQ ID NO: 129127 - RNA, 1701 nt, Artificial Sequence; identical to SEQ ID NO: 128564
  derived and/or modified CDS sequence (opt3) from hemagglutinin__InfluenzaA__ABG67623

SEQ ID NO: 129128 - RNA, 1701 nt, Artificial Sequence
  derived and/or modified CDS sequence (opt3) from hemagglutinin__InfluenzaA__ABG67634
augaagaccaucauugcccugagcuacauacucugccuuguguucgcucagaaacugcccggcaacgacaauaacacagcaacuuuguguuuagggcaccaugccgucccuaauggaacgaucguuaagaccauuacaaacgaucaaaucgaggugacuaaugcgaccgaacugguacaguccucuucaacagguggcauuugcgacaguccacaccagauccuagauggggagaacuguacccucauagacgcucugcuuggagauccgcagugcgacggcuuucaaaauaaaaagugggaucuguucguggaaagaagcaaagccuauuccaacuguuaccccuaugacgucccugaucaugcaucuuugaggucgcucguggccucaagcgguacucuggaguuuaauaacgaaaguuucgacuggacagggguuacccagaauggaacguccucugcuugcaagcggcgcagcaacaaguccuuuuucucacgacugaauuggcucacucacuuaaaauacaaguauccagcacugaacgugaccaugcccaauaacgagaaauuugauaaacuuuacaucuggggcguccaucacccuggcacagacagugaucagauuagcuuguaugcccaggcuucugggcguaucacuguguccaccaagagaucacaacagacaguaauuccaaacaucggaagcaggccccggguucgcgacgugaguucuagaauauccauuuacuggaccaucgucaagccuggugacauucugcuaaucaauagcacgggcaaccucaucgccccaaggggguacuucaagauucggucgggaaaaucuuccauaaugcgcucagaugcgccgaucggcaaguguaauagugagugcauuacucccaacgguagcaucccuaaugacaaaccauuucagaacgugaaucgaauaacauauggggcaugucccagauacgugaagcagaacacccugaaacuugccacuggaaugaggaaugucccugaaaagcaaacacggggcauuuucggcgcuaucgccggguuuaucgagaacggaugggaagguaugguugauggcugguauggguuccgucaccaaaauuccgagggaaccggccaggcagcugaccugaaaucuacgcaggccgcgauuaaccagaucaaugguaaguugaaccgccucauugggaagaccaaugagaaauuucaucagauagaaaaggaguucagcgaaguggagggcagaauccaggaucuggaaaaauacguagaggacacaaagauugauuuauggucauauaacgccgagcugcucguggcacuugaaaaccaacacacuaucgaccugaccgauaguaaaaugaauaaguuguucgagaggacaaagaaacagcuacgggaaaacgcugaggacaugggaaauggcugcuuuaagaucuaccauaaaugugauaacgccugcauuggguccauacgaaauggaacuuaugaccacgacgucuaccgcgaugaagcucugaacaauagauuccagaucaaggguguggagcucaaaagcggcuacaaggacuggauucuguggaucucuuuugccauuucaugcuuccuucuguguguugcauugcucggguuuaucaugugggccugccagaagggaaacauaagguguaauaucugcauuuga

SEQ ID NO: 129129 - RNA, 1701 nt, Artificial Sequence; identical to SEQ ID NO: 128564
  derived and/or modified CDS sequence (opt3) from hemagglutinin__InfluenzaA__ABG67645

SEQ ID NO: 129130 - RNA, 1701 nt, Artificial Sequence
  derived and/or modified CDS sequence (opt3) from hemagglutinin__InfluenzaA__ABG67656
augaagaccaucauugcccugagcuacauacucugccuuguguucgcucagaaacugcccggcaacgacaauuccacagcaacuuuguguuuagggcaccaugccgucccuaacggaacgaucguuaagaccauuacaaaugaucaaaucgaggugacuaacgcgaccgaacugguacagucuucaaguacagguggcauuugcgacagcccacaccagauccuagauggggagaauuguacccucauagacgcucugcuuggagauccgcagugcgacggcuuucaaaacaaaaagugggaucuguucguggaaagauccaaagccuauucuaauuguuaccccuaugacgucccugaucaugcaucguugaggucacucguggccagcagugguacucuggaguuuaacaaugaauccuucgacugggcugggguuacacagaacggaaccucuagcgcaugcaagcggcgcuccaauaagucauuuuucagucgacugaacuggcucacgcacuuaaaauacaaguauccagcccugaaugugacuaugcccaacaaugagaaauuugauaaacuuuacaucuggggcguccaucacccuggcaccgacagcgaucagauuucuuuguaugcucaggccuccgggcguaucacagugucaacuaagagaagccaacagaccguaauuccaaacaucggaaguaggccccggguucgcgacgugucuuccagaauaagcauuuacuggacaaucgucaagccuggugacauucugcuaaucaacucgaccggcaaucucaucgcgccaaggggguacuucaagauucggucuggaaaauccucaauaaugcgcagugaugcaccgaucggcaaguguaacagcgagugcauuacgcccaaugguuccaucccuaacgacaaaccauuucagaaugugaaccgaauaacuuauggggccugucccagauacgugaagcagaauacacugaaacuugcuaccggaaugaggaacgucccugaaaagcaaacucggggcauuuucggcgccaucgcaggguuuaucgagaauggaugggaagguaugguugauggcugguauggguuccgucaccagaacucugagggaacaggccaggcugccgaccugaaaagcacccaagcggccauuaaucagaucaacgguaaguugaaucgccucauugggaagacgaacgagaaauuucaucagauagaaaaggaguucucagaaaucgagggcaggauucaggaucuggaaaaauacguggaggacaccaagaucgauuuauggaguuauaaugcagagcugcucguagcucuugaaaaccaacacacaaucgaccugacugauuccgagaugaacaaauuguucgaaagaaccaagaagcagcuacgggagaaugccgaagacaugggaaacggcugcuuuaaaauuuaccauaagugugauaaugcuugcauagggagcauccgaaacggaacauaugaccacgacguguaccgcgaugaggcccugaauaacagauuccagauuaaaggugucgagcucaagucuggcuacaaagacuggauccuguggauuucauuugcaaucaguugcuuccuucuguguguggccuugcucggguuuauaaugugggcuugccagaagggaaauaucagguguaacauuugcaucuga

SEQ ID NO: 129131 - RNA, 1701 nt, Artificial Sequence
  derived and/or modified CDS sequence (opt3) from hemagglutinin__InfluenzaA__ABG67667
augaagaccaucauugcccugagcuacauacucugccagguguucgcucaaaaacuucccggcaacgacaauuccacagcaacucuguguuuggggcaccaugccgucccuaacggaacguuaguuaagaccaucacaaaugaucagauugaggugacuaacgcgaccgaacugguacagucuucaaguacagguagaaucugcgacagcccacacaggauucuagauggcaaaaauuguacccucaucgacgcucugcuuggggauccgcauugcgacggauuucagaacaaggagugggaucuguucguggaacgguccaaagccuauucuaauuguuaccccuaugacgucccugauuacgcaucguugcgcucacucguggccagcaguggcacucuggaguuuacaaacgaagguuucaauuggauagggguugcucaagacggaaaguccuaugcaugcaagcgaggcucugugaacagcuuuuucucccgucugaauuggcuccacaaauuagaguacaaguauccagcccugaacgucaccaugcccaauaacgauaaauuugacaaacuuuacaucuggggcgugcaucacccuucaacggauagugaccagacuagcuuguacguacaggcuucugggagaguuaccguguccacaaagaggucacagcaaacugucauuccaaauaucggaagccggcccugggugcgcgguauuaguucuagaaucuccauauauuggaccauugugaagccuggcgacauccugcuaauuaacagcacagggaaccucaucgccccaaggggauacuucaagauccggaauggcaaaucgucuauuaugcgcuccgaugcgccgauagacaacuguaauucagagugcaucacccccaacgguaguauuccuaaugauaagccauuucagaacgucaaucgaaucacguauggggcaugucccagauacguuaaacagaacacucugaaacuugccacaggaaugaggaaugugccugaaaagcagacccggggcauauucggcgcuauugccggguuuaucgagaacggaugggaagguaugaucgacggcugguauggguuccgucaccaaaauagcgagggaacuggccaggcagcugaucugaaguccacacaggccgcgauugaccaaaucaacgguaaauugaaucgccucauugagaagaccaacgaaaaguuucaucagauagagaaagaguucucugaaguagaagggagaauccaggaucuggagaaguacguggaggacacgaaaauugauuuauggagcuauaaugccgaacugcucgucgcacuugagaaccagcacaccaucgaccugacagauucagaaaugaacaaguuguucgagaggacucggaaacaacuacgagaaaaugcugaggacaugggcaacggaugcuuuaagaucuaccauaagugugacaaugccugcauuggcaguauacgcaacgggaccuacgaucacgacguguauagagaugaggcucugaauaacagguuccagaucaaaggaguugaacucaaguccgguuacaaagacuggauucuguggaucagcuuugccauuucuugcuuccuucuguguguggucuugcucggcuuuaucaugugggcaugccagaaggggaauauacgguguaacaucugcauuuga

SEQ ID NO: 129132 - RNA, 1701 nt, Artificial Sequence
  derived and/or modified CDS sequence (opt3) from hemagglutinin__InfluenzaA__ABG79941
augaagaccaucauugcccugagcuacauacucugccuuguguucgcucagaaacugcccggcaacgacaauuccacagcaacuuuguguuuagggcaccaugccgucccuaacggaacgcugguuaagaccaucacaaaugaucaaauugaggugacuaacgcgaccgaacuuguacagucuucaaguacagguggcaucugcgacagcccacaccagauucucgauggggagaauuguacccugaucgacgcucuacugggagauccgcauugcgacggcuuucagaacaaagaaugggauuuguucguggagagauccaaggccuauucuaauuguuaccccuaugacgucccugauuacgcaucgcucaggucacugguggccagcagugguacucuggaauuuaacaaugaguccuucaacuggacagggguugcucaaaauggaaccucuagcgcaugcaaacggcgcuccaacaagucauuuuucagucgacucaauugguuacaccagcugaaguauaaauacccagcccuuaacgugacgaugcccaauaacgagaaguuugacaaauuguauauauggggcguccaucacccuagcacugauucugaccagaucucccuguacgcucaggccccaggccgugugaccguaucaacaaagagaagccaacagacuguuauucccaacaucgggaguaggccuugggugcggggagucucuucccgcauuagcaucuacuggaccauagugaaaccaggugauauucuacucaucaauuguacaggcaaccugauugcgccgagaggguauuucaagaucaggucgggaaagucuuccaucaugcggucagacgcaaguauuggcaaaugcaauagcgaauguauaacccccaacgguuccaucccuaaugacaagccauuucagaacgugaaucgcauuacguacggggccugcccccgauaugucaaacagaacacucuuaagcuggcuacaggaaugagaaauguuccugagaaacaaaccaggggcaucuucggcgccauagcaggguuuauugaaaacggaugggaggguaugguggauggcugguacggguuccggcaccagaauagcgagggaacuggccaggcugccgacuugaagucuacacaagcggccaucaaccagaucaaugguaaacucaaccgucugauugaaaagaccaaugagaaguuucaucagaucgaaaaagaguucucagaaguagaggggcgcauucaggauuuagagaaguauguggaagacacgaaaauagaucuguggaguuacaacgcagagcuccuugucgcucuggaaaaccaacacaccaucgacuugacagauuccgagaugaauaagcuauucgaaagaacuaaaaagcagcugagggagaacgccgaggacaugggcaauggauguuuuaagauuuaucauaaaugcgauaacgcuugcaucggcagcauccggaaugggaccuacgaccacgauguguaccgagacgaagcccucaacaaucgcuuccagauuaagggaguugagcugaaaucugguuauaaggacuggauacuuuggaucucauuugcaauuaguuguuuccuguugugcgugguccuccugggcuuuaucaugugggccugucagaaagggaacauuagaugcagcaucuguauauga

SEQ ID NO: 129133 - RNA, 1701 nt, Artificial Sequence; identical to SEQ ID NO: 128969
  derived and/or modified CDS sequence (opt3) from hemagglutinin__InfluenzaA__ABG79952

SEQ ID NO: 129134 - RNA, 1701 nt, Artificial Sequence; identical to SEQ ID NO: 129032
  derived and/or modified CDS sequence (opt3) from hemagglutinin__InfluenzaA__ABG79974

SEQ ID NO: 129135 - RNA, 1701 nt, Artificial Sequence; identical to SEQ ID NO: 129032
  derived and/or modified CDS sequence (opt3) from hemagglutinin__InfluenzaA__ABG79985

SEQ ID NO: 129136 - RNA, 1701 nt, Artificial Sequence
  derived and/or modified CDS sequence (opt3) from hemagglutinin__InfluenzaA__ABG79996
augaagaccaucauugcccugagcuacauacucugccuuguguucgcucagaaacugcccggcaacgacaauuccacagcaacuuuguguuuagggcaccaugccgucccuaacggaacgcugguuaagaccaucacaaaugaucaaauugaggugacuaacgcgaccgaacuuguacagucuucaccaacagguagaaucugcgacaguccgcacaggauucucgauggcaaaaauuguacccugaucgacgcucuacugggggauccccauugcgacggauuucagaacaaggagugggauuuguucguggaacggagcaaagccuauuccaauuguuacccuuaugacgucccagauuacgcaucucuccgcucgcugguggccucaagcggcacucuggaguuuacaaacgaaaauuucaacuggaccgguguugcucaggacgggaagaguuauuccugcaagcgaggaucugugaauagcuuuuucucccgucucaacugguuacacaaacuggaguacaaguaucccgcacuuaaugucacgaugccuaacaauggcaaauuugauaaguuguacauauggggcgugcaucacccaucaacugacagugaucaaaccagccuguacguaagagccucugggaaaguuacaguguccacuaagaggucacagcagaccgucauccccgacauuggauaucggccuugggugcgcggucuaagcaguagaaucucuauuuacuggacaaucgugaagccaggcgacauacuccugauuaacuccaccgggaaccuuaucgcuccgaggggauauuucaaaauucggaauggcaagagcucgaucaugcgcucugaugcccccaucgguaacuguuccucagagugcauuacgccuaaugggaguauaccaaacgacaaacccuuucagaaugucaaccgaaucacuuacggagcguguccuagauauguuaagcaaaauacacugaaauuggcaaccggcaugaggaacgugccagaaaagcagacucggggcauuuucggggccaucgcuggauuuauagagaaugguugggaaggcaugguagaugggugguacggauuccgucaccagaacagcgagggcacaggucaggccgcagaccucaaauccacccaagcugccauugaucagaucaaugggaagcugaaccgcuuaguggagaagacgaaugaaaaauuucaucagaucgagaaggaguucucugaagucgaaggcaggauucaagaccuggagaaauauguggaggauaccaagaucgaccucuggagcuacaacgcggaacuucugguugccuuggagaaucagcacacaauugaucuaacugacucagaaaugaacaaacuguucgagagaacccggaagcagcuccgagaaaacgcagaggauaugggaaauggcugcuuuaagauauaccauaaaugugacaacgcuugcaucgggaguauucgcaauggaacauaugaccacgauguguacagagacgaggcccugaacaauagguuccagaucaagggugucgaacuuaaauccggcuauaaggauuggauccuguggauuagcuuugcuauaucuugcuucuugcucugugugguacuguuaggguuuaucaugugggccugccaaaaaggaaacauucgguguaauaucugcauuuga

SEQ ID NO: 129137 - RNA, 1701 nt, Artificial Sequence; identical to SEQ ID NO: 129032
  derived and/or modified CDS sequence (opt3) from hemagglutinin__InfluenzaA__ABG80007

SEQ ID NO: 129138 - RNA, 1701 nt, Artificial Sequence; identical to SEQ ID NO: 129032
  derived and/or modified CDS sequence (opt3) from hemagglutinin__InfluenzaA__ABG80018

SEQ ID NO: 129139 - RNA, 1701 nt, Artificial Sequence; identical to SEQ ID NO: 129037
  derived and/or modified CDS sequence (opt3) from hemagglutinin__InfluenzaA__ABG80029

SEQ ID NO: 129140 - RNA, 1701 nt, Artificial Sequence; identical to SEQ ID NO: 129037
  derived and/or modified CDS sequence (opt3) from hemagglutinin__InfluenzaA__ABG80040

SEQ ID NO: 129141 - RNA, 1701 nt, Artificial Sequence; identical to SEQ ID NO: 129032
  derived and/or modified CDS sequence (opt3) from hemagglutinin__InfluenzaA__ABG80051

SEQ ID NO: 129142 - RNA, 1701 nt, Artificial Sequence
  derived and/or modified CDS sequence (opt3) from hemagglutinin__InfluenzaA__ABG80062
augaagaccaucauugcccugagcuacauacucugccuuguguucgcucagaaacugcccggcaacgacaauuccacagcaacuuuguguuuagggcaccaugccgucccuaacggaacgcugguuaagaccaucacaaaugaucaaauugaggugacuaacgcgaccgaacuuguacagucuucaaguacagguagaaucugcgacagcccacacaggauucucgauggcaaaaauuguacccugaucgacgcucuacugggggauccgcauugcgacggauuucagaacaaggagugggauuuguucguggaacgguccaaagccuauucuaauuguuaccccuaugacgucccugauuacgcaucgcuccgcucacugguggccagcaguggcacucuggaguuuacaaaggaagguuucaacuggaccgggguugcucaggacggaaaguccuaugcaugcaaacgaggcucugugaauagcuuuuucucccgucucaacugguuacacaagcuggaguacaaauauccagcccuuaaugucacgaugcccaacaaugauaaguuugacaaauuguacauauggggcgugcaucacccuucaacugauagugaccaaaccagccuguacguacaggcuucugggagaguuacaguguccacuaagaggucacagcagaccgucaucccaaacauuggaagccggcccugggugcgcgguaucaguucuagaauuuccaucuauuggacaauagugaagccuggcgacauucuacucaucaauagcaccgggaaccugauugccccaaggggauacuucaaaauccggaacggcaagucgucuaucaugcgcuccgaugcgccgauugguaauuguaacucagagugcauaacgcccaaugggaguaucccuaacgacaaaccauuucaaaaugucaaccgaauuacuuauggagcaugucccagauacguuaagcagaauacacuuaaacuggccaccggcaugaggaacgugccugaaaagcagacucggggcaucuucggggcuauagccggauuuauugagaaugguugggaaggcaugguagaugggugguauggauuccgucaccagaacagcgagggcacaggucaagcagcugacuugaaauccacccaggccgcgaucgaucagaucaaugggaagcucaaccgccugauugagaagacgaaugaaaaauuucaucaaaucgagaaggaguucucugaaguggaaggcaggauucaggacuuagagaaauacgucgaggauaccaagauagaccuguggagcuauaacgccgaacuccuuguggcacuggagaaucagcacacaaucgauuugacugacucagaaaugaacaaacuauucgagagaacccggaagcagcugcgagaaaacgcugaggauaugggaaauggcugcuuuaagauuuaccauaaaugugacaacgccugcaucgggaguauccgcaauggaacauacgaccacgauguuuauagagacgaggcucucaacaauagguuccaaauuaaggguguggaacugaaaacuggcuacaaggauuggauacuuuggaucuccuuugccauuagcugcuuccuguugugugucgugcuccugggguuuaucaugugggcaugccagaaaggaaacauucgguguaauaucugcauauga

SEQ ID NO: 129143 - RNA, 1701 nt, Artificial Sequence
  derived and/or modified CDS sequence (opt3) from hemagglutinin__InfluenzaA__ABG80073
augaagaccaucauugcccugagcuacauacucugccuuguguucgcucagaaacugcccggcaacgacaauuccacagcaacuuuguguuuagggcaccaugccgucccuaacggaacgcugguuaagaccaucacaaaugaucaaauugaggugacuaacgcgaccgaacuuguacagucuucaaguacagguagaaucugcgacagcccacacaggauucucgauggcaaaaauuguacccugaucgacgcucuacugggggauccgaacugcgacggauuucagaauaaggagugggauuuguucguggaacgguccaaagccuauucuaacuguuaccccuaugacgucccugauuacgcaucgcuccgcucacugguggccagcaguggcacucuggaguuuacaaaugaagacuucaacuggaccgguguugcucaggaugggggauccuaugcaugcaagcgaggcucugugaauagcuuuuucucccgucucaacugguuacauaagcuggaguacaaauauccagcccuuaaugucacgaugcccaacaauggcaaguuugacaaauuguacauauggggagugcaccauccuucaacugauagugaccaaaccagccuguacguaagagcuucugggaggguuacaguguccacuaagcggucacagcagaccgucacaccaaacaucgguagccgccccugggugagaggccuaaguucuaggauuuccaucuauuggaccauugugaaaccuggggacauccuccugauaaacagcacgggaaaucuuauugccccacggggcuacuucaagauccgcaacgguaagucgucuauuaugcgauccgaugcgccgaucgggacuuguucaagugagugcaucacacccaauggaagcauuccuaacgacaaaccauuucagaaugucaacagaauaaccuauggcgcaugucccagguacguuaagcaaaauacucugaaauuggccacaggcaugcggaacgugccugaaaagcagacccgugggaucuucggagcuauugccgguuuuaucgagaauggcugggaagggaugguagauggaugguauggcuuccgccaccagaacuccgaggguacggggcaggcagcugaccucaaaucuacccaagccgcgauagaucagauuaauggcaagcugaacagauuaaucgagaaaacaaaugaaaaguuucaccagaucgagaaggaguucagcgaaguggaaggaaggauucaagaccuggagaaauacgucgaggauacuaagaucgaccucuggucauauaacgccgaacuucugguggcauuggagaaucagcauaccauugaucuaacagacagugaaaugaacaaacuguucgagaagacucggaaacagcuccgagaaaacgcugaggauaugggcaaugggugcuuuaagauauaccacaagugugacaacgccugcaucggauccauucgcaaugguaccuacgaccaugauguuuauagagacgaggcucugaacaauagguuccagaucaaaggcguggaacuuaagagcggguacaaagauuggauccuguggauuucuuuugccauaucaugcuucuugcucugugucgugcuguuaggauuuaucaugugggcaugccaaaagggcaacauucgguguaauaucugcauuuga

SEQ ID NO: 129144 - RNA, 1701 nt, Artificial Sequence
  derived and/or modified CDS sequence (opt3) from hemagglutinin__InfluenzaA__ABG80084
augaagaccaucauugcccugagcuacauacucugccuuguguucgcucagaaacugcccggcaacgacaauuccacagcaacuuuguguuuagggcaccaugccgucccuaacggaacgcugguuaagaccaucacaaaugaucaaauugaggugacuaacgcgaccgaacuuguacagucuucaaguacagguagaaucugcgacagcccacacaggauucucgauggcaaaaauuguacccugaucgacgcucuacugggggauccgcauugcgacggauuucagaacaaggagugggauuuguucguggaacgguccaaagccuauucuaauuguuaccccuaugacgucccugauuacgcaucgcuccgcucacugguggccagcaguggcacucuggaguuuauaaacgaagacuucaauuggacagguguugcucaggaugggaaguccuaugcaugcaagcgaggaucugugaacagcuuuuucucccgucucaauugguuacacaaacuggaguacaaguauccagcccuuaacgucaccaugcccaauaacggcaaauuugacaaguuguacaucuggggcgugcaucacccuucaacggauagugaccaaacuagccuguacguaagagcuucugggaggguuaccguguccacaaaacggucacagcagacugucauuccaaauaucggauuccgccccugggugagaggucuaagcaguggcauuucuaucuauuggaccauagugaagccuggggacauucuccugaucaacuccacaggaaaccuuauugccccaaggggcuacuuuaagauccggaaugguaaaagcucgaucaugcgcucugaugcgccgauugggaacuguuccucagagugcauaacccccaauggaaguaucccuaacgacaagccauuccagaaugucaaccgaauuacguauggcgcaugucccagauacguuaaacaaaauacucugaaguuggccacaggcaugaggaacgugccugaaaaacagacccgggggaucuuuggagcuauagccgguuucauugagaauggcugggaagggaugguagauggaugguauggcuuucgucaccagaacagcgaggguacugggcaggcagcugaccucaaguccacacaagccgcgaucgaucagaucaauggcaaacugaaccgcuuaauugagaagaccaaugaaaaguuccaucagaucgagaaagaguucucugaaguggaaggaaggauucaagaccuggagaaguacgucgaggauacgaaaauagaccucuggagcuauaacgccggccuucugguggcauuggaaaaucagcacaccaucgaucuaacagacucagagaugaacaagcuguuugaaagaacucggaaacagcuccgagagaacgcugaagauauggggaauggaugcuucaagauuuaccauaagugugacaacgccugcaucgguaguauccgcaauggcaccuacgaccacgauauuuauagagacgaggcucugaacaauagguuucagauaaaagggguugagcuuaaguccggauacaaagauuggauccuguggauuagcuucgccaucucuugcuuuuugcucugugugguccuguuaggcuucauuaugugggcaugccaaaaggguaacauccgguguaauauaugcaucuga

SEQ ID NO: 129145 - RNA, 1701 nt, Artificial Sequence
  derived and/or modified CDS sequence (opt3) from hemagglutinin__InfluenzaA__ABG80095
augaagaccaucauugcccugagcuacauacucugccuuguguucgcucagaaacugcccggcaacgacaauuccacagcaacuuuguguuuagggcaccaugccgucccuaacggaacgcugguuaagaccaucacaaaugaucaaauugaggugacuaacgcgaccgaacuuguacagucuucaaguacagguagaaucugcgacagcccacacaggauucucgauggcaaaaauuguacccugaucgacgcucuacugggggauccgcauugcgacggauuucagaacaaggagugggauuuguucguggaacgguccaaagccuauucuaauuguuaccccuaugacgucccugauuacgcaucgcuccgcucacugguggccagcaguggcacucuggaguuuauaaacgaagacuucaauuggacagguguugcucaggaugggaaguccuaugcaugcaagcgaggaucugugaacagcuuuuucucccgucucaauugguuacacaaacuggaguacaaguauccagcccuuaacgucaccaugcccaauaacggcaaaguggacaaguuguacaucuggggcguacaucacccuucaacggauagugaccaaacuagccuguacguuagagcuucugggagggugaccgucuccacaaaacggucacagcagacugugauuccaaauaucggauuucgccccugggugagaggucuaagcaguaggauuucuaucuauuggaccauagucaagccuggcgacauucuccugaucaacuccacagggaaccuuauugccccacggggauacuucaagauccgcaauggcaaaagcucgaucaugcgaucugaugcgccgauugguaacuguuccucagagugcauaacccccaaugggaguaucccuaacgacaagccauuucagaauguuaacagaauuacguauggagcaugucccagguacgugaaacaaaauacucugaaguuggccacaggcaugcggaacguaccugaaaaacagacccguggcaucuucggggcuauagccggauuuauugagaaugguugggaaggcaugguggaugggugguauggauuccgccaccagaacagcgagggcacuggucaggcagcugaccucaaguccacacaagccgcgaucgaucagaucaaugggaaacugaacagauuaauugagaagaccaaugaaaaguuucaucagaucgagaaagaguucucugaagucgaaggcaggauucaagaccuggagaaguacguggaggauacgaaaauagaccucuggagcuauaacgccggacuucugguugcauuggaaaaucagcacaccaucgaucuaacagacucagagaugaacaagcuguucgaacggacucgaaaacagcuccgcgagaacgcugaagauaugggcaaugggugcuuuaagauuuaccauaagugugacaacgccugcaucggaaguaucagaaaugguaccuacgaccacgauguguauagggacgaggcucugaacaaucgguuccagauuaaaggcgucgagcuuaaguccggguacaaagauuggauacuguggaucagcuuugccauuucuugcuucuugcucugugugguacuguuaggauuuaucaugugggcaugccaaaagggcaacauucgcuguaauaucugcauauga

SEQ ID NO: 129146 - RNA, 1701 nt, Artificial Sequence; identical to SEQ ID NO: 129072
  derived and/or modified CDS sequence (opt3) from hemagglutinin__InfluenzaA__ABG80106

SEQ ID NO: 129147 - RNA, 1701 nt, Artificial Sequence
  derived and/or modified CDS sequence (opt3) from hemagglutinin__InfluenzaA__ABG80117
augaagaccaucauugcccugagcuacauacucugccuuguguucgcucagaaacugcccggcaacgacaauuccacagcaacuuuguguuuagggcaccaugccgucccuaacggaacgcugguuaagaccaucacaaaugaucaaauugaggugacuaacgcgaccgaacuuguacagucuucaaguacagguagaaucugcgacagcccacacaggauucucgauggcaaaaauuguacccugaucgacgcucuacugggggauccgcauugcgacggauuucagaacaaggagugggauuuguucguggaacgguccaaagccuauucuaauuguuaccccuaugacgucccugauuacgcaucgcuccgcucacugguggccagcaguggcacucuggaguuuauaaacgaagacuucaauuggacagguguugcucaggaugggaaguccuaugcaugcaagcgaggaucugugaacagcuuuuucucccgucucaauugguuacacaaacuggaguacaaguauccagcccuuaacgucaccaugcccaauaacggcaaauuugacaaguuguacaucuggggcgugcaucacccuucaacggauagugaccaaacuagccuguacguaagagcuucugggaggguuaccguguccacaaaacggucacagcagacugucauuccaaauaucggauuccgccccugggugagaggucuaagcaguaggauuucuaucuauuggaccauagugaagccuggcgacauucuccugaucaacuccacagggaaccuuauugccccacggggauacuuuaagauccgcaauggcaaaagcucgaucaugcgaucugaugcgccgauugguaacuguuccucagagugcauaacccccaaugggaguaucccuaacgacaagccauuccagaaugucaacagaauuacguauggagcaugucccagguacguuaaacaaaauacucugaaguuggccacaggcaugcggaacgugccuguaaaacagacccguggcaucuuuggggcuauagccggauucauugaaaaugguugggagggcaugguggaugggugguauggauuucgccaccagaacagcgaaggcacuggucaggcagcugaccucaaguccacacaagccgcgaucgaucagaucaaugggaaacugaacagauuaauugagaagaccaaugagaaguuccaucagaucgaaaaagaguucucugaagucgagggcaggauucaagaccuggaaaaguacguggaggauacgaaaauagaccucuggagcuauaacgccggacuucugguugcauuggagaaucagcacaccaucgaucuaacagacucagaaaugaacaagcuguuugagcggacucgaaaacagcuccgcgaaaacgcugaggauaugggcaaugggugcuucaagauuuaccauaagugugacaacgccugcaucggaaguaucagaaaugguaccuacgaccacgauguguauagggacgaagcucugaacaaucgguuucagauuaaaggcgucgagcuuaaguccggguacaaagauuggauacuguggaucagcuucgccauuucuugcuuuuugcucugugugguacuguuaggauucaucaugugggcaugccaaaagggcaacauucgcuguaauaucugcauauga

SEQ ID NO: 129148 - RNA, 1701 nt, Artificial Sequence
  derived and/or modified CDS sequence (opt3) from hemagglutinin__InfluenzaA__ABG80128
augaagaccaucauugcccugagcuacauacucugccuuguguucgcucagaaacugcccggcaacgacaauuccacagcaacuuuguguuuagggcaccaugccgucccuaacggaacgcugguuaagaccaucacaaaugauagaauugaggugacuaacgcgaccgaacuuguacaaucuucaaguacagguaggaucugcgacagcccacaccggauucucgauggcaaaaauuguacccugaucgacgcucuacugggggauccgcauugcgacggauuucagaacaaggagugggauuuguucguggaacgcuccaaagccuauucuaauuguuaccccuaugacgucccugauuacgcaucgcuccgaucacugguggccagcaguggcacucuggaguuuauaaacgaagacuucaauuggacagguguugcucaggaugggaaguccuaugcaugcaagcguggaucugugaacagcuuuuucuccagacucaauugguuacacaaacuggaguacaaguauccagcccuuaacgucaccaugcccaauaacggcaaauuugacaaguuguacaucuggggcgugcaucacccuucaacggauagugaccagacuagccuguacguaagggcuucugggcggguuaccguguccacaaaacgcucacaacagacugucauuccaaauaucggauucagacccugggugaggggucuaagcagucggauuucuaucuauuggaccauagugaagccuggcgacauucuccugaucaacuccacagggaaccuuauugccccacgcggauacuuuaagauccgaaauggcaaaagcucgaucaugagaucugaugcgccgauugguaacuguuccucagagugcauaacccccaaugggaguaucccuaacgacaagccauuccagaaugucaacaggauuacguauggagcauguccccgguacguuaaacagaauacucugaaguuggccacaggcaugcguaacgugccugaaaaacaaacccgcggcaucuuuggggcuauagccggauucauugagaaugguugggaaggcaugguagaugggugguauggauuuagacaccagaacagcgagggcacuggucaggcagcugaccucaaguccacacaggccgcgaucgaucaaaucaaugggaaacugaacagguuaauugagaagaccaaugaaaaguuccaucagaucgagaaagaguucucugaaguggaaggccggauucaggaccuggagaaguacgucgaggauacgaaaauagaccucuggagcuauaacgccggacuucugguggcauuggaaaaucaacacaccaucgaucuaacagacucagagaugaacaagcuguuugaacgaacucgcaaacagcucagagagaacgcugaagauaugggcaaugggugcuucaagauuuaccauaagugugacaacgccugcaucggaaguaucaggaaugguaccuacgaccacgauguuuaucgggacgaggcucugaacaaucgcuuucagauuaaaggcguggagcuuaaguccggguacaaagauuggauacuguggaucagcuucgccauuucuugcuuuuugcucugugucgugcuguuaggauucaucaugugggcaugccagaagggcaacauuagauguaauaucugcauauga

SEQ ID NO: 129149 - RNA, 1701 nt, Artificial Sequence
  derived and/or modified CDS sequence (opt3) from hemagglutinin__InfluenzaA__ABG80139
augaagaccaucauugcccugagcuacauacucugccuuguguucgcucagaaacugcccggcaacgacaauuccacagcaacuuuguguuuagggcaccaugccgucccuaacggaacgcugguuaagaccaucacaaaugaucaaauugaggugacuaacgcgaccgaacuuguacagucuucaaguacagguagaaucugcgacagcccacacaggauucucgauggcaaaaauuguacccugaucgacgcucuacugggggauccgcauugcgacggauuucagaacaaggagugggauuuguucguggaacgguccaaagccuauucuaauuguuaccccuaugacgucccugauuacgcaucgcuccgcucacugguggccagcaguggcacucuggaguuuauaaacgaagacuucaauuggacagguguugcucaggaugggaaguccuaugcaugcaagcgaggaucugugaacagcuuuuucucccgucucaauugguuacacaaacuggaguacaaguauccagcccuuaacgucaccaugcccaauaacggcaaauuugacaaguuguacaucuggggcgugcaucacccuucaacggauagugaccaaacuagccuguacguaagagcuucugggaggguuaccguguccacaaaacggucacagcagacugucauuccaaauaucggauuccgccccugggugagaggucuaagcaguaggauuucuaucuauuggaccauagugaagccuggcgacauucuccugaucaacuccacagggaaccuuauugccccacggggauacuuuaagauccgcaauggcaaaagcucgaucaugcgaucugaugcgccgauugguaacuguuccuaugagugcauaacccccaaugggucaaucccuaacgacaagccauuccagaaugucaacagaauuacguacggagcaugucccagguauguuaaacaaaauacucugaaguuggccacaggcaugcggaacgugccugaaaaacagacccguggcaucuuuggggcuauagccggauucauugagaaugguugggaaggcaugguagaugggugguacggauuucgccaccagaacagugagggcacuggucaggcagcugaccucaagagcacacaagccgcgaucgaucagaucaaugggaaacugaacagauuaauugagaagaccaaugaaaaguuccaucagaucgagaaagaguucuccgaaguggaaggcaggauucaagaccuggagaaguaugucgaggauacgaaaauagaccucuggucuuacaacgccggacuucugguggcauuggaaaaucagcacaccaucgaucuaacagacagcgagaugaacaagcuguuugaacggacucgaaaacagcuccgcgagaacgcugaagauaugggcaaugggugcuucaagauuuaccauaagugugacaauaccugcaucggaucaaucagaaacgguacauaugaccacgauguuuacagggacgaggcccugaacaaucgguuucagauuaaaggcguggagcuuaagaguggguauaaagauuggauacuguggaucuccuucgcuauuagcugcuuuuugcucugugucgugcuguuaggauucaucaugugggccugccaaaagggcaacauucgcuguaauaucugcauauga

SEQ ID NO: 129150 - RNA, 1701 nt, Artificial Sequence
  derived and/or modified CDS sequence (opt3) from hemagglutinin__InfluenzaA__ABG80150
augaagaccaucauugcccugagcuacauacucugccuuguguucgcucagaaacugcccggcaacgacaauuccacagcaacuuuguguuuagggcaccaugccgucccuaacggaacgcugguuaagaccaucacaaaugaucaaauugaggugacuaacgcgaccgaacuuguacagucuucaaguacagguagaaucugcgacagcccacacaggauucucgauggcaaaaauuguacccugaucgacgcucuacugggggauccgcauugcgacggauuucagaacaaggagugggauuuguucguggaacgguccaaagccuauucuaauuguuaccccuaugacgucccugauuacgcaucgcuccgcucacugguggccagcaguggcacucuggaguuuauaaacgaaaauuucaacuggacagguguugcucaggacgggaaguccuaugcaugcaagcgaggaucugugaauagcuuuuucucccgucucaacugguuacacaaacuggaguacaaguauccagcccuuaaugucaccaugcccaacaauggcaaauuugauaaguuguacaucuggggcgugcaucacccuucaacggacagugaucaaacuagccuguacguaagagcuucugggaggguuaccguguccacaaaacggucacagcagacugucauuccaaacaucggauuccgccccugggugagaggucuaagcaguggcauuucuaucuauuggaccauagugaagccuggggacauucuccugaucaacuccacaggaaaucuuauugccccaaggggcuacuuuaagauccggaacgguaaaagcucgaucaugcgcucugacgcgccgauugggaauuguuccucagagugcauaacccccaacggaaguaucccuaaugauaagccauuccagaacgucaaucgaauuacguauggcgcaugucccagauacguuaaacaaaacacucugaaguuggccacaggcaugaggaaugugccugaaaaacagacccgggggaucuuuggagcuauagccgguuucauugagaacggcugggaagggaugguagacggaugguauggcuuucgucaccagaauagcgaggguacugggcaggcagcugaucucaaguccacacaagccgcgaucgaccagaucaacggcaaacugaaucgcuuaauugagaagaccaacgaaaaguuccaucagaucgagaaagaguucucugaaguggaaggaaggauucaagaucuggagaaguacgucgaggacacgaaaauagaucucuggagcuauaaugccggccuucugguggcauuggaaaaccagcacaccaucgaccuaacagauucagagaugaacaagcuguuugaaagaacucggaaacagcuccgagagaaugcugaagacauggggaacggaugcuucaagauuuaccauaagugugauaaugccugcaucgguaguauccgcaacggcaccuacgaccacgacguuuauagagaugaggcucugaauaacagguuucagauuaaagggguggagcuuaaguccggauacaaagacuggauacuguggaucagcuucgccauuucuugcuuuuugcucugugucgugcuguuaggcuucaucaugugggcaugccaaaaggguaauauucgguguaacaucugcauauga

SEQ ID NO: 129151 - RNA, 1701 nt, Artificial Sequence
  derived and/or modified CDS sequence (opt3) from hemagglutinin__InfluenzaA__ABG80161
augaagaccaucauugcccugagcuacauauccugccucguguucgcucagaaacuucccggcaacgacaauucuacagcaacucuguguuuggggcaccaugccgucccuaacggaacguuaguuaagaccaucacaaaugaucaaauugaggugacuaacgcgaccgaacugguacagucaaguagcacagguagaaucugcgacuccccacacaggauucuagauggcaaaaauuguacccucaucgacgcucugcuuggggauccgcauugcgacggauuucagaacaaggagugggaucuguucguggaacggucuaaagccuauucgaauuguuaccccuaugacgucccugauuacgcaucauugcgcagccucguggccaguuccggcacucuggaguuuauaaacgaagacuucaauuggacagguguugcucaggaugggaagucuuaugcaugcaagcgaggaagcgugaacuccuuuuucucacgucugaauuggcuccacaaauuagaguacaaguauccagcccugaacgucaccaugcccaauaacggcaaauuugacaagcuguacaucuggggcgugcaucacccuaguacggauagcgaccaaacuucuuuguacguacaggcuuccgggagaguuaccgugucaacaaaaaggagccagcagacugucauuccaaauaucggauuccggcccugggugcgcggucugaguucuagaauuuccaucuauuggaccauagugaagccuggcgacauucuacucaucaacagcacagggaaccugauugccccaaggggauacuuuaagauccggaauggcaaaucgucuaucaugcgcuccgaugcgccgauugguaacuguucaagugagugcauaacccccaaugggagcaucccuaacgacaagccauuccaaaaugucaaccgaauuacguauggagcaugucccagauacguuaaacagaauacucuuaagcuggccacaggcaugaggaacgugccugaaaaacagacccggggcaucuuuggggcuauagccggauucauugagaaugguugggaaggcaugguagaugggugguauggauuucgucaccagaacuccgagggcacuggucaagcagcugacuugaagucuacacaggccgcgaucgaucagaucaaugggaaacucaaccgccugauugagaagaccaaugaaaaguuccaucaaaucgagaaagaguucagcgaaguggaaggcaggauucaggacuuagagaaguacgucgaggauacgaaaauagaccuguggucauauaacgccggacuccuuguggcacuggaaaaucagcacaccaucgauuugacagacagugagaugaacaagcuauuugaaagaacucggaaacagcugcgagagaacgcugaagauaugggcaaugggugcuucaagauuuaccauaagugugacaacgccugcaucggauccauccgcaaugguaccuacgaccacgauguuuauagagacgaggcucucaacaauagguuucaaauuaaaggcguggagcuuaagagcggguacaaagauuggauacuuuggaucucuuucgccauuucaugcuuucuguugugugucgugcuccugggauucaucaugugggcaugccagaagggcaacauucgguguaauaucugcauauga

SEQ ID NO: 129152 - RNA, 1698 nt, Artificial Sequence
  derived and/or modified CDS sequence (opt3) from hemagglutinin__InfluenzaA__ABG80172
augaaggugaaacugcucguccuucugugcaccuucacagccacuuacgcugacacgaucuguauuggcuaucacgcaaacaauagcaccgauacaguugacacuguguuggagaagaacguaaccgugacacauuccgucaauuuacuggaagauucucacaacgggaaacuaugccuccugaagggaauagcgccccuucagcuggguaauuguucaguggccggcuggaucuuggggaacccugagugcgaacuccugauuaguaaagagagcugguccuacaucguugaaaccccaaauccggagaacggaacuuguuaucccggcuacuuugcugacuaugaggaacugagagagcaacucucuucggugagcucauucgaaagguuugagauuuucccuaaggagaguuccuggccaaaucauacagucaccggugugucugccagcugcucccacaacgggaagucaaguuuuuaccggaauuuacuguggcuuacgggcaaaaacggauuguaucccaaucugagcaagucuuacgcaaacaauaaagaaaaggagguucuaguacucuggggcgugcaucacccuccaaacaucggggaucagcgcgcccuguaccacacugaaaacgcuuaugucuccguggugucaagccauuacagucgacguuucacccccgagauagcaaaaagaccuaaggucagggaccaggaaggacggaucaauuauuacuggacacuucuggagccaggugauacuauuaucuuugaggccaacggcaauuugauugcuccgcgcuaugccuucgcgcucucuagaggguuuggauccggcaucauaaccagcaacgcacccauggacgaaugugaugccaagugccagacaccucaaggugcuauuaauucgucucugccauuccagaacguucaccccgugaccaucggggaguguccuaaauacguaagguccgccaaguuacggauggugacgggacugcgcaauauuccaucaauccagagucgaggccucuuuggcgcaaucgcuggguucauugaaggagguuggacuggcauggucgacgggugguauggauaccaucaccagaacgagcaaggcagcgguuacgccgcggaucagaaauccacacagaaugccauaaacgggaucaccaauaaggugaacucuguuauugaaaagaugaauacucaguuuacagcagugggcaaagaguucaacaaacuugagagaaggauggaaaaucugaacaagaaggucgacgauggauucuuggacaucuggaccuauaacgcugagcuacuggugcuccuggaaaaugagcggacgcuugacuuucacaacagcaauguuaaaaaccuguacgaaaagguaaaaucacaauugaagaauaacgccaaagagauaggcaaugggugcuucgaguuuuaucauaaguguaacaaugaaugcauggagagugugaagaacggaaccuacgauuaucccaaauacuccgaagagagcaagcucaaucgugagaaaauugacggugucaagcuggaaucuaugggcguguaucagaucuuagcuaucuacucaacagucgccaguagccuggugcuacucguuucccugggggcaauuucuuucuggaugugcucgaacggaagccuucagugucgcaucugcauuuga

SEQ ID NO: 129153 - RNA, 1698 nt, Artificial Sequence
  derived and/or modified CDS sequence (opt3) from hemagglutinin__InfluenzaA__ABG80183
augaaggugaaacugcucguccuucugugcaccuucacagccacuuacgcugacacgaucuguauuggcuaucacgcaaacaauagcaccgauacaguugacacuguguuggagaagaacguaaccgugacacauuccgucaauuuacuggaagauucucacaacgggaaacuaugccuccugaagggaauagcgccccuucagcuggguaauuguucaguggccggcuggaucuuggggaacccugagugcgaacuccugauuaguaaagagagcugguccuacaucguugaaaccccaaauccggagaacggaacuuguuaucccggcuacuuugcugacuaugaggaacugagagagcaacucucuucggugagcucauucgaaagguuugagauuuucccuaaggagaguuccuggccaaaucauacagucaccggugugucugccagcugcucccacaacgggaagucaaguuuuuaccggaauuuacuguggcuuacgggcaaaaacggauuguaucccaaucugagcaagucuuacgcaaacaauaaagaaaaggagguucuaguacucuggggcgugcaucacccuccaaacaucgggggacagcgcgcccuguaccacacugaaaacgcuuaugucuccguggugucaagccauuacagucgacguuucacccccgagauagcaaaaagaccuaaggucagggaucaggaaggucggaucaauuauuacuggacacuucuggagccaggcgacacuauuaucuuugaggccaacgggaauuugauugcuccgcgcuaugccuucgcgcucucuagaggauuuggcuccgguaucauaaccagcaacgcacccauggaugaaugugacgccaagugccagacaccucaaggggcuauuaauucgucucugccauuccagaacguucaccccgugaccaucggagaguguccuaaauacguaagguccgccaaguuacggauggugacgggccugcgcaauauuccaucaauccagagucgaggccucuuuggggcaaucgcuggauucauugaagguggcuggacugggauggucgauggaugguauggcuaccaucaccagaacgagcaagguagcggguacgccgcggaccagaaauccacacagaaugccauaaacggcaucaccaauaaggugaacucuguuauugaaaagaugaauacucaguuuacagcagugggaaaagaguucaacaaacuugagagaaggauggaaaaucugaacaagaaggucgaugacggcuucuuggauaucuggaccuauaacgcugagcuacuggugcuccuggaaaaugagcggacgcuugacuuucacgacagcaacguuaaaaaucuguacgaaaagguaaaaucacaauugaagaacaaugccaaagagauagggaacggaugcuucgaguuuuaucauaaguguaauaacgaaugcauggagagugugaagaaugguaccuacgauuaucccaaauacuccgaagagagcaagcucaaccgugagaaaauugacggcgucaagcuggaaucuauggggguguaucagaucuuagcuaucuacucaacagucgccaguagccuggugcuacucguuucccugggagcaauuucuuucuggaugugcucgaauggcagccuucagugucgcaucugcauuuga

SEQ ID NO: 129154 - RNA, 1701 nt, Artificial Sequence
  derived and/or modified CDS sequence (opt3) from hemagglutinin__InfluenzaA__ABG80194
augaagaccaucauugcccugagcuacauacucugccuuguguucgcucagaaacugcccgucaacgacaauuccacagcaacuuuguguuuaggccaccaugccguuccuaacgggacgcuggugaagaccaucacaaaugaucacauugagguaacuaacgcgaccgaacuugugcaaucuucaaguacaggaagaaucugcgacagcccacaucagauucucgauggugagaauuguacccugaucgacgcucuacugggcgauccgcacugcgacggguuucagaacaaagaauggaauuuguucgucgagagguccacugccuauucuaacuguuaccccuaugaugugccugacuacgcaucgcuccggucacugguugccagcaguggaacacuggaauuuaauaacgaguccuucaauuggaccggcguggcucagaacgguacgucuagcgcaugcaagcgccgauccauaaaaucauuuuucagucgucucaauugguuacaucaacugaaguauaaguacccagcccuuaacgucacuaugcccaauaacgagaaauuugauaaguuguauaucuggggagugcaccacccuagcaccgacucugaucagauuucccuguacgcucaggccucagggagaguaacaguuagcacuaaaaggagucagcaaaccgugaucccaaacauuggcucucggcccuggguccgcggcguguccagcaucauaucgauuuacuggacaaucgugaagccuggggacauucuacucaucaauucuaccggaaaccugaucgcgccaagagguuauuucaaaauuagguccggcaagucaaguauaaugcggagcaaugcaccgaucgggaaguguaacuccgaaugcauuacgcccaauggaucuaucccuaacgauaaaccauuucagaaugucaaccgcauaacuuacggcgccuguccccgauauguuaagcagaauacacuuaaacuggcuaccgguaugagaaacgugccugagaagcagacuagggggauuuucggagccaucgcaggcuuuaucgaaaauggcugggaggggaugguagacggaugguacgguuuccggcaucaaaacagcgagggcacagggcaggcugccgacuugaaaucaacccaggcggccauuaaucaaaucaacggaaagcucaaucgucugauugagaaaacgaacgaaaaguuucaccagauagaaaaggaguucagugaaguggagggccgcauccaggauuuagagaaauaugucgaagacaccaagauugaucugugguccuacaacgcagagcuccuuguggcucuggaaaaucagcauacaaucgacuugacugauagcgagaugaacaaacuauucgaaagaaccaggaagcaacugcgggagaaugccgaggacauggguaacgggugcuuuaaaaucuaucacaagugugauaaugcuugcauuggcucuauacgaaacggaacauacgaccacgauguuuaccgcgacgaagcccucaauaacagauuccagaucaagggcguggagcugaaaucaggguauaaggauuggauucuuuggaucaguuuugcaauuagcugcuuccuguugugugucgugcuccugggauuuaucaugugggccugccagaaagguaauauaagguguaacaucugcauuuga

SEQ ID NO: 129155 - RNA, 1701 nt, Artificial Sequence
  derived and/or modified CDS sequence (opt3) from hemagglutinin__InfluenzaA__ABG80205
augaagaccaucauugcccugagcuacauacucugccuuguguucgcucagaaacugcccggcaacgacaauuccacagcaacuuuguguuuagggcaccaugccgucccuaacggaacgcugguuaagaccaucacaaaugaucaaauugaggugacuaacgcgaccgaacuuguacagucuucaaguacagguggcaucugcgacagcccacaccagauucucgauggggagaauuguacccugaucgacgcucuacugggagauccgcauugcgacggcuuucagaacaaagaaugggauuuguucguggagagauccaaggccuauucuaauuguuaccccuaugacgucccugauuacgcaucgcucaggucacugguggccagcagugguacucuggaauuuaacaaugaguccuucaacuggacagggguugcucaaaauggaaccucuagcgcaugcaaacggcgcuccaacaagucauuuuucagucgacucaauugguuacaccagcugaaguauaaauacccagcccuuaacguggcuaugcccaauaacgagaaguuugacaaauuguauauauggggcguccaucacccuagcacggauucugaccagaucucccuguacgcccaggcgccaggccgugugacuguaucaaccaagagaagccaacagacaguuauucccaacaucgggaguaggccuugggugcggggagucucuucccgcauuagcaucuacuggacuauagugaaaccaggugauauucuacucaucaauuguaccggcaaccugauugcaccgagaggguauuucaagaucaggucgggaaagucuuccaucaugcggucagacgccaguauuggcaaaugcaauagcgaauguauaacacccaacgguuccaucccuaaugacaagccauuucagaacgugaaucgcauuaccuacggggcuugcccccgauaugucaaacagaacacgcuuaagcuggccacuggaaugagaaauguuccugagaaacaaacaaggggcaucuucggcgcaauagcuggguuuauugaaaacggaugggaggguaugguggauggcugguacggguuccggcaccaaaauucugagggaaccggccaggccgcggacuugaaaagcacucaggccgcaaucaaccagaucaaugguaaacucaaccgucugauugaaaagacaaaugagaaguuucaucagaucgaaaaagaguucucagaaguagaggggcgcauucaggauuuagagaaguauguggaagacaccaaaauaaaccuguggaguuacaacgcugagcuccuugucgcccuggaaaaucaacacacgaucgauuugaccgacuccgagaugaacaagcuauucgaaagaacaaagaagcagcugagggagaaugcugaggauaugggcaacggauguuuuaagauuuaucauaaaugcgacaaugccugcaucggcagcauccggaacgggacuuacgaucacgacguguaccgagaugaagcacucaauaaccgcuuccagauuaagggaguugagcugaaaucugguuauaaggacuggauacuuuggaucucauuugccauuaguuguuuccuguugugcgugguccuccugggcuuuaucaugugggcuugucagaaagggaauauuagaugcaacaucuguauauga

SEQ ID NO: 129156 - RNA, 1701 nt, Artificial Sequence
  derived and/or modified CDS sequence (opt3) from hemagglutinin__InfluenzaA__ABG80216
augaagaccaucauugcccugagcuacauacucugccuuguguucgcucagaaacugcccgucaacgacaauuccacagcaacuuuguguuuaggccaccaugccguuccuaacgggacgcuggugaagaccaucacaaaugaucacauugagguaacuaacgcgaccgaacuugugcaaucuucaccaacaggaagaaucugcgacaguccgcaucagauucucgauggugagaauuguacccugaucgacgcucuacugggcgauccccacugcgacggguuucagaacaaagaaugggauuuguucgucgagaggagcacugccuauuccaauuguuacccuuaugacgugccagauuacgcaucucuccggucgcugguugccucaagcggaacacuggaauuuaacaaugagaguuucaacuggaccggcguggcucagaaugguacguccucugcaugcaagcgccgaagcauaaaauccuuuuucucacgucucaacugguuacaucaacugaaguauaaguaccccgcccuuaaugucacuaugccuaacaaugagaaauuugacaaguuguauaucuggggagugcaccacccaaguaccgauagcgaccagauuucucuguacgcucaggcccccgggagaguaacaguuuccacuaaaaggucacagcaaaccgugaucccuaacauuggcagccggccauggguccgcggcgugaguucuagaaucuccauauacuggacaauugugaagccgggggauauccuacucauuaacagcaccggaaaucugaucgcgcccagggguuauuucaaaauccggucgggcaagucuuccauuaugcgcucaaacacgccuauagggaaguguaauagugaaugcaucacuccaaacggaagcauucccaaugacaaaccuuuucagaacgucaaucgaaucacauacggcgcauguccaagauauguuaagcagaacacccuuaaacuggccacugguaugaggaaugugcccgagaagcagacacgggggauauucggagcuauugccggcuuuaucgaaaacggcugggaggggaugguagacggaugguacgguuuccgucaucaaaauuccgagggcaccgggcaggcagcugauuugaaaucuacgcaggccgcgaucaaccaaauuaauggaaagcucaaccgccugaucgagaaaaccaaugaaaaguuucaccagauugaaaaggaguucagcgaaguggagggcagaauacaggacuuagagaaauaugucgaagauacaaagaucgaccuguggucauacaacgccgagcuccuuguggcacuggaaaaccagcauacuauugauuugaccgacagugagaugaauaaacuauucgaaaggacacggaagcaacugcgagagaacgcugaggauauggguaaugggugcuuuaaaaucuaucacaagugugacaacgccugcaucggcuccauucgcaauggaacuuacgaucacgacguuuacagagaugaagcucucaacaauagguuccagauaaagggcguggagcugaaaagcggguauaaggacuggauccuuuggauuucuuuugccaucucaugcuuccuguugugugucgugcuccugggauuuauuaugugggcaugccagaaagguaacauccgguguaauauaugcaucuga

SEQ ID NO: 129157 - RNA, 1701 nt, Artificial Sequence; identical to SEQ ID NO: 128688
  derived and/or modified CDS sequence (opt3) from hemagglutinin__InfluenzaA__ABG80227

SEQ ID NO: 129158 - RNA, 1701 nt, Artificial Sequence; identical to SEQ ID NO: 128564
  derived and/or modified CDS sequence (opt3) from hemagglutinin__InfluenzaA__ABG80238

SEQ ID NO: 129159 - RNA, 1701 nt, Artificial Sequence; identical to SEQ ID NO: 128564
  derived and/or modified CDS sequence (opt3) from hemagglutinin__InfluenzaA__ABG80249

SEQ ID NO: 129160 - RNA, 1701 nt, Artificial Sequence; identical to SEQ ID NO: 128564
  derived and/or modified CDS sequence (opt3) from hemagglutinin__InfluenzaA__ABG80260

SEQ ID NO: 129161 - RNA, 1701 nt, Artificial Sequence
  derived and/or modified CDS sequence (opt3) from hemagglutinin__InfluenzaA__ABG80271
augaagaccaucauugcccugagcuacauacucugccuuguguucgcucagaaacugcccggcaacgacaauuccacagcaacuuuguguuuagggcaccaugccgucccuaacggaacgguugugaagaccaucacaaaugaucaaauugagguaacuaacgcgaccgaacuggugcagucuucaaguacagguggcaucugcgacagcccacaccagauucuagauggggagaauuguacccucauggacgcucugcuuggagauccgcagugcgacggcuuucaaaacaaaaagugggaucuguucgucgaaagauccaaagccuauucuaauuguuaccccuaugacgugccugauuacgcaucguugaggucacucguugccagcagugguacucuggaguuuaacaaugaauccuucaacuggacaggggugacccagaauggaacgucuagcgcuugcaagcggcgcuccaacaauucauuuuucagucgacugaacuggcucacucauuuaaaguuuaaauauccagcacugaaugucaccaugcccaacaacgagaaguucgacaaacuuuacaucuggggcgugcaccauccuggcacagauaaugaccagaucagcuuguaugcccaggcuucugggcguauaacuguauccaccaagagaucacaacagacaguuauuccaaacaucggaagcaggccccgggugcgcgauauuccuaguagaaucucuauauacuggaccauugucaaaccaggugacauccugcuaauuaauuccacgggcaaccucaucgccccgaggggguacuuuaagauccggagcggaaagucgucuauuaugcgcuccgacgcgcccauaggcaaauguaauucagagugcaucacuccuaacgguaguauuccaaaugauaagcccuuccagaacgugaaucgaaucacauauggggcauguccuagauacgugaaacagaacacccugaaacuugccacuggaaugaggaaugucccagaaaaacaaacacggggcauauuuggcgcuauugccggguucaucgagaacggaugggaagguaugguugacggcugguauggguuucgucaccagaauagcgagggaaccggccaggcagcugaucugaaguccacgcaagccgcgaucaaccagauuaaugguaaauugaaccgccucaucgggaagaccaacgagaaguuccaccagauugaaaaagaguucucugaaguggagggcagaauacaggaccuggaaaaguacguagaggauacaaaaaucgacuuauggagcuauaaugccgagcugcucguggcacuugaaaaccaacauacuauugaucugaccgacucagagaugaauaaguuguuugaaaggacaaagaagcagcuacgggagaacgcugaagauaugggaaauggcugcuucaagaucuaccacaaaugugacaacgccugcaucgggaguauucgaaauggaacuuaugaucaugacgucuaccgcgacgaggcucugaacaauagauuucagauaaaggguguggagcucaaauccggcuacaaggauuggauccuguggauuagcuucgccaucucuugcuuucuucuguguguugcauugcucggguucauuaugugggccugccagaaaggaaacaucagguguaauauaugcaucuga

SEQ ID NO: 129162 - RNA, 1701 nt, Artificial Sequence; identical to SEQ ID NO: 128639
  derived and/or modified CDS sequence (opt3) from hemagglutinin__InfluenzaA__ABG80282

SEQ ID NO: 129163 - RNA, 1701 nt, Artificial Sequence; identical to SEQ ID NO: 128291
  derived and/or modified CDS sequence (opt3) from hemagglutinin__InfluenzaA__ABG80293

SEQ ID NO: 129164 - RNA, 1701 nt, Artificial Sequence
  derived and/or modified CDS sequence (opt3) from hemagglutinin__InfluenzaA__ABG80304
augaagaccaucauugcccugagcuacauacucugccuuguguucgcucagaaacugcccggcaacgacaauuccacagcaacuuuguguuuagggcaccaugccgucccuaacggaacgaucguuaagaccauuacaaaugaucaaaucgaggugacuaacgcgaccgaacugguacagucuucaaguacagguggcauuugcgacagcccacaccagauccuagauggggagaauuguacccucauagacgcucugcuuggagauccgcagugcgacggcuuucaaaacaaaaagugggaucuguucguggaaagauccaaagccuauucuaauuguuaccccuaugacgucccugauuacgcaucguugaggucacucguggccagcagugguacucuggaguuuaacaaugaauccuucaacuggacagggguuacccagaauggaacgucuagcgcuugcaagcggcgcuccaacaauucauuuuucagucgacugaacuggcucacucauuuaaaguuuaaauauccagcacugaaugugaccaugcccaacaacgagaaguucgacaaacuuuacaucuggggcguccaccauccuggcacaaauaacgaucagauuaauuuguaugcccaggcuagcgggcguaucacugugucuaccaagagaucccaacagacaguaauuccaaacaucggaucaaggccccggguucgcgacauaccuagcagaauuaguaucuacuggaccauugugaaaccaggugauauccugcuaaucaauucuacgggcaaccucauugccccgaggggguacuuuaagauacgguccggaaagagcucgaucaugcgcucugacgcgcccauuggcaaauguaauuccgagugcaucacuccuaacgguucaauaccaaaugacaagcccuuccagaacgucaaucgaauuacauauggggcauguccuagauacgugaaacagaacacccugaagcuggccacuggaaugaggaaugugccagaaaaacaaacacggggcaucuuuggcgcuaucgccggguucauugagaacggaugggaagguauggucgauggcugguauggguuucgucaccagaauagugagggaaucggccaggcagcugaccuuaagagcacccaagccgcgauuaaccagauaaacgguaaauugaaucgccucaucgggaagacgaacgagaaguuccaccagauugaaaaagaguucuccgaaguugagggcagaauccaggaucuggaaaaguacguggaggacaccaaaaucgauuuauggucuuauaaugccgagcugcucguagcacuugaaaaccaacauacaauugaccugacugauagcgagaugaauaaguuguuugaaaggaccaaaaagcagcuacgggagaacgcugaagacaugggaaauggcugcuucaagauauaccacaaaugugauaacgccugcaucgggucaauucgaaauggaacauaugaccaugauguguaccgcgacgaggcucugaacaauagauuucagaucaagggugucgagcucaaaaguggcuacaaggacuggauucuguggaucuccuucgccauaagcugcuuucuucuguguguggcauugcucggguucaucaugugggccugccagaaaggaaacauuagguguaauaucugcauuuga

SEQ ID NO: 129165 - RNA, 1701 nt, Artificial Sequence
  derived and/or modified CDS sequence (opt3) from hemagglutinin__InfluenzaA__ABG80315
augaagaccaucauugcccugagcuacauacucugccuuguguucgcucagaaacugcccggcaacgacaauuccacagcaacuuuguguuuagggcaccaugccgucccuaacggaacgaucguuaagaccauuacaaaugaucaaaucgaggugacuaacgcgaccgaacugauucagucuucaaguacagguggcaucugcgacagcccacaccagauacuagauggggagaauuguacccucaucgacgcucugcuuggagauccgcagugcgacggcuuucaaaacaaaaagugggaucuguucguagaaagauccaaagccuauucuaauuguuaccccuaugacgugccugauuacgcaucguugaggucacucgucgccagcagugguacucuggaguuuaacaaugaauccuucaacuggacaggggugacccagaauggaacgucuagcgcuugcaagcggcgcuccaacaauucauuuuucagucgacugaacuggcucacucauuuaaaguuuaaauauccagcacugaauguuaccaugcccaacaacgagaaguucgacaaacuuuacauuuggggcgugcaccauccuggcacagauaaugaccagaucagcuuguaugcccaggcuucugggcguauuacugucuccaccaagagaucacaacagacagugaucccaaacauaggaagcaggccccggguacgcgauauuccuaguagaaucucuauuuacuggaccaucguuaaaccaggugacaugcugcuaaucaauuccacgggcaaccucauugccccgaggggguacuuuaagauacggagcggaaagucgucuaucaugcgcuccgacgcgcccauuggcaaauguaauucagagugcaucacuccuaacgguaguauaccaaaugauaagcccuuccagaacgugaaucgaauuacauauggggcauguccuagauacgucaaacagaacacccugaaacuugccacuggaaugaggaaugugccagaaaaacaaacacggggcaucuuuggcgcuaucgccggguucauugagaacggaugggaagguaugguggacggcugguauggguuucgucaccagaauagcgagggaaccggccaggcagcugaucugaaguccacgcaagccgcgaucaaccagauuaaugguaaauugaaccgccucauagggaagaccaacgagaaguuccaccagaucgaaaaagaguucucugaagucgagggcaggauucaggaccuggaaaaguacguugaggauacaaaaaucgacuuauggagcuauaaugccgagcugcucguggcacuugaaaaccaacauacuaucgaucugaccgacucagagaugaauaaguuguuugaaagaacaaagaagcagcuacgggagaacgcugaagauaugggaaauggcugcuucaagauuuaccacaaaugugacaacgccugcauagggaguauccgaaauggaacuuaugaucaugacguauaccgcgacgaggcucugaacaauagauuucagauuaaggguguggagcucaaauccggcuacaaggauuggauccuguggauuagcuucgccaucucuugcuuucuucugugugucgcauugcucggguucauaaugugggccugccagaaaggaaacaucagguguaauauuugcaucuga

SEQ ID NO: 129166 - RNA, 1701 nt, Artificial Sequence; identical to SEQ ID NO: 128330
  derived and/or modified CDS sequence (opt3) from hemagglutinin__InfluenzaA__ABG80326

SEQ ID NO: 129167 - RNA, 1701 nt, Artificial Sequence; identical to SEQ ID NO: 128330
  derived and/or modified CDS sequence (opt3) from hemagglutinin__InfluenzaA__ABG80337

SEQ ID NO: 129168 - RNA, 1701 nt, Artificial Sequence
  derived and/or modified CDS sequence (opt3) from hemagglutinin__InfluenzaA__ABG80359
augaagaccaucauugcccugagcuacauacucugccuuguguucgcucagaaacugcccggcaacgacaauuccacagcaacuuuguguuuagggcaccaugccgucccuaacggaacgcugguuaagaccaucacaaaugaucaaauugaggugacuaacgcgaccgaacuuguacagucuucaaguacagguagaaucugcgacagcccacacaggauucucgauggcaaaaauuguacccugaucgacgcucuacugggggauccgcauugcgacggauuucagaacaaggagugggauuuguucguggaacgguccaaagccuauucuaauuguuaccccuaugacgucccugauuacgcaucgcuccgcucacugguggccagcaguggcacucuggaguuuauaaacgaagacuucaauuggacagguguugcucaggaugggggauccuaugcaugcaagcgaggcucugugaacagcuuuuucucccgucucaauugguuacacaagcuggaguacaaauauccagcccuuaacgucaccaugcccaauaacggcaaguuugacaaauuguacaucuggggagugcaucacccuucaacggauagugaccaaacuagccuguacguaagagcuucugggaggguuaccguguccacaaagcggucacagcagacugucaccccaaauauugguagccgccccugggugagaggccuaaguucuaggaucuccauuuauuggacaaucgugaaaccuggggacauacuccugauuaacagcaccggaaaccuuaucgccccacggggcuacuucaagauucgcaaugguaagucgucuaucaugcgauccgaugcgccgaucgggaacuguucaagugagugcauuacgcccaauggaagcauaccuuccgacaaaccauuucagaacgucaauagaaucacuuauggcgcaugucccagguacguuaagcaaaacacacugaaauuggccaccggcaugcggaaugugccugaaaagcagacucgugggauuuucggagcuaucgccgguuuuauagagaacggcugggaagggaugguagauggaugguauggcuuccgccaccaaaauucugaggguacagggcaggcagcugaccucaaaagcacccaggccgcgguggaucagauuaacggcaagcugaauagauuaaucgagaggacgaacgaaaaauuucaucagaucgagaaggaguucucagaagucgaaggacggauucaagaccuggagaaguacguggaggauaccaaaaucgaccucuggaguuauaaugccgaacuucugguugcauuggagaaccagcacacaauugaucuaacugacuccgaaaugaauaagcuguucgagaaaacccgaaagcagcuccgcgaaaacgcugaggauaugggcaacgggugcuuuaaaauauaccauaagugugacaaugccugcaucggaagcauuagaaacgguacauacgaccacgauguguauagggacgaggcucugaauaaccgguuccagaucaagggcgucgaacuuaaaucuggguacaaggauuggauccuguggauuucauuugccauaaguugcuucuugcucugugugguacuguuaggauuuaucaugugggcaugccaaaaaggcaauauucgcuguaacaucugcauuuga

SEQ ID NO: 129169 - RNA, 1701 nt, Artificial Sequence
  derived and/or modified CDS sequence (opt3) from hemagglutinin__InfluenzaA__ABG80370
augaagaccaucauugcccugagcuacauacucugccuuguguucgcucagaaacugcccggcaacgacaauuccacagcaacuuuguguuuagggcaccaugccgucccuaacggaacgcugguuaagaccaucacaaaugaucaaauugaggugacuaacgcgaccgaacuuguacagucuucaaguacagguagaaucugcgacagcccacacaggauucucgauggcaaaaauuguacccugaucgacgcucuacugggggauccgcauugcgacggauuucagaacaaggagugggauuuguucguggaacgguccaaagccuauucuaauuguuaccccuaugacgucccugauuacgcaucgcuccgcucacugguggccagcaguggcacucuggaguuuauaaacgaagacuucaauuggacagguguugcucaggaugggaaguccuaugcaugcaagcgaggaucugugaaauccuuuuucucccgucucaacugguuacacaagcuggaguacaaauauccagcccuuaaugucaccaugcccaacaauggcaaguuugacaaauuguacaucuggggcgugcaucacccuucaacggauagugaccaaacuagccuguacguaagagcuucugggaggguuaccguguccacaaagcggucacagcagacugucauuccaaacaucggaagccgccccugggugagaggucuaaguucuaggauuuccaucuauuggaccauagugaagccuggcgacauucuccugaucaauagcacagggaaccuuauugccccacggggauacuucaaaauccgcaacggcaagucgucuaucaugcgauccgaugcgccgauugguaauuguucaagugagugcauaacccccaacgggagcaucccuaaugacaaaccauuucagaacgucaauagaauuacguauggagcaugucccagguacguuaagcaaaacacucugaaauuggccacaggcaugcggaaugugccugaaaagcagacccguggcaucuucggggcuauagccggauuuauugagaacgguugggaaggcaugguagaugggugguauggauuccgccaccagaauagcgagggcacuggucaggcagcugaccucaaaucuacacaagccgcgaucgaucagaucaacgggaagcugaauagauuaauugagaagaccaacgaaaaauuucaucagaucgagaaggaguucagcgaaguggaaggcaggauucaagaccuggagaaauacgucgaggauacgaagauagaccucuggucauauaaugccgaacuucugguggcauuggagaaccagcacaccaucgaucuaacagacagugaaaugaauaaacuguucgagcggacucgaaagcagcuccgcgaaaacgcugaggauaugggaaacggcugcuuuaagauuuaccauaaaugugacaaugccugcaucggguccaucagaaacggaaccuacgaccacgauguuuauagggacgaggcucugaauaaccgguuccagauuaaggguguggaacuuaaaagcggcuacaaggauuggauacuguggaucucuuuugccauuucaugcuucuugcucugugucgugcuguuaggguuuaucaugugggcaugccaaaaaggaaauauucgcuguaacaucugcauauga

SEQ ID NO: 129170 - RNA, 1701 nt, Artificial Sequence; identical to SEQ ID NO: 129101
  derived and/or modified CDS sequence (opt3) from hemagglutinin__InfluenzaA__ABG80392

SEQ ID NO: 129171 - RNA, 1701 nt, Artificial Sequence; identical to SEQ ID NO: 129101
  derived and/or modified CDS sequence (opt3) from hemagglutinin__InfluenzaA__ABG80403

SEQ ID NO: 129172 - RNA, 1701 nt, Artificial Sequence; identical to SEQ ID NO: 129101
  derived and/or modified CDS sequence (opt3) from hemagglutinin__InfluenzaA__ABG80414

SEQ ID NO: 129173 - RNA, 1701 nt, Artificial Sequence; identical to SEQ ID NO: 129101
  derived and/or modified CDS sequence (opt3) from hemagglutinin__InfluenzaA__ABG80425

SEQ ID NO: 129174 - RNA, 1701 nt, Artificial Sequence; identical to SEQ ID NO: 128831
  derived and/or modified CDS sequence (opt3) from hemagglutinin__InfluenzaA__ABG88289

SEQ ID NO: 129175 - RNA, 1701 nt, Artificial Sequence
  derived and/or modified CDS sequence (opt3) from hemagglutinin__InfluenzaA__ABG88300
augaaggccaaacugcucgugcuucugugcgcuuucaccgcaacauacgccgacacuaucuguauuggcuaucacgcgaacaauagcacggauaccgucgacacaguuuuggagaagaacgugacuguaacccauuccgugaauuuacuggaagauucucacaacgggaaacuaugcagacucaagggaacagcuccccugcagcuugguaauuguucagucgccggcuggauacuggggaacccugagugcgaaaguuuguuuagcaaagaguccuggucuuacaucgcagaaaccccaaauccggagaacggaacuuguuaucccggcuacuucgccgacuaugaggaacucagggagcaacugucgucagugagcaguuuugaacgguucgagauuuuuccuaaggaguccucuuggccaaaucauacaguuaccaagggugugacggcuagcugcucccacaacgggaaaucaaguuucuacaagaaucugcucugguuaacugaaaagaacggacuguaucccgaucuuagcaagucuuacgucaauaacaaagagaaggaaguguugguacuguggggcguucaucacccuuccaauaucggcgaccagcgcgcaauuuaccacaccgagaacgccuaugugucagucgugagcagucauuacucucgacguuuuacaccagaaaucacuaagagacccaaagugagggaucaggaggggcggauaaacuauuacuggacccuacucgagccuggagacacaaucauuuucgaagcuaaugguaaccugaucgccccaugguaugcguuugcacuuucccgcggcuucgggagcggaauuaucaccucgaaugccucuaugggcgagugugaugcuaagugccagacgccgcaaggugccauaaacuccucacugcccuuucagaauguccacccuguuacuauuggggaauguccaaaauacgugagaaguacaaaguugaggaugguaaccggacuccggaacauccccagcauucagucccgcggccuguucggcgcaaucgcuggguuuaucgagggagguuggacuggcaugauugacgggugguauggauaccaucaccagaaugaacaaggcucugguuacgccgcggaucagaaaagcacacagaacgccauagacgggaucaccaauaaggugaacucagucauugagaaaaugaauacgcaguucaccgcagugggcaaggaguucaacaaguuagaacgaagaauggagaaucugaacaaaaagguugaugacggauuucucgacaucuggacauauaaugcugaacuucugguguugcuagagaacgaaaggacucuggauuuccacgacaguaacgucaaaaaucucuacgagaaggugaaaacccaacugaagaacaaugccaaggagauaggcaacgggugcuuugaguucuaucauaaauguaauaacgaaugcauggaauccguaaagaauggaacauacgauuauccuaaauacagcgaggagucuaaacuuaaccgggagaaaauugacgguguuaagcuggaaucaaugggcguguaucagaucuuggcuaucuacaguacugucgccagcucccucgugcuguuagucucucugggggcaauuucguuuuggaugugcagcaauggaucccuacagugucguaucugcauuuga

SEQ ID NO: 129176 - RNA, 1701 nt, Artificial Sequence; identical to SEQ ID NO: 128959
  derived and/or modified CDS sequence (opt3) from hemagglutinin__InfluenzaA__ABG88311

SEQ ID NO: 129177 - RNA, 1701 nt, Artificial Sequence
  derived and/or modified CDS sequence (opt3) from hemagglutinin__InfluenzaA__ABG88322
augaaggccaaacugcucgugcuucugugcgcuuucaccgcaacauacgccgacacuaucuguauuggcuaucacgcgaacaauagcacggauaccgucgacacaguuuuggagaagaacgugacuguaacccauuccgugaauuuacuggaagauucucacaacgggaaacuaugcagacucaagggaacagcuccccugcagcuugguaauuguucagucgccggcuggauacuggggaacccugagugcgaaaguuuguuuagcaaagaguccuggucuuacaucgcagaaaccccaaauccggagaacggaacuuguuaucccggcuacuucgccgacuaugaggaacucagggagcaacugucgucagugagcaguuuugaacgguucgagauuuuuccuaaggaguccucuuggccaaaucauacaguuaccaagggugugacggcuagcugcucccacaacgggaaaucaaguuucuacaagaaucugcucugguuaacugaaaagaacggacuguaucccauccuuagcaagucuuacgucaauaacaaagagaaggaaguguugguacuguggggcguucaucacccuuccaauauuggcgaucagcgcgcaaucuaccacaccgagaacgccuaugugucagucgugagcagucauuacucucgacguuuuacaccagaaauagcuaagagacccaaagugagggaccaggaggggcggaucaacuauuacuggacucuacucgagccuggagauaccauuaucuucgaagccaaugguaaccugauugcgccaugguaugcauuugcccuuucccgcggcuucgggagcggaaucauaacaucgaaugcuucuaugggcgagugugacgccaagugccagaccccgcaaggugcaauuaacuccucacugcccuuucagaauguccacccuguuacgaucggggaauguccaaaauacgugagaaguacuaaguugaggaugguaacaggacuccggaacauucccagcauccagucccgcggccuguucggcgcuaucgccggguuuauugagggagguuggaccggcaugauagaugggugguauggauaccaucaccagaaugaacaaggcucugguuacgcggccgaccagaaaagcacucagaacgcaaucgaugggauuacaaauaaggugaacucagucaucgagaaaaugaauacccaguucacggcugugggcaaggaguucaacaaguuagaacgaagaauggagaaucugaacaaaaagguugacgauggauuucucgacauauggaccuauaaugccgaacuucugguguugcuagagaacgaaaggacacuggacuuccacgauaguaacgucaaaaaucucuacgagaaggugaaaaaccaacugaagaauaacgcuaaggagauuggcaaugggugcuuugaguucuaucauaaauguaacaaugaaugcauggaauccguaaagaacggaacuuacgacuauccuaaauacagcgaggagucuaaacuuaaucgggagaaaaucgaugguguuaagcuggaaucaaugggcguguaucagaucuuggccauuuacaguaccgucgcaagcucccucgugcuguuagucucucugggggccaucucguuuuggaugugcagcaacggaucccuacagugucguauuugcauauga

SEQ ID NO: 129178 - RNA, 1701 nt, Artificial Sequence
  derived and/or modified CDS sequence (opt3) from hemagglutinin__InfluenzaA__ABG88333
augaaggccaaacugcucgugcuucugugcgcuuugagcgcaaccgacgccgauacaaucuguauuggcuaccacgcgaacaauuccacugacacggucgauaccguuuuagagaagaacgugacaguaacucauucugugaaucugcuagaagacucacacaacgggaaacucugcagacugaagggaauagcuccccuucagcuggguaaauguaguaucgccggcuggauuuuggggaauccugagugcgaaagccucuucuccaagaagucuuggucguauaucgcagagaccccaaacucagaaaauggaacauguuacccgggcuauuuugccgauuacgaggagcugagggaacaacugagcagugucuccucuuucgagcgguuugaaauuuuccccaaagagagcuccuggccuaagcauaacgugacccgcgguguuacugcuucaugcagucacaaaggaaagagcucuuuuuaucgaaaucucuuauggcugacagagaaaaacggguccuacccaaaucuuucaaagagcuaugugaacaauaaggaaaaagaggucuuggugcuguggggcguacaucaccccaguaacaucgaagaccagaagaccauauaccguaaagagaaugcauacguuucuguggucuccagccacuauaacagaagguucacgccugaaaucucgaagcggccaaaagugcgcggccaggaggggagaauuaacuacuauuggacucuacucgagcccggagauaccaucauuuuugaagccaaugguaaccugaucgcuccuugguacgccuucgcgcuuucuaggggcuuuggguccggaauaauuacaucaaaugcaaguauggacgagugugaugccaagugccagacuccacaaggcgcuaucaacagcucccugccguuccagaaugugcaucccgucaccauuggugaauguccuaaauauguucggucuacaaaguugcgcauggugaccgggcuccgaaacaucccaagcauccagucaagaggacuguuuggcgccauugcaggcuucauagaagggggauggacggguaugaucgacggcugguacggguaucaccaucagaaugaacaaggaaguggcuacgcugccgaucagaaguccacucagaacgcgauuaaugguaucacaaacaaaguaaauagcgugauagagaagaugaacacccaguuuacugccgucgggaaagaguucaauaaguuagaaaagaggauggagaaccugaauaagaagguggacgauggcuuccucgacauuuggacauacaacgcagaacuucugguuuugcuagagaacgaacggacccuggacuuucacgauucuaaugugaaaaaccucuaugagaaggucaaaucacaacugaagaauaacgcuaaagagaucggaaauggcugcuucgaauuuuaccacaaguguaacaaugagugcauggaaagugugaagaacgggacguaugacuaccccaaauauagcgaggaguccaaacuuaaucgugagaaaaucgauggaguaaagcuggagucuauggguguuuaccagauuuuggccaucuauucgaccguggcuagcucccucguccuguuagugucacugggcgccauuaguuucuggaugugcucuaacgggagccuacagugucgcauaugcaucuga

SEQ ID NO: 129179 - RNA, 1701 nt, Artificial Sequence
  derived and/or modified CDS sequence (opt3) from hemagglutinin__InfluenzaA__ABG88344
augaaggccaaacugcucgugcuucugugcgcuuugagcgcaaccgacgccgauacaaucuguauuggcuaccacgcgaacaauuccacugacacggucgauaccguuuuagagaagaacgugacaguaacucauucugugaaucugcuagaagacucacacaacgggaaacucugcagacugaagggaauagcuccccuucagcuggguaaauguaguaucgccggcuggauuuuggggaauccugagugcgaaagccucuucuccaagaagucuuggucguauaucgcagagaccccaaacucagaaaauggaacauguuacccgggcuauuuugccgauuacgaggagcugagggaacaacugagcagugucuccucuuucgagcgguuugaaauuuuccccaaagagagcuccuggccuaagcauaacgugacccgcgguguuacugcuucaugcagucacaaagggaaaagcucuuuuuaucgaaaucucuuauggcugacagagaaaaacggauccuacccaaaucuuucaaagagcuaugugaacaauaaggaaaaagaggucuuggugcuguggggcguacaucaccccaguaacaucgaagaccagaagaccauauaccguaaagagaaugcauacguuucuguggucuccagccacuauaacagaagguucacgccugaaaucucgaagcggccaaaagugcgcaaccaggagggcagaauuaauuacuauuggacucuacucgagcccggggauaccaucauuuuugaagccaacggaaaucugaucgcuccuugguacgccuucgcgcuuucuagggguuuuggcuccgggauaauuacaucaaacgcaaguauggacgagugugaugccaagugccagacuccacaaggagcuaucaauagcucccugccguuccagaacgugcaucccgucaccauuggcgaauguccuaaauauguucggucuacaaaguugcgcauggugaccggucuccgaaauaucccaagcauccagucaagagggcuguuuggagccauugcaggcuucauagagggcggguggacgggaaugaucgacgguugguacggcuaucaccaucagaacgaacaagggaguggauacgcugccgaucagaaguccacucagaaugcgauuaacggcaucacaaauaaaguaaacagcgugauagagaagaugaauacccaguuuacugccgucgguaaagaguucaacaaguuagaaaagaggauggagaaucugaacaagaagguggacgauggguuccucgacauuuggacauacaacgcagaacuucugguuuugcuagagaaugaacggacccuggacuuucacgauucuaacgugaaaaaucucuaugagaaggucaaaucacaacugaagaacaaugcuaaagagaucggcaacggaugcuucgaauuuuaccacaaguguaauaacgagugcauggaaagugugaagaauggcacguaugacuaccccaaauauagcgaggaguccaaacuuaaccgugaaaagaucgaugggguaaagcuggagucuaugggaguuuaccagauuuuggccaucuauucgaccguggcuagcucccucguccuguuagugucacugggugccauuaguuucuggaugugcucuaauggcagccuacagugucgcauaugcaucuga

SEQ ID NO: 129180 - RNA, 1701 nt, Artificial Sequence
  derived and/or modified CDS sequence (opt3) from hemagglutinin__InfluenzaA__ABG88355
augaagaccaucauugcccugagcuacauacucugccuuguguucgcucagaaacugcccggcaacgacaauuccacagcaacuuuguguuuagggcaccaugccgucccuaacggaacgcugguuaagaccaucacaaaugaucaaauugaggugacuaacgcgaccgaacuuguacagucuucaccaacagguagaaucugcgacaguccgcacaggauucucgauggcaaaaauuguacccugaucgacgcucuacugggggauccccauugcgacggauuucagaacaaggagugggauuuguucguggaacggagcaaagccuauuccaauuguuacccuuaugacgucccagauuacgcaucucuccgcucgcugguggccucaagcggcacucuggaguuuacaaacgaaaauuucaacuggaccgguguugcucaggacgggaagaguuaugcaugcaagcgaggauccgugaauagcuuuuucucucgucucaacugguuacacaaacuggaguacaaguaucccgcccuuaaugucacgaugccuaacaauggcaaauuugauaaguuguacauauggggcgugcaucacccauccacugacucagaucaaaccagucuguacguaagagcuagcgggaaaguuacagugucuacuaagaggucccagcagaccgucauccccgacauuggauaucggccuugggugcgcggucuaucaagcagaaucaguauuuacuggacaaucgugaagccaggcgacauacuccugauuaacucuaccgggaaccuuaucgccccgaggggauauuucaaaauucggaauggcgaguccagcaucaugcgcucggaugcgcccaucgguaacuguucuuccgaaugcauuacgccuaaugggucaauaccaaacgacaagcccuuucagaaugucaaccgaaucacuuacggagcauguccuagauauguuaaacaaaauacacugaaguuggccaccggcaugaggaacgugccagagaaacagacucggggcauuuucggggcuaucgccggauuuauagaaaaugguugggagggcaugguagaugggugguacggauuccgucaccagaacagugagggcacaggucaggcagcugaccucaagagcacccaagccgcgauugaucagaucaaugggaaacugaaccgcuuaguggaaaagacgaaugagaaguuucaucagaucgaaaaagaguucuccgaagucgagggcaggauucaagaccuggagaaguauguggaagauaccaaaaucgaccucuggucuuacaacgccgagcuucugguugcauuggaaaaucagcacacaauugaucuaacugacagcgagaugaacaagcuguucgaaagaacccggaaacagcuccgagagaacgcugaggauaugggaaauggcugcuuuaagauauaccauaagugugacaacgccugcaucgggucaauucgcaauggaacauaugaccacgauguguacagagacgaagcucugaacaauagguuccagaucaaaggugucgagcuuaagaguggcuauaaagauuggauccuguggauuuccuuugccauaagcugcuucuugcucugugugguacuguuaggguuuaucaugugggcaugccaaaagggaaacauucgguguaauaucugcauuuga

SEQ ID NO: 129181 - RNA, 1701 nt, Artificial Sequence
  derived and/or modified CDS sequence (opt3) from hemagglutinin__InfluenzaA__ABG88366
augaagaccaucauugcccugagcuacuuccucugccuuguguuugcucagaaacugcccggcaacgacaauuccacagcaacuuuguguuuagggcaccaugccgucccuaacggaacgcugguuaagaccauaacaaaugaucaaaucgaggugacuaacgcgaccgaacuuguacagaauagcccaacagguagaauuugcgacucaccgcacaggauccucgauggcaaaaacuguacccugauugacgcucuacugggggauccccauugcgacggauuccagaauaaggagugggauuuguuuguggaacggaguaaagccuauagcaacuguuacccuuaugacgucccagauuacgcaucccuccgcucucugguggccucgucaggcacucuggaguucacaaaugaaaacuuuaauuggaccgguguugcucaggacgggaagucuuaugcaugcaagcgaggaagugugaacuccuucuuuucucgucucaauugguuacacaaacuggaguacaaguaucccgcccuuaacgucacgaugccuaauaacggcaaauucgauaaguuguacaucuggggcgugcaucacccaagcacugacuccgaucaaaccucacuguacguaagagcuagugggaaaguuacagugagcacuaagaggucucagcagaccgucauacccgacaucggauaucggccuugggugcgcggucuauccucaagaauuagcaucuacuggacaauugugaagccaggcgacauccuccugauaaacaguaccgggaaucuuauugccccgaggggauauuuuaaaauccggaacggcaagucuuccauuaugcgcagcgaugcgcccaucgguaauuguucgucugagugcaucacgccuaacggguccauuccaaaugacaaacccuuccagaacgucaaucgaauaacuuacggagcauguccuagauauguuaagcaaaacacacugaaauuggccaccggcaugaggaaugugccagaaaagcagacucggggcaucuuuggggcuauugccggauucaucgagaacgguugggaaggcaugguagaugggugguacggauuucgucaccaaaauucagagggcacaggucaggcagcugaccucaaaaguacccaggccgcgauagaucagauuaacgggaagcugaaucgcuuaguggagaagacgaacgaaaaauuccaucagaucgagaaggaguucagcgaagucgaaggcagaauccaagaccuggagaaauauguggaggauaccaagauugaccucugguccuacaaugccgaacuucugguugcauuggagaaccagcacacaaucgaucuaacugacucugaaaugaacaaacuguuugagaggacccggaagcagcuccgagaaaaugcugaggauaugggaaacggcugcuucaagauuuaccauaaaugugacaaugccugcauagggagcauccgcaacggaacauaugaccacgauguguacagagacgaggcucugaauaacagguuucagauuaagggugucgaacuuaaaucaggcuauaaggauuggauccuguggaucaguuucgccauuuccugcuuuuugcucugugugguacuguuaggguucauaaugugggcaugccaaaaaggaaauauccgguguaacauuugcaucuga

SEQ ID NO: 129182 - RNA, 1701 nt, Artificial Sequence; identical to SEQ ID NO: 129032
  derived and/or modified CDS sequence (opt3) from hemagglutinin__InfluenzaA__ABG88377

SEQ ID NO: 129183 - RNA, 1701 nt, Artificial Sequence; identical to SEQ ID NO: 129032
  derived and/or modified CDS sequence (opt3) from hemagglutinin__InfluenzaA__ABG88388

SEQ ID NO: 129184 - RNA, 1701 nt, Artificial Sequence
  derived and/or modified CDS sequence (opt3) from hemagglutinin__InfluenzaA__ABG88399
augaagaccaucauugcccugagcuacauacucugccuuguguucgcucagaaacugcccggcaacgacaauuccacagcaacuuuguguuuagggcaccaugccgucccuaacggaacgcugguuaagaccaucacaaaugaucaaauugaggugacuaacgcgaccgaacuuguacagucuucaaguacagguagaaucugcgacagcccacacaggauucucgauggcaaaaauuguacccugaucgacgcucuacugggggauccgcauugcgacggauuucagaacaaggagugggauuuguucguggaacgguccaaagccuauucuaauuguuaccccuaugacgucccugauuacgcaucgcuccgcucacugguggccagcaguggcacucuggaguuuacaaaggaauccuucaacuggaccgguguugcucaggacgggaagucuuaugcaugcaaacgaggaagcgucaauuccuuuuucucacgucucaacugguuacacaagcuggaguacaaauauccagcccuuaaugugacgaugcccaacaaugauaaguuugacaaauuguacauauggggcgugcaucacccuaguacugauagcgaccaaaccucucuguacguacaggcuuccggcagaguuacagugucaacuaagaggagccagcagaccgucaucccaaacauugggagucggcccugggugcgcggaaucucuuccagaauuagcaucuauuggacaauagugaagccuggugacauucuacucaucaauucgaccggcaaccugauugccccaaggggguacuucaaaauccggaacggaaagucuuccaucaugcgcucagaugcgccgauuggcaauuguaacagugagugcauaacgcccaaugguagcaucccuaacgacaaaccauuucaaaaugucaaccgaauuacuuauggggcaugucccagauacguuaagcagaauacacuuaaacuggccaccggaaugaggaacgugccugaaaagcagacucggggcaucuucggcgcuauagccggguuuauugagaauggaugggaagguaugguagauggcugguauggguuccgucaccagaacuccgagggaacaggccaagcagcugacuugaaaucuacccaggccgcgaucgaucagaucaaugguaagcucaaccgccugauugagaagacgaaugaaaaauuucaucaaaucgagaaggaguucagcgaaguggaagggaggauucaggacuuagagaaauacgucgaggauaccaagauagaccuguggucauauaacgccgaacuccuuguggcacuggagaaucagcacacaaucgauuugacugacagugaaaugaacaaacuauucgagagaacccggaagcagcugcgagaaaacgcugaggauaugggcaauggaugcuuuaagauuuaccauaaaugugacaacgccugcaucggcuccauccgcaaugggacauacgaccacgauguuuauagagacgaggcucucaacaauagguuccaaauuaagggaguggaacugaaaagcgguuacaaggauuggauacuuuggaucucuuuugccauuucaugcuuccuguugugugucgugcuccugggcuuuaucaugugggcaugccagaaagggaacauucgguguaauaucugcauauga

SEQ ID NO: 129185 - RNA, 1701 nt, Artificial Sequence; identical to SEQ ID NO: 129072
  derived and/or modified CDS sequence (opt3) from hemagglutinin__InfluenzaA__ABG88410

SEQ ID NO: 129186 - RNA, 1701 nt, Artificial Sequence; identical to SEQ ID NO: 129072
  derived and/or modified CDS sequence (opt3) from hemagglutinin__InfluenzaA__ABG88421

SEQ ID NO: 129187 - RNA, 1701 nt, Artificial Sequence
  derived and/or modified CDS sequence (opt3) from hemagglutinin__InfluenzaA__ABG88432
augaagaccaucauugcccugagcuacauacucugccuuguguucgcucagaaacugcccggcaacgacaauuccacagcaacuuuguguuuagggcaccaugccgucccuaacggaacgcugguuaagaccaucacaaaugaucaaauugaggugacuaacgcgaccgaacuuguacagucuucaaguacagguagaaucugcgacagcccacacaggauucucgauggcaaaaauuguacccugaucgacgcucuacugggggauccgcauugcgacggauuucagaacaaggagugggauuuguucguggaacgguccaaagccuauucuaauuguuaccccuaugacgucccugauuacgcaucgcuccgcucacugguggccagcaguggcacucuggaguuuauaaacgaagacuucaauuggacagguguugcucaggaugggaaguccuaugcaugcaagcgaggaucugugaacagcuuuuucucccgucucaauugguuacacaaacuggaguacaaguauccagcccuuaacgucaccaugcccaauaacggcaaauuugacaaguuguacaucuggggcgugcaucacccuucaacggauagugaccaaacuagccuguacguaagagcuucugggaggguuaccguguccacaaaacggucacagcagacugucauuccaaauaucggauuccgccccugggugagaggucuaagcaguaggauuucuaucuauuggaccauagugaagccuggcgacauucuccugaucaacuccacagggaaccuuauugccccacggggauacuuuaagaugcgcaauggcaaaagcucgaucaugcgaucugaugcgccgaucgguaacuguuccucagagugcauuacccccaaugggaguauaccuaacgacaagccauuccagaaugucaacagaaucacguauggagcaugucccagguacguuaaacaaaauacucugaaguuggccacaggcaugcggaacgugccugaaaaacagacccguggcauuuuuggggcuaucgccggauucauagagaaugguugggaaggcaugguagaugggugguauggauuucgccaccagaacagcgagggcacuggucaggcagcugaccucaaguccacacaagccgcgauugaucagaucaaugggaaacugaacagauuaaucgagaagaccaaugaaaaguuccaucagauugagaaagaguucucugaaguggaaggcaggauccaagaccuggagaaguacgucgaggauacgaaaauugaccucuggagcuauaacgccggacuucugguggcauuggaaaaucagcacaccauagaucuaacagacucagagaugaacaagcuguuugaacggacucgaaaacagcuccgcgagaacgcugaagauaugggcaaugggugcuucaagaucuaccauaagugugacaacgccugcauuggaaguaucagaaaugguaccuacgaccacgauguuuauagggacgaggcucugaacaaucgguuucagaucaaaggcguggagcuuaaguccggguacaaagauuggauucuguggaucagcuucgccauaucuugcuuuuugcucugugucgugcuguuaggauucauuaugugggcaugccaaaagggcaacauccgcuguaauauuugcaucuga

SEQ ID NO: 129188 - RNA, 1701 nt, Artificial Sequence; identical to SEQ ID NO: 129072
  derived and/or modified CDS sequence (opt3) from hemagglutinin__InfluenzaA__ABG88443

SEQ ID NO: 129189 - RNA, 1701 nt, Artificial Sequence
  derived and/or modified CDS sequence (opt3) from hemagglutinin__InfluenzaA__ABG88454
augaagaccaucauugcccugagcuacauacucugccuuguguucgcucagaaacugcccggcaacgacaauuccacagcaacuuuguguuuagggcaccaugccgucccuaacggaacgcugguuaagaccaucacaaaugaucaaauugaggugacuaacgcgaccgaacuuguacagucuucaaguacagguagaaucugcgacagcccacacaggauucucgauggcaaaaauuguacccugaucgacgcucuacugggggauccgcauugcgacggauuucagaacaaggagugggauuuguucguggaacgguccaaagccuauucuaauuguuaccccuaugacgucccugauuacgcaucgcuccgcucacugguggccagcaguggcacucuggaguuuauaaacgaagacuucaauuggacagguguugcucaggaugggaaguccuaugcaugcaagcgaggaucugccaacagcuuuuucucccgucucaauugguuacacaaacuggaguacaaguauccagcucuuaacgugaccaugcccaauaacggcaaauuugacaaguuguacaucuggggcguccaucacccuucaacggauagugaccaaacuagccuguacgugagagccucugggggaguaaccguuuccacaaaaaggucacagcagacugugauuccaaauaucgguagccggcccuggguccgcggccuaaguucuagaauuuccaucuauuggaccauagugaagccuggggacauucuccugaucaacagcacaggaaaccuuauugcgccaaggggcuacuucaagauccggucggguaaaucuuccaucaugcgcucagaugcaaguauugggaauuguagcuccgagugcauaaccccgaacggaucuauccccaaugacaagccuuuucagaacgugaaucgaauuacguauggcgccuguccaagauacgucaaacaaaacacucugaaguuggcuacaggcaugaggaauguucccgaaaaacagacccgggggaucuucggagccauagcagguuuuauugagaacggcugggaagggaugguggauggaugguauggcuuccgucaccagaauagcgaggguacugggcaggcugccgaccucaagucaacacaagcggccaucgaucagaucaacggcaaacugaaucgcuuaauuggaaagaccaacgacaaguuucaucagaucgagaaagaguucagugaaguagaaggcaggauucaagaucuggagaaguacguggaagacacgaaaauagaucucugguccuauaaugcagagcuucuggucgcuuuggagaaccagcacaccaucgaccuaacagauagcgaaaugaauaagcuguucgagagaacucggaaacagcuccgagaaaacgccgaggacauggggaacggaugcuuuaagauuuaccauaagugugacaaugcuugcaucgguucuauccgcaacggcaccuacgaucacgacguguauagagaugaagcccugaauaacagguuccagauuaaagggguugagcuuaagucaggauacaaagacuggauacuguggaucaguuuugcaauuagcugcuucuugcucugugugguccuguuaggcuuuaucaugugggccugccaaaaggguaauauucgguguaacaucugcauauga

SEQ ID NO: 129190 - RNA, 1701 nt, Artificial Sequence
  derived and/or modified CDS sequence (opt3) from hemagglutinin__InfluenzaA__ABG88465
augaagaccaucauugcccugagcuacauacucugccuuguguucgcucagaaacugcccggcaacgacaauuccacagcaacuuuguguuuagggcaccaugccgucccuaacggaacgcugguuaagaccaucacaaaugaucaaauugaggugacuaacgcgaccgaacuuguacagucuucaaguacagguagaaucugcgacagcccacacaggauucucgauggcaaaaauuguacccugaucgacgcucuacugggggauccgcauugcgacggauuucagaacaaggagugggauuuguucguggaacgguccaaagccuauucuaauuguuaccccuaugacgucccugauuacgcaucgcuccgcucacugguggccagcaguggcacucuggaguuuauaaacgaagacuucaauuggacagguguugcucaggaugggaaguccuaugcaugcaagcgaggaucugugaacagcuuuuucucccgucucaauugguuacacaaacuggaguacaaguauccagcccuuaacgucaccaugcccaauaacggcaaauuugacaaguuguacaucuggggcgugcaucacccuucaacggauagugaccaaacuagccuguacguaagagcuucugggaggguuaccguguccacaaaacggucacagcagacugucauuccaaauaucggauuccgccccugggugagaggucuaagcaguaggauuucuaucuauuggaccauagugaagccuggcgacauucuccugaucaacuccacagggaaccuuauugccccacggggauacuuuaagauccgcaauggcaaaagcucgaucaugcgaucugaugcgccgauugguaacuguuccucagagugcauaacccccaaugggaguaucccuaacgacaagccauuccagaaugucaacagaauuacguauggagcaugucccagguacguuaaacaaaauacucugaaguuggccacaggcaugcggaacaucccugaaaaacagacccguggcauauuuggggcuauugccggauucaucgagaaugguugggaaggcaugguggaugggugguauggauuucgccaccagaacagcgagggcacuggucaggcagcugaccucaaguccacacaagccgcgaucgaucagauuaaugggaaacugaacagauuaaucgagaagaccaaugaaaaguuccaucagauugagaaagaguucucugaaguagaaggcaggauacaagaccuggagaaguacguggaggauacgaaaaucgaccucuggagcuauaacgccggacuucuggucgcauuggaaaaucagcacaccauugaucuaacagacucagagaugaacaagcuguuugaacggacucgaaaacagcuccgcgagaacgcugaagauaugggcaaugggugcuucaagaucuaccauaagugugacaacgccugcaucggaaguauuagaaaugguaccuacgaccacgauguguauagggacgaggcucugaacaaucgguuucagauaaaaggcguugagcuuaaguccggguacaaagauuggauccuguggauuagcuucgccaucucuugcuuuuugcucugugugguccuguuaggauucauuaugugggcaugccaaaagggcaacauccgcuguaauauaugcaucuga

SEQ ID NO: 129191 - RNA, 1701 nt, Artificial Sequence; identical to SEQ ID NO: 129072
  derived and/or modified CDS sequence (opt3) from hemagglutinin__InfluenzaA__ABG88476

SEQ ID NO: 129192 - RNA, 1701 nt, Artificial Sequence; identical to SEQ ID NO: 129072
  derived and/or modified CDS sequence (opt3) from hemagglutinin__InfluenzaA__ABG88487

SEQ ID NO: 129193 - RNA, 1701 nt, Artificial Sequence; identical to SEQ ID NO: 129072
  derived and/or modified CDS sequence (opt3) from hemagglutinin__InfluenzaA__ABG88498

SEQ ID NO: 129194 - RNA, 1701 nt, Artificial Sequence; identical to SEQ ID NO: 129072
  derived and/or modified CDS sequence (opt3) from hemagglutinin__InfluenzaA__ABG88509

SEQ ID NO: 129195 - RNA, 1701 nt, Artificial Sequence
  derived and/or modified CDS sequence (opt3) from hemagglutinin__InfluenzaA__ABG88520
augaagaccaucauugcccugagcuacauauccugccucguguucgcucagaaacuucccggcaacgacaauucuacagcaacucuguguuuggggcaccaugccgucccuaacggaacguuaguuaagaccaucacaaaugaucaaauugaggugacuaacgcgaccgaacugguacagucaaguagcacagguagaaucugcgacuccccacacaggauucuagauggcaaaaauuguacccucaucgacgcucugcuuggggauccgcauugcgacggauuucagaacaaggagugggaucuguucguggaacggucuaaagccuauucgaauuguuaccccuaugacgucccugauuacgcaucauugcgcagccucguggccaguuccggcacucuggaguuuauaaacgaagacuucaauuggacagguguugcucaggaugggaagucuuaugcaugcaagcgaggaagcgugaacuccuuuuucucacgucugaauuggcuccacaaauuagaguacaaguauccagcccugaacgucaccaugcccaauaacggcaaauuugacaagcuguacaucuggggcgugcaucacccuaguacggauagcgaccaaacuucuuuguacguaagagcuuccgggaggguuaccgugucaacaaaacggagccagcagacugucauuccaaauaucggauuccgccccugggugagaggucugaguucuaggauuuccaucuauuggaccauagugaagccuggcgacauucuacucaucaacagcacagggaaccugauugccccacggggauacuuuaagauccgcaauggcaaaucgucuaucaugcgauccgaugcgccgauugguaacuguucaagugagugcauaacccccaaugggagcaucccuaacgacaagccauuccagaaugucaacagaauuacguauggagcaugucccagguacguuaaacaaaauacucuuaagcuggccacaggcaugcggaacgugccugaaaaacagacccguggcaucuuuggggcuauagccggauucauugagaaugguugggaaggcaugguagaugggugguauggauuucgccaccagaacuccgagggcacuggucaggcagcugacuugaagucuacacaagccgcgaucgaucagaucaaugggaaacucaacagacugauugagaagaccaaugaaaaguuccaucagaucgagaaagaguucagcgaaguggaaggcaggauucaagacuuagagaaguacgucgaggauacgaaaauagaccuguggucauauaacgccggacuccuuguggcacuggaaaaucagcacaccaucgauuugacagacagugagaugaacaagcuauuugaacggacucgaaaacagcugcgcgagaacgcugaagauaugggcaaugggugcuucaagauuuaccauaagugugacaacgccugcaucggauccaucagaaaugguaccuacgaccacgauguuuauagggacgaggcucucaacaaucgguuucagauuaaaggcguggagcuuaagagcggguacaaagauuggauacuuuggaucucuuucgccauuucaugcuuucuguugugugucgugcuccugggauucacaaugugggcaugccaaaagggcaacauccgcuguaauauuugcaucuga

SEQ ID NO: 129196 - RNA, 1701 nt, Artificial Sequence
  derived and/or modified CDS sequence (opt3) from hemagglutinin__InfluenzaA__ABG88531
augaagaccaucauugcccugagcuacauacucugccuuguguucgcucagaaacugcccggcaacgacaauuccacagcaacuuuguguuuagggcaccaugccgucccuaacggaacgcugguuaagaccaucacaaaugaucaaauugaggugacuaacgcgaccgaacuuguacagucuucaaguacagguagaaucugcgacagcccacacaggauucucgauggcaaaaauuguacccugaucgacgcucuacugggggauccgcauugcgacggauuucagaacaaggagugggauuuguucguggaacgguccaaagccuauucuaauuguuaccccuaugacgucccugauuacgcaucgcuccgcucacugguggccagcaguggcacucuggaguuuauaaacgaagacuucaauuggacagguguugcucaggaugggaaguccuaugcaugcaagcgaggaucugugaacagcuuuuucucccgucucaauugguuacacaaacuggaguacaaguauccagcccuuaacgucaccaugcccaauaacggcaaauuugacaaguuguacaucuggggcgugcaucacccuucaacggauaguguacaaacuagccuguacguuagagcuucugggagggugaccgucuccacaaaacggucacagcagacugugauuccaaauaucggauuccgccccugggugagaggucuaagcaguaggauuucuaucuauuggaccauagucaagccuggcgacauucuccugaucaacuccacagggaaccuuauugccccacggggauacuuuaagauccgcaauggcaaaagcucgaucaugcgaucugacgcgccgauugguaacuguuccucagagugcauaacccccaaugggaguaucccuaacgauaagccauuccagaauguuaacagaauuacguauggagcaugucccagguacgugaaacaaaauacucugaaguuggccacaggcaugcggaacguaccugaaaaacagacccguggcaucuuuggggcuauagccggauucauugagaaugguugggaaggcaugguggacgggugguauggauuucgccaccagaacagcgagggcacuggucaggcagcugaucucaaguccacacaagccgcgaucgaccagaucaaugggaaacugaacagauuaauugagaagaccaaugaaaaguuccaucagaucgagaaagaguucucugaagucgaaggcaggauucaagaucuggagaaguacguggaggacacgaaaauagaucucuggagcuauaacgccggacuucugguugcauuggaaaaucagcacaccaucgaccuaacagauucagagaugaacaagcuguuugaacggacucgaaaacagcuccgcgagaacgcugaagacaugggcaaugggugcuucaagauuuaccauaagugugauaacgccugcaucggaaguaucagaaaugguaccuacgaccacgacguguauagggaugaggcucugaacaaucgguuucagauuaaaggcgucgagcuuaaguccggguacaaagacuggauacuguggaucagcuucgccauuucuugcuuuuugcucugugugguacuguuaggauucaucaugugggcaugccaaaagggcaacauucgcuguaauaucugcauauga

SEQ ID NO: 129197 - RNA, 1698 nt, Artificial Sequence; identical to SEQ ID NO: 129083
  derived and/or modified CDS sequence (opt3) from hemagglutinin__InfluenzaA__ABG88553

SEQ ID NO: 129198 - RNA, 1701 nt, Artificial Sequence; identical to SEQ ID NO: 128758
  derived and/or modified CDS sequence (opt3) from hemagglutinin__InfluenzaA__ABG88564

SEQ ID NO: 129199 - RNA, 1701 nt, Artificial Sequence; identical to SEQ ID NO: 128788
  derived and/or modified CDS sequence (opt3) from hemagglutinin__InfluenzaA__ABG88575

SEQ ID NO: 129200 - RNA, 1701 nt, Artificial Sequence; identical to SEQ ID NO: 128698
  derived and/or modified CDS sequence (opt3) from hemagglutinin__InfluenzaA__ABG88586

SEQ ID NO: 129201 - RNA, 1701 nt, Artificial Sequence
  derived and/or modified CDS sequence (opt3) from hemagglutinin__InfluenzaA__ABG88597
augaagaccaucauugcccugagcuacauacucugccuuguguucgcucagaaacugcccgcaaacgacaauuccacagccacuuuguguuuaggccaccaugcggucccuaacgggacgcugguuaagaccaucacaaaugauaacauugaggugacuaaugcuaccgagcuaguacaaucuucaaguacaggaagaaucugcgacagcccacaccagauucucgauggugaaaacuguacccugaucgacgcccuucugggcgauccgcauugcgacggguuucagaauaaagaaugggauuuguucguggagagguccacugcauauucuaacuguuaccccuaugacgucccugauuacgccucgcuccggucacugguggcuagcaguggaacacuggaauuuaauaacgaguccuucaauuggaccggcguugaccagaacgguacgucuagcgcaugcaagcgccgauccaauaaaucauuuuucagucgucucaacugguuacaccaacugaaguauaaguacccagcccuuaaugugacuaugcccaacaacgagaaauuugauaaguuguauauauggggaguccaucacccuagcaccgacucugaucagaucucccuguacgcucaggccucagggagagugacaguaagcacuaaaaggagucagcaaaccguuauuccaaauaucggcucucggcccugggugcgcggcgucuccagcagaauuucgaucuacuggacaauagugaagccuggggacauucuacucaucaacucuaccggaaaucugauugcgccaagggguuauuucaaaauccgguccggcaagucaaguaucaugcgcagcaacgcaccgauugggaaguguaauuccgaaugcauaacgcccaacggaucuaucccuaaugacaaaccauuucagaacgugaaucgaauuacuuacggcgccugucccagauaugucaagcagaacacacuuaaacuggcuaccgguaugaggaauguuccugagaagcagacucgggggaucuucggagccauagcaggcuuuauugaaaacggcugggaggggaugguggauggaugguacgguuuccgucaccaaaauagcgagggcacagggcaggcugccgacuugaaaucaacccaggcggccaucaaccaaaucaauggaaagcucaaccgccugauugagaaaacgaacgaaaaguuucaucagaucgaaaaggaguucagugaaguagagggcaggauucaggauuuagagaaauauguggaagacaccaagauagaucugugguccuacaaugcagagcuccuugucgcucuggaaaaccagcacacaaucgacuugacugauagcgagaugaauaaacuauucgaaagaacccggaagcaacugcgagagaacgccgaggacauggguaaugggugcuuuaaaauuuaucauaagugugauaacgcuugcaucggcucuauccgcaauggaacauacgaccacgauguguacagagacgaagcccucaacaauagguuccagauuaagggcguugagcugaaaucaggguauaaggacuggauacuuuggaucaguuuugcaauuagcugcuuccuguugugugugguccuccugggauuuaucaugugggccugccagaaagguaacauucgguguaauaucugcauauga

SEQ ID NO: 129202 - RNA, 1701 nt, Artificial Sequence
  derived and/or modified CDS sequence (opt3) from hemagglutinin__InfluenzaA__ABG88608
augaagaccaucauugcccugagcuacauacucugccuuguguucgcucagaaacugcccggcaacgacaauuccacagcaacuuuguguuuagggcaccaugccgucccuaacggaacgcugguuaagaccaucacaaaugaucaaauugaggugacuaacgcgaccgaacuuguacagucuucaaguacagguagaaucugcgacagcccacaccagauucucgauggcgagaauuguacccugaucgacgcucuacugggggauccgcauugcgacggauuucagaacaaagaaugggauuuguucguggagaggucccgggccuauucuaauuguuaccccuaugacgucccugauuacgugucgcuccgcucacugguugcaagcaguggcacucuggaauuuaacaaugaguccuucaacuggacagguguggcccaaaaugggaccucuagcgcuugcaagcgacguuccgacaaaucauuuuucaguagacucaacugguuacaccagcugaaguauaaguacccagcacuuaaugucacgaugcccaacaaugagaaauuugauaaguuguauauauggggagugcaucacccuggcacugacagcgaucagaucucucuguacgcccaggcuuccggcaggguaaccguuucaacaaaacggagccaacagacugugauuccaaacaucgggagucgccccugggucagaggagugucuuccaggauuagcaucuacuggaccauagugaagccuggugacauucuacucaucaacucgacaggcaaucugauugccccacggggguauuucaaaauccgcucuggaaaguccucaaucaugcgaagugacgcgccgauuggcaaguguaacagcgaaugcauaacccccaaugguuccaucccuaacgauaaaccauuucagaaugucaacagaauuacguacgggcccuguccuagguauguuaagcagaauacucuuaaacuggcaacaggaaugcggaacgugccagagaagcaaacccguggcaucuucggcgccauagcuggguuuauugaaaauggaugggaggguaugauggacggcugguacggguuccgccaccagaacucugagggaacuggccaggccgcagauuugaaaagcacacaagcugccaucaaucagaucaacgguaagcucaauagacugauugagaaaaccaacgaaaaguuucaucagaucgaaaaggaguucucagaaguagaggggaggauucaggacuuagagaaauauguggaagauacgaagauagaccuguggaguuacaaugcggagcuccuugucgcccuggaaaaccaacacaccaucgauuugacagacuccgagaugaacaaacuauucgaacggacuaagaaacagcugcgagagaaugcagaggauaugggcaacggaugcuuuaagauuuaucauaagugugacaaugcuugcaucggcagcauccgcaacgggaccuacgaucacgacguguacagagacgaagcccucaauacaagguuccagauuaaaggaguugagcugaagucugguuauaaagauuggauacuuuggaucucauuugcuauuaguugcuuccuguuguguaucgugcuccugggcuuuauuaugugggccugccagaaggggaacauccgguguaauauaugcaucuga

SEQ ID NO: 129203 - RNA, 1701 nt, Artificial Sequence; identical to SEQ ID NO: 128610
  derived and/or modified CDS sequence (opt3) from hemagglutinin__InfluenzaA__ABG88619

SEQ ID NO: 129204 - RNA, 1701 nt, Artificial Sequence
  derived and/or modified CDS sequence (opt3) from hemagglutinin__InfluenzaA__ABG88630
augaagaccaucauugcccugagcuacauacucugccuuguguucgcucagaaacugcccggcaacgacaauuccacagcaacuuuguguuuagggcaccaugccgucccuaacggaacgcugguuaagaccaucacaaaugaucaaauugaggugacuaacgcgaccgaacuuguacagucuucaaguacagguagaaucugcgacagcccacaccaggugcucgauggcgagaauuguacccugauugacgcucuacugggggauccgcauugcgacggauuucagaacaaagaaugggauuuguucgucgagagguccaaggccuauucuaauuguuaccccuaugacgugccugauuacguuucgcuccggucacugguggcaagcaguggcacucuggaauuuaacaaugaguccuucaacuggacaggugucgcccaaaaugggaccucuagcgcuugcaaacgccgauccgacaagucauuuuucagucgucucaacugguuacaccagcugaaguauaaauacccagcacuuaaugugacgaugcccaacaaugagaaguuugauaaauuguauaucuggggaguacaucacccuggcacugacagcgaucagauaucucuguacgcccaggcuuccggcagaguuaccgugucaacaaagaggagccaacagacugucaucccaaacauugggagucggcccugggugcgcggagugucuuccagaaucagcauuuacuggaccaucgucaaaccuggugacauacuacucauuaacucgacaggcaaucugaucgccccaaggggguauuucaagauucggucuggaaaguccucaaucaugcgcagugacgcgccgaucggcaaauguaacagcgaaugcauuacccccaaugguuccauaccuaacgauaagccauuucagaauguuaaccgaaucacguacggggcaugucccagauaugugaaacagaagacucuuaaacuggccacaggaaugaggaauguaccugagaagcaaacccggggcauuuucggcgcuaucgccggguuuauagaaaacggaugggaggguaugauggacggcugguacggguuccgucaccaaaauucugagggaacuggccaggcagcugauuugaaaagcacacaggccgcgauuaaccagaucaaugguaagcucaaccgccugaucgaaaagaccaaugagaaauuucaucagauugaaaaggaguucucagaaguggaggggagaauccaggacuuagagaaauaugucgaagauacgaagauugaccuguggaguuacaacgccgagcuccuuguggcacuggaaaaucaacacaccauagauuugacagacuccgagaugaacaaacuauucgaaaggacuaagaagcagcugcgggagaacgcugaggauaugggcaauggaugcuuuaaaaucuaucauaagugugacaacgccugcauuggcagcauccgaaaugggaccuacgaucacgacguuuaccgcgacgaagcucucaacaauagauuccagaucaaaggaguggagcugaagucugguuauaaagauuggauucuuuggauaucauuugccaucaguugcuuccuguuguguauuguccuccugggcuuuaucaugugggcaugccagaaggggaacauuagguguaauaucugcauauga

SEQ ID NO: 129205 - RNA, 1701 nt, Artificial Sequence
  derived and/or modified CDS sequence (opt3) from hemagglutinin__InfluenzaA__ABG88641
augaagaccaucauugcccugagcuacauacucugccuuguguucgcucagaaacugcccggcaacgacaauuccacagcaacuuuguguuuagggcaccaugccgucccuaacggaacgcugguuaagaccaucacaaaugaucaaauugaggugacuaacgcgaccgaacuuguacagucuucaaguacaagcagaaucugcgacuccccacaccagauucucgauggugagaauuguacccugaucgacgcucuacugggcgauccgcauugcgacggguuucagaacaaagaaugggauuuguucguggagaggucuaaggccuauucgaauuguuaccccuaugacgucccugauuacgugucacuccggagccugguugcaaguuccggaacucuggaauuuaacaaugagucuuucaacuggacaggcguggcccaaaaugguaccagcuccgcuugcaaacgccgaucagacaagagcuuuuucagucgucucaacugguuacaccagcugaaguauaaauacccagcacuuaaugucacgaugcccaacaaugagaaguuugauaaauuguauauauggggagugcaucacccugggacugacucugaucagaucucccuguacgcccaggcuucaggcagaguaaccguuagcacaaagaggagucaacagacugugauuccaaacaucggcucugggcccuggguccggggaguguccagccgcauuucgaucuacuggaccauagugaaaccuggugacauucuacucaucaacucuacaggcaaucugauugccccaagaggguauuucaagaucagguccggaaagucaaguaucaugcggagcgacgcgccgauuggcaaauguaacuccgaaugcauaacccccaaugguucuaucccuaacgggaagccauuucagaaugucaaccgcauuacguacggagcauguccccgauauguuaaacagaauacucuuaagcuggccacaggcaugagaaacgugccugagaaacaaaccaggggcaucuucggggcuauagccggauuuauugaaaaugguugggagggcaugauggaugggugguacggauuccggcaccagaacagcgagggcacuggucaggcagcugacuugaagucaacacaagccgcgaucaaucagaucaacgggaaacucaaucgucugauugaaaagaccaacgagaaguuucaucagaucgaaaaagaguucagugaaguagagggccgcauucaggauuuagagaaguauguggaagacacgaaaauagaucugugguccuacaaugccgagcuccuugucgcacuggaaaaccaacacaccaucgacuugacagauagcgagaugaacaagcuauucgaaagaacuaaaaagcagcugagggagaaugcugaggacaugggaaacggcugcuuuaagauuuaucauaaaugugauaaugccugcaucgggucuauccggaacggaaccuacgaccacgauguguaccgagacgaagcucucaauaaccgcuuccagauuaaggguguugagcugaaaucaggcuauaaggacuggauacuuuggaucaguuuugccacaagcugcuuccuguuguguauugugcuccugggguuuaucaugugggcaugccagaaaggaaauauuagauguaacaucugcauauga

SEQ ID NO: 129206 - RNA, 1701 nt, Artificial Sequence; identical to SEQ ID NO: 128564
  derived and/or modified CDS sequence (opt3) from hemagglutinin__InfluenzaA__ABG88652

SEQ ID NO: 129207 - RNA, 1701 nt, Artificial Sequence; identical to SEQ ID NO: 128564
  derived and/or modified CDS sequence (opt3) from hemagglutinin__InfluenzaA__ABG88663

SEQ ID NO: 129208 - RNA, 1701 nt, Artificial Sequence; identical to SEQ ID NO: 128564
  derived and/or modified CDS sequence (opt3) from hemagglutinin__InfluenzaA__ABG88674

SEQ ID NO: 129209 - RNA, 1701 nt, Artificial Sequence; identical to SEQ ID NO: 128564
  derived and/or modified CDS sequence (opt3) from hemagglutinin__InfluenzaA__ABG88685

SEQ ID NO: 129210 - RNA, 1701 nt, Artificial Sequence; identical to SEQ ID NO: 128564
  derived and/or modified CDS sequence (opt3) from hemagglutinin__InfluenzaA__ABG88696

SEQ ID NO: 129211 - RNA, 1701 nt, Artificial Sequence; identical to SEQ ID NO: 128330
  derived and/or modified CDS sequence (opt3) from hemagglutinin__InfluenzaA__ABG88707

SEQ ID NO: 129212 - RNA, 1701 nt, Artificial Sequence; identical to SEQ ID NO: 128330
  derived and/or modified CDS sequence (opt3) from hemagglutinin__InfluenzaA__ABG88718

SEQ ID NO: 129213 - RNA, 1701 nt, Artificial Sequence
  derived and/or modified CDS sequence (opt3) from hemagglutinin__InfluenzaA__ABG88729
augaagaccaucauugcccugagcuacauacucugccuuguguucgcucagaaacugcccggcaacgacaauuccacagcaacuuuguguuuagggcaccaugccgucccuaacggaacgcugguuaagaccaucacaaaugaucaaauugaggugacuaacgcgaccgaacuuguacagucuucaaguacagguagaaucugcgacagcccacacaggauucucgauggcaaaaauuguacccugaucgacgcucuacugggggauccgcauugcgacggauuucagaacaaggagugggauuuguucguggaacgguccaaagccuauucuaauuguuaccccuaugacgucccugauuacgcaucgcuccgcucacugguggccagcaguggcacucuggaguuuauaaacgaagacuucaauuggacagguguugcucaggaugggggauccuaugcaugcaagcgaggcucugugaacagcuuuuucucccgucucaauugguuacacaagcuggaguacaaauauccagcccuuaacgucaccaugcccaauucaggcaaguuugacaaauuguacaucuggggagugcaucacccuaguacggauagcgaccaaacuucucuguacguaagagcuuccgggaggguuaccgugucaacaaagcggagccagcagacugucaccccaaacauugguagucgccccugggugagaggccuaucuuccaggaucagcauuuauuggacaaucgugaaaccuggggacauacuccugauuaauucgaccggaaaccuuaucgccccacggggcuacuucaagauucgcaacgguaagucuuccaucaugcgaucagaugcgccgaucgggaauuguaguagcgagugcauuacgcccaacggauccauaccuaaugacaaaccauuucagaacgucaauagaaucacuuauggcgcaugucccagguacguuaagcaaaacacacugaaauuggccaccggcaugcggaaugugccugaaaagcagacucgugggauuuucggagcuaucgccgguuuuauagagaacggcugggaagggaugguagauggaugguauggcuuccgccaccaaaauucugaggguacagggcaggcagcugaccucaaaagcacccaggccgcgauugaucagaucaacggcaagcugaauagauuaaucgagaaaacgaacgaaaaguuucaucagauugagaaggaguucucagaaguggaaggaaggauccaagaccuggagaaauacgucgaggauaccaagauugaccucuggaguuauaaugccgaacuucugguggcauuggagaaccagcacacaauagaucuaacugacuccgaaaugaauaaacuguucgagaagacccggaaacagcuccgagaaaacgcugaggauaugggcaacgggugcuuuaagaucuaccauaagugugacaaugccugcauuggaagcauccgcaacgguacauacgaccacgauguuuauagagacgaggcucugaauaacagguuccagaucaaaggcguggaacuuaagucuggguacaaagauuggauucuguggauaucauuugccaucaguugcuucuugcucugugucgugcuguuaggauuuauuaugugggcaugccaaaagggcaauauccgguguaacauuugcaucuga

SEQ ID NO: 129214 - RNA, 1701 nt, Artificial Sequence
  derived and/or modified CDS sequence (opt3) from hemagglutinin__InfluenzaA__ABG88740
augaagaccaucauugcccugagcuacauacucugccuuguguucgcucagaaacugcccggcaacgacaauuccacagcaacuuuguguuuagggcaccaugccgucccuaacggaacgcugguuaagaccaucacaaaugaucaaauugaggugacuaacgcgaccgaacuuguacagucuucaaguacagguagaaucugcgacagcccacacaggauucucgauggcaaaaauuguacccugaucgacgcucuacugggggauccgcauugcgacggauuucagaacaaggagugggauuuguucguggaacgguccaaagccuauucuaauuguuaccccuaugacgucccugauuacgcaucgcuccgcucacugguggccagcaguggcacucuggaguuuauaaacgaagacuucaauuggacagguguugcucaggaugggaaguccuaugcaugcaagcgaggaucugugaacagcuuuuucucccgucucaauugguuacacaaacuggaguacaaguauccagcccuuaacgucaccaugcccaauaacggcaaauuugacaaguuguacaucuggggcgugcaucacccuucaacggauagugaccaaacuagccuguacguaagagcuucugggaggguuaccguguccacaaaacggucacagcagacugucauuccaaauaucggaagccgccccugggugagaggucuaaguucuaggauuuccaucuauuggaccauagugaagccuggcgacauucuccugaucaacagcacagggaaccuuauugccccacggggauacuucaagauccgcaauggcaaaucgucuaucaugcgauccgaugcgccgauugguaacuguucaagugagugcauaacccccaaugggagcaucccuaacgacaagccauuucagaaugucaacagaauuacguauggagcaugucccagguacaucaaacaaaauacucugaaguuggccacaggcaugcggaacguuccugaaaaacagacccguggcauauucggggcuauugccggauuuaucgagaaugguugggaaggcaugguggaugggugguauggauuccgccaccagaacuccgagggcacuggucaggcagcugaccucaagucuacacaagccgcgaucgaucagauuaaugggaaacugaacagauuaaucgagaagaccaaugaaaaguuucaucagauugagaaagaguucagcgaaguagaaggcaggauacaagaccuggagaaguacguggaggauacgaaaaucgaccucuggucauauaacgccgaacuucuggucgcauuggagaaucagcacaccauugaucuaacagacagugaaaugaacaagcuguucgagcggacucgaaaacagcuccgcgaaaacgcugaggauaugggaaauggcugcuuuaagaucuaccauaagugugacaacgccugcaucggguccauuagaaauggaaccuacgaccacgauguguauagggacgaggcucugaacaaucgguuccagauaaaagguguugaacuuaagagcggcuacaaagauuggauccuguggauuucuuuugccaucucaugcuucuugcucugugugguccuguuaggguuuauuaugugggcaugccaaaagggaaacauccgcuguaauauaugcaucuga

SEQ ID NO: 129215 - RNA, 1701 nt, Artificial Sequence; identical to SEQ ID NO: 129101
  derived and/or modified CDS sequence (opt3) from hemagglutinin__InfluenzaA__ABG88751

SEQ ID NO: 129216 - RNA, 1701 nt, Artificial Sequence
  derived and/or modified CDS sequence (opt3) from hemagglutinin__InfluenzaA__ABG88762
augaagaccaucauugcccugagcuacauacucugccuuguguucacacagaaacugcccggcaacgacaauuccacugcuacguuguguuuagggcaccaugcagucccuaacggaacccugguuaagacaaucacuaaugaucaaauugaggugaccaacgccacagagcuaguacagucuucaaguaccgguagaaucugcgacagcccacacaggauucucgauggcaaaaauuguacucugaucgacgcgcuucugggggauccgcauugcgacggauuucagaacaaggaaugggauuuguucguggaacgguccaaggcuuauucuaauuguuaccccuaugacgucccugauuacgccucgcuccgcucacugguggcaagcaguggcacacuggaguuuauaaacgaagacuucaauuggaccgguguugcccaggaugggggauccuaugcuugcaaacgaggcucugugaacagcuuuuucucccgucucaauugguuacacaagcuggaguacaaauauccagcacuuaacgucacgaugcccaauaacggcaaguuugacaaauuguacaucuggggagugcaucacccuucaacugauagugaccaaaccagccuguacguaagagccucugggaggguuacaguguccacuaagcggucacagcagaccgucauuccaaauaucgguagccgccccugggugagaggccuaaguucuaggauuuccaucuauuggacaauagugaaaccuggggacauucuccugaucaacagcaccggaaaccuuauugcuccacggggcuacuucaagauccgcaaugguaagucgucuaucaugcgauccgaugccucaauugggaacuguaguagcgagugcauaacgccgaauggauccauccccaacgacaaaccuuuucagaaugucaacagaauuacuuauggcgcguguccaagguacguuaagcaaaauacacugaaauuggcaaccggcaugcggaacgugcccgaaaagcagacucgugggaucuucggagccauagcugguuuuauugagaauggcugggaagggaugguagauggaugguauggcuuccgccaccagaacucugaggguacagggcaggccgcagaccucaaaagcacccaagcugccaucgaucagaucaauggcaagcugaacagauuaauugagaaaacgaaugaaaaguuucaucagaucgagaaggaagugucagaggucgaaggaaggauucaagaccuggagaaauacguggaggauaccaagauagaccucuggaguuauaacgcggaacuucugguugccuuggagaaucagcacacaaucgaucuaacugacuccgaaaugaacaaacuguucgagcggacccgaaagcagcuccgcgaaaacgcagaggauaugggcaaugggugcuucaaaauuuaccauaagugugacaacgcuugcaucggaagcaucagaaaugguacauacgaccacgauguguauagggacgaggcccugaacaaucgguuucagauuaagucugucgaacuuaaaucaggcuacaaggauuggauacuguggaucaguuucgcuauuagcugcuuuuugcucugugugguacuguuaggguucaucaugugggccugccaaaaaggaaacauucgcuguaauaucugcauauga

SEQ ID NO: 129217 - RNA, 1701 nt, Artificial Sequence
  derived and/or modified CDS sequence (opt3) from hemagglutinin__InfluenzaA__ABG88773
augaagaccaucauugcccugagcuacauacucugccuuguguucgcucagaaacugcccggcaacgacaauuccacagcaacuuuguguuuagggcaccaugccgucccuaacggaacgcugguuaagaccaucacaaaugaucaaauugaggugacuaacgcgaccgagcuaguacagucuucaagugcugguagaaucugcgacagcccacacaggauucucgauggcaaaaauuguacacugaucgacgcccuucugggggauccgcauugcgacggauuucagaacaaggaaugggauuuguucguggaacgguccaaagcauauucuaauuguuaccccuaugacgucccugauuacgccucgcuccgcucacugguggcuagcaguggcacccuggaguuuauaaacgaagacuucaauuggacugguguugcacaggaugggaaguccuaugccugcaagcgaggaucugugaacagcuuuuucucccgucucaauugguuacacaaacuggaguacaaguauccagcucuuaacgucacaaugcccaauaacggcaaauuugacaaguuguacaucuggggcgugcaucacccuucaaccgauagugaccaaacgagccuguacguaagagccucugggaggguuacuguguccaccaaacggucacagcagacagucauuccaaauaucggaagccgccccugggugagaggucuaaguucuaggauuuccaucuauuggacuauagugaagccuggcgacauucuccugaucaacagcaccgggaaccuuauugcgccacggggauacuucaagauccgcaauggcaaaucgucuaucaugcgauccgaugcaccgauugguaacuguucaagugagugcauaacacccaaugggagcaucccuaacgacaagccauuucagaaugucaacagaauuaccuauggagccugucccagguacguuaaacaaaauacgcugaaguuggcuacuggcaugcggaacgugccugaaaaacagacacguggcaucuucggggccauagcaggauuuauugagaaugguugggaaggcaugguagaugggugguauggauuccgccaccagaacuccgagggcaccggucaggcugccgaccucaagucuacucaagcggccacagaucagaucaaugggaaacugaacagauuaaucgagaagaccaaugaaaaguuucaucagauugagaaagaguucagcgaaguggaaggcaggauccaagaccuggagaaguacgucgaggauacgaaaauugaccucuggucauauaacgcagaacuucugguggcuuuggagaaucagcacaccauagaucuaacagacagugaaaugaacaagcuguucgagcggacucgaaaacagcuccgcgaaaacgccgaggauaugggaaauggcugcuuuaagaucuaccauaagugugacaacgcuugcauuggguccaucagaaauggaaccuacgaccacgauguuuauagggacgaggcccugaacaaucgguuccagaucaaagguguggaacuuaagagcggcuacaaagauuggauucuguggauaucuuuugcaaucucaugcuucuugcucugugucgugcuguuaggguuuauuaugugggccugccaaaagggaaacauccgcuguaauauuugcaucuga

SEQ ID NO: 129218 - RNA, 1701 nt, Artificial Sequence
  derived and/or modified CDS sequence (opt3) from hemagglutinin__InfluenzaA__ABG88784
augaagaccaucauugcccugagcuacauacucugccuuguguucgcucagaaacugcccggcaacgacaauuccacagcaacuuuguguuuagggcaccaugccgucccuaacggaacgcugguuaagaccaucacaaaugaucaaauugaggugacuaacgcgaccgaacuuguacagucuucaaguacagguagaaucugcgacagcccacacaggauucucgauggcaaaaauuguacccugaucgacgcucuacugggggauccgcauugcgacggauuucagaacaaggagugggauuuguucguggaacgguccaaagccuauucuaauuguuaccccuaugacgucccugauuacgcaucgcuccgcucacugguggccagcaguggcacucuggaguuuauaaacgaagacuucaauuggacagguguugcucaggaugggaaguccuaugcaugcaagcgaggaucugugaacagcuuuuucucccgucucaauugguuacacaaacuggaguacaaguauccagcccuuaacgucaccaugcccaauaacggcaaauuugacaaguuguacaucuggggcgugcaucacccuucaacggauagugaccaaacuagccuguacguaagagcuucugggaggguuaccguguccacaaaacggucacagcagacugucauuccaaauaucggaagccgccccugggugagaggucuaaguucuaggauuuccaucuauuggaccauagugaagccuggcgacauucuccugaucaacagcacagggaaccuuauugccccacggggauacuucaagauccgcaauggcaaaucgucuaucaugcgauccgaugcgccgauugguaacuguucaagugagugcauaacccccaaugggagcaucccuaacgacaagccauuucagaaugucaacagaauuacguauggagcaugucccagguacguuaaacaaaauacucugaaguuggccacaggcaugcggaacgugccugaaaaacagacccguggcaucuucggggcuauagccggauuuauugagaaugguugggaaggcaugguagaugggugguauggauuccgccaccagaacuccgagggcacuggucaggcagcugaccucaagucuacacaagccgcgaucgaucagaucaaugggaaacugaacagauuaauuaagaagaccaaugagaaauuucaucagaucgaaaaggaguucagcgaaguggagggcaggauucaagaccuggaaaaauacgucgaggauacgaagauagaccucuggucauauaacgccgagcuucugguggcauuggaaaaucagcacaccaucgaucuaacagacagugagaugaacaaacuguucgaacggacucgaaagcagcuccgcgagaacgcugaagauaugggaaauggcugcuuuaagauuuaccauaaaugugacaacgccugcaucggguccaucagaaauggaaccuacgaccacgauguuuauagggacgaggcucugaacaaucgguuccagauuaaggguguggagcuuaaaagcggcuacaaggauuggauacuguggaucucuuuugccauuucaugcuucuugcucugugucgugcuguuaggguuuaucaugugggcaugccaaaaaggaaacauucgcuguaauaucugcauauga

SEQ ID NO: 129219 - RNA, 1701 nt, Artificial Sequence
  derived and/or modified CDS sequence (opt3) from hemagglutinin__InfluenzaA__ABG88806
augaagaccaucauugcccugagcuacauacucugccuuguguucgcucagaaacugcccggcaacgacaauuccacagcaacuuuguguuuagggcaccaugccgucccuaacggaacgcugguuaagaccaucacaaaugaucaaauugaggugacuaacgcgaccgaauugguacagucuucaaguacagguagaaucugcgacagcccacaccagauucucgauggcgagaauuguacccugaucgacgcccuucugggggauccgcauugcgacggauuucagaacaaagaaugggauuuguucguggagagguccaaggcuuauucuaauuguuaccccuaugacgucccugauuacgugucgcuccggucacugguugcaagcaguggcacucuggaauuuaacaaugaguccuucaacuggacagguguggcccaaaaugggaccucuagcgcuugcaaacgccgauccgacaagucauuuuucagucgucucaacugguuacaccagcugaaguauaaauacccagcacuuaaugucacggugcccaacaaugagaaguuugauaaauuguauauauggggaguacaucacccuggcacugacagcgaucagaucucucuguacgcccaggcuuccggcagaguuaccgugucaacaaagaggagccaacagacugucauuccaaacaucgggagucggcccugggugcgcggagugucuuccagaauuagcaucuacuggaccauagucaaaccuggugacauucuacucaucaacucgacaggcaaucugauugccccaaggggguauuucaagauccggucuggaaaguccucaaucaugcgcagugacgcgccgauuggcaaauguaacagcgaaugcauaacccccaaugguuccaucccuaacgauaagccauuucagaauguuaaccgaauuacguacggggcaugucccagauaugugaaacagaauacucuuaagcuggccacaggaaugaggaacguaccugagaaacaaacccggggcaucuucggcgcuauagccggguuuauugaaaauggaugggaggguaugauggacggcugguacggguuccgucaccagaacucugagggaacuggccaggcagcugaucuaaagagcacacaagccgcgaucaaucagaucaacgguaaacucaaucgccugauugaaaagaccaacgagaaguuucaucagaucgaaaaagaguucucagaaguggaggggaggauucaggacuuagagaaguaugucgaagauacgaaaauagaccuguggaguuacaaugccgagcuccuuguggcacuggaaaaccaacacaccaucgauuugacagacuccgagaugaacaagcuauucgaaagaacuaaaaagcagcugcgggagaaugcugaggauaugggcaacggaugcuuuaagauuuaucauaaaugugacaaugccugcaucggcagcauccgaaacgggaccuacgaucacgacguuuaccgcgacgaagcucucaauaacagauuccagauuaagggaguggagcugaaaucugguuauaaggauuggauacuuuggaucucauuugccauuaguugcuuccuguuguguaucguccuccugggcuuuauuaugugggcaugccagaaagggaauaucagguguaacauaugcaucuga

SEQ ID NO: 129220 - RNA, 1704 nt, Artificial Sequence
  derived and/or modified CDS sequence (opt3) from hemagglutinin__InfluenzaA__ABI16504
auggagaagaucgugcugcuccuugccauugucagccugguuaaauccgaccagauaugcaucggcuaccacgcuaacaauucuaccgaacaaguggauacaauuauggagaagaacguaacugugacgcaugcacaggacaucuuggagaaaacccacaaugggaaguuaugugaucuggacggagucaaaccccuaauucucagagauugcucaguggccgguuggcugcuuggcaacccuaugugugacgaguucaucaauguuccagaauggaguuauauaguggagaaggcgaacccggcuaaugaucugugcuaccccgggaacuuuaaugacuaugaggaauugaagcaucuccugagcaggaucaaccacuucgagaaaauucagaucauuuccaagucuucguggucagaucaugaagccagcaguggagucuccucugcauguccuuaccagggcacacccagcuuuuuccggaaugugguauggcugaucaaaaagaacaauacuuauccaaccauaaaacgcuccuacaacaauacaaaccaagaggaccucuuaauucugugggguauccaccacucaaacaaugccgcugagcagaccaagcuauaucagaacccuacuacauacauuaguguugggaccagcacguugaaucugcgacuugugccaaagaucgcaacucguucuaaagucaacggacaguccggcagaauggauuucuucuggaccauccucaagcccaaugacgccauuaacuuugaaucaaauggcaacuucauagcuccugaguacgccuauaaaaucgugaagaaaggggauagcgcgauuaugaagagugaaguggaguacggaaauugcaacacaaaaugucaaacuccaaucggugcaauaaauucuuccaugccguuucauaacauucacccccugaccaucggcgaaugcccuaaguaugucaagagcaauaaacuuguucuggccacaggguugaggaacucgccacuccgggagcgcagaaggaagcggggacuguucggcgcuaucgccgguuuuauugaagggggauggcagggcaugguggacggcugguacggguaucaucacucuaaugaacagggauccgguuacgcagcugacaaagagucaacccagaaggccaucgauggcguaacgaacaaagugaacaguauuauagacaagaugaauacucaauucgaagcggucgggcgcgaguuuaacaauuuagaacgaagaaucgagaaccugaauaagaaaauggaggauggauuccucgacguguggacauauaacgccgaacuucugguuuugauggagaaugaaaggacccuagauuuccacgacagcaacgugaagaaucuguacgauaaaguccggcuccagcugcgugacaacgcaaaggagcuuggcaaugguuguuuugaauuuuaccauaaaugcgauaacgaguguauggaguccgugcgcaaugggacuuaugacuacccccaguauucugaagaggcuagacugaagagggaagagauuagcggcguaaaguuggagucaaucggaacauaccaaauccucaguauuuauuccaccguugccagcucucuggcuuuagccauaaugguggcaggccugucacuauggaugugcaguaacgggagccuccagugccggaucuguauuuga

SEQ ID NO: 129221 - RNA, 1701 nt, Artificial Sequence; identical to SEQ ID NO: 128681
  derived and/or modified CDS sequence (opt3) from hemagglutinin__InfluenzaA__ABI20793

SEQ ID NO: 129222 - RNA, 1701 nt, Artificial Sequence
  derived and/or modified CDS sequence (opt3) from hemagglutinin__InfluenzaA__ABI20837
augaaggccaaacugcucgugcuucugugcgcuuucaccgcaacauacgccgacacuaucuguauuggcuaucacgcgaacaauagcacggauaccgucgacacaguuuuggagaagaacgugacuguaacccauuccgugaauuuacuggaagauucucacaacgggaaacuaugcagacucaagggaacagcuccccugcagcuugguaauuguucagucgccggcuggauacuggggaacccugagugcgaaaguuuguuuagcaaagaguccuggucuuacaucgcagaaaccccaaauccggagaacggaacuuguuaucccggcuacuucgccgacuaugaggaacucagggagcaacugucgucagugagcaguuuugaacgguucgagauuuuuccuaaggaguccucuuggccaaaucauacaguuaccaagggugugacggcuagcugcucccacaacgggaaaucaaguuucuacaagaaucugcucugguuaacugaaaagaacggacuguaucccaaucuuagcaagucuuacgucaacaauaaagagaaggaaguguugguacuguggggcguucaucacccuuccaacaucggcgaucagcgcgcaauuuaccacaccgagaacgccuaugugucagucgugagcagucauuacucucgacguuuuacaccagaaaucgcuaagagacccaaagugagggaccaggaggggcggauaaauuauuacuggacucuacucgagccuggagauaccaucauuuucgaagccaacgguaaucugaucgcgccaugguaugcauuugcccuuucccgcggcuucgggagcggaauuaucacaucgaacgcuucuaugggcgagugugacgccaagugccagaccccgcaaggugcaauaaauuccucacugcccuuucagaacguccacccuguuacgauuggggaauguccaaaauacgugagaaguacuaaguugaggaugguaacaggacuccggaauauccccagcauucagucccgcggccuguucggcgcuaucgccggguuuaucgagggagguuggaccggcaugauugaugggugguauggauaccaucaccagaacgaacaaggcucugguuacgcggccgaccagaaaagcacucagaaugcaauaaacgggaucacaaauaaggugaacucagucauugagaaaaugaauacccaguucacggcugugggcaaggaguucaacaaguuagaacgaagaauggagaaucugaacaaaaagguugaugacggauuucucgauaucuggaccuauaacgccgaacuucugguguugcuagagaaugaaaggacacuggacuuccacgacaguaacgucaaaaaucucuacgagaaggugaaaacucaacugaagaacaaugcuaaggagauaggcaacgggugcuuugaguucuaucauaaauguaauaacgaaugcauggaauccguaaagaauggaaccuacgauuauccuaaauacagcgaggagucuaaacuuaaccgggagaaaauugacgguguuaagcuggaaucaaugggcguguaucagaucuuggccaucuacaguacagucgcaagcucccucgugcuguuagucucucugggggccauuucguuuuggaugugcagcaauggaucccuacagugucguaucugcauuuga

SEQ ID NO: 129223 - RNA, 1701 nt, Artificial Sequence
  derived and/or modified CDS sequence (opt3) from hemagglutinin__InfluenzaA__ABI20848
augaaggccaaacugcucgugcuucugugcgcuuucaccgcaacauacgccgacacuaucuguauuggcuaucacgcgaacaauagcacggauaccgucgacacaguuuuggagaagaacgugacuguaacccauuccgugaauuuacuggaagauucucacaacgggaaacuaugcagacucaagggaacagcuccccugcagcuugguaauuguucagucgccggcuggauacuggggaacccugagugcgaaaguuuguuuagcaaagaguccuggucuuacaucgcagaaaccccaaauccggagaacggaacuuguuaucccggcuacuucgccgacuaugaggaacucaaggagcaacugucgucagugagcaguuuugaaagguucgagauuuuuccuaaggaguccucuuggccaaaucauacaguuaccaaaggugugacggcuagcugcucccacaacgggaagucaaguuucuacaaaaaucugcucugguuaacugaaaagaacggacuguaucccaaucuuagcaaaucuuacgucaacaauaaggagaaggaaguguugguacuguggggcguucaucacccuuccaacaucggcgaucagcgggcaauuuaccacaccgagaacgcccaugugucagucgugagcagucacuauucucgccgauuuacaccagaaaucgcuaaacgucccaaggugagagaccaggaggggaggauaaauuacuauuggacucuacucgagccuggagauaccaucauuuucgaagccaacgguaaucugaucgcgccaugguacgcauuugcccuuucccggggcuucgggagcggaauuaucacaucgaacgcuucuaugggcgagugugacgccaaaugccagaccccgcaaggugcaauaaauuccucacugcccuuucagaacguccauccuguuacgauuggggaauguccaaaguaugugcgcaguacuaaauugagaaugguaacaggacucaggaauauccccagcauucagucccggggccuguucggcgcuaucgccggguuuaucgagggagguuggaccggcaugauugaugggugguacggauaucaccaccagaacgaacaaggcucugguuacgcggccgacaagaaaagcacucagaaugcaauagaugggaucacaaacaaggucaauucagugauugagaagaugaacacccaguucacggcugugggcaaagaguucaauaaguuagaacgccgaauggagaaccugaauaaaaagguugacgauggauuucucgacaucuggaccuacaacgccgaacuucugguguugcuagagaacgaaagaacacuggacuuccaugauaguaaugucaaaaaccucuaugagaaggugaagaaucagcugaaaaacaaugcuaaggagauaggcaacgggugcuuugaguucuaccacaaauguaauaacgaaugcauggaauccguaaagaauggaacuuaugacuacccuaaauauagcgaggagucuaaacuuaagagggaaaagauugaugguguuaagcuggagucaaugggcguguaccaaaucuuggccaucuauaguaccgucgcaagcucccucgugcuguuagucucucugggggccauuucguuuuggaugugcagcaacggaucccuacagugucggaucugcauuuga

SEQ ID NO: 129224 - RNA, 1701 nt, Artificial Sequence; identical to SEQ ID NO: 128969
  derived and/or modified CDS sequence (opt3) from hemagglutinin__InfluenzaA__ABI20859

SEQ ID NO: 129225 - RNA, 1701 nt, Artificial Sequence
  derived and/or modified CDS sequence (opt3) from hemagglutinin__InfluenzaA__ABI20870
augaaggccaaacugcucgugcuucugugcgcuuucaccgcaacauacgccgacacuaucuguauuggcuaucacgcgaacaauagcacggauaccgucgacacaguuuuggagaagaacgugacuguaacccauuccgugaauuuacuggaagauucucacaacgggaaacuaugcagacucaagggaauagcuccccugcagcuugguaauuguucagucgccggcuggauccuggggaacccugagugcgaaaguuuguuuagcaaagaguccuggucuuacauugcagaaacaccaaauccggagaacggaaccuguuaucccggcaauuucgccgacuacgaggaacucagggagcaacugucgucagugagcaguuuugaacgguucgagaucuuuccuaaggaguccucuuggccaaaccauacuguuacaaagggugugaccgucagcugcucccacaaugggaaaucaaguuucuaucgcaaccugcucugguuaacggaaaagaauggacuguaccccaaccuuagcaaaucuuaugugaauaacaaggagaaagaaguauugguucuguggggcgugcaucacccuuccaacaugcgagaucagcgugcuauuuaccacacugagaaugcauacgucucaguggugagcagucauuauucuagaagguuuaccccagaaaucgccaagcggcccaagguccgcgaccaggagggcagaauaaacuacuauuggacacuacucgagccuggggauacuaucauuuucgaagcuaauggaaaccugaucgccccaagguacgcguuugcacuuucccgggguuucggcagcgggauuaucaccucgaaugccucuauggacgagugugaugcuaaaugccagacaccgcaaggagccauaaacuccucacugcccuuucagaauguucacccugugaccauuggcgaauguccaaaguauguacgcaguacgaaauugcgaauggugacuggucucagaaacauccccagcauucaguccagggggcuguucggagcaaucgcuggcuuuaucgagggcggguggacaggaaugauugacgguugguacggcuaucaucaccagaaugaacaagggucuggauacgccgcggaucaaaagagcacccagaacgccauaaauggcaucacuaacaaagucaauucagugauugagaagaugaacacacaguucaccgcaguugguaaagaguucaauaaguuagaacggcguauggagaaccugaacaagaaaguggacgauggguuucucgacaucuggacguacaaugcugaacuucuggucuugcuagagaacgaacgcacccuggacuuccacgauaguaaugugaagaaccucuaugagaaaguaaagucccagcugaaaaauaacgccaaggagauaggcaauggaugcuuugaguucuaccauaaguguaacaaugaaugcauggaaagcguuaaaaacggcacauaugacuacccuaaguauucugaggagucaaaacuuaauagagaaaagauugauggggugaaacuggagaguaugggagucuaccagaucuuggcuaucuauagcacuguggccuccucucucguccuguuagugucgcugggugcaauuagcuuuuggaugugcuccaacggcucacuacaguguaggaucugcauuuga

SEQ ID NO: 129226 - RNA, 1701 nt, Artificial Sequence; identical to SEQ ID NO: 129037
  derived and/or modified CDS sequence (opt3) from hemagglutinin__InfluenzaA__ABI20881

SEQ ID NO: 129227 - RNA, 1701 nt, Artificial Sequence
  derived and/or modified CDS sequence (opt3) from hemagglutinin__InfluenzaA__ABI20892
augaagaccaucauugcccugagcuacauacucugccuuguguucgcucagaaacugcccggcaacgacaauuccacagcaacuuuguguuuagggcaccaugccgucccuaacggaacgcugguuaagaccaucacaaaugaucaaauugaggugacuaacgcgaccgaacuuguacagucuucaaguacagguagaaucugcgacagcccacacaggauucucgauggcaaaaauuguacccugaucgacgcucuacugggggauccgcauugcgacggauuucagaacaaggagugggauuuguucguggaacgguccaaagccuauucuaauuguuaccccuaugacgucccugauuacgcaucgcuccgcucacugguggccagcaguggcacucuggaguuuacaaaggaagguuucaacuggaccgggguugcucaggacggaaaguccuaugcaugcaaacgaggcucugugaauagcuuuuucucccgucucaacugguuacacaagcuggaguacaaauauccagcccuuaaugucacgaugcccaacaaugauaaguuugacaaauuguacauauggggcgugcaucacccuucaacugauagugaccaaaccagccuguacguacaggcuucugggagaguuacaguguccacuaagaggucacagcagaccgucaucccaaacauuggaagccggcccugggugcgcgguaucaguucuagaauuuccauccacuggacaauagugaagccuggcgacauucuacucaucaccagcacggggaaucugauugccccaaggggauauuucaaaauccggaacggcaagucgucuaucaugcgcuccgaugcgccgauugguaacuguaauucagagugcauaacucccaacgggaguaucccuaaugacaaaccauuucaaaacgucaaucgaauuacauacggagcaugucccagauauguuaagcagaacacccuuaaacuggccacuggcaugaggaaugugccugaaaagcagacacggggcaucuucggggcuauagccggauuuauugagaacgguugggaaggcaugguagaugggugguacggauuccgucaucagaauagcgagggcaccggucaagcagcugacuugaaauccacgcaggccgcgaucgaucagaucaacgggaagcucaaucgccugauugagaagaccaacgaaaaauuucaccaaaucgagaaggaguucucugaaguggaaggcaggauucaggacuuagagaaauaugucgaggauacaaagauagaccuguggagcuacaaugccgaacuccuuguggcacuggagaaccagcauacuaucgauuugaccgacucagaaaugaauaaacuauucgagagaacacggaagcagcugcgagaaaacgcugaggauaugggaaacggcugcuuuaagauuuaucacaaaugugacaaugccugcaucgggaguauccgcaacggaacuuacgaccacgauguuuacagagacgaggcucucaauaacagguuccaaauuaaggguguggaacugaaauccggcuauaaggauuggauacuuuggaucagcuuugccauuucuugcuuccuguugugugucgugcuccugggguuuaucaugugggcaugccagaaaggaaauauucgguguaacaucugcauauga

SEQ ID NO: 129228 - RNA, 1701 nt, Artificial Sequence
  derived and/or modified CDS sequence (opt3) from hemagglutinin__InfluenzaA__ABI20903
augaagaccaucauugcccugagcuacauacucugccuuguguucgcucagaaacugcccggcaacgacaauuccacagcaacuuuguguuuagggcaccaugccgucccuaacggaacgcugguuaagaccaucacaaaugaucaaauugaggugacuaacgcgaccgaacuuguacagaauagcccaacagguagaaucugcgacucaccgcacaggauucucgauggcaaaaacuguacccugaucgacgcucuacugggggauccccauugcgacggauuucagaauaaggagugggauuuguucguggaacggaguaaagccuauagcaacuguuacccuuaugacgucccagauuacgcaucccuccgcucucugguggccucgucaggcacucuggaguuuacaaaugaaaacuucaauuggaccgguguugcucaggacgggaagucuuaugcaugcaagcgaggaagugugaacuccuuuuucucucgucucaauugguuacacaaacuggaguacaaguaucccgcccuuaacgucacgaugccuaauaacggcaaauuugauaaguuguacauauggggcgugcaucacccaagcacugacuccgaucaaaccucacuguacguaagagcuagugggaaaguuacagugagcacuaagaggucucagcagaccgucauccccgacauuggauaucggccuugggugcgcggucuauccucaagaaucagcauuuacuggacaaucgugaagccaggcgacauacuccugauucacaguaccgggaaccuuaucgccccgaggggauauuucaaaauucggaauggcaagucuuccaucaugcgcagcgaugcgcccaucgguaacuguucgucugagugcauuacgccuaauggguccauaccaaacgacaaacccuuucagaaugucaaccgaaucacuuacggagcauguccuagauauguuaagcaaaauacacugaaauuggccaccggcaugaggaacgugccagaaaagcagacucggggcauuuucggggcuaucgccggauuuauagagaaugguugggaaggcaugguagaugggugguacggauuccgucaucagaacucagagggcacaggucaggcagcugaccucaaaaguacccaagccgcgauugaucagaucaaugggaagcugaaccgcuuaguggagaagacgaaugaaaaauuucaccagaucgagaaggaguucagcgaagucgaaggcaggauucaagaccuggagaaauauguggaggauaccaagaucgaccucugguccuacaacgccgaacuucugguugcauuggagaaucagcauacaauugaucuaacugacucugaaaugaacaaacuguucgagagaacccggaagcagcuccgagaaaacgcugaggauaugggaaauggcugcuuuaagauauaccacaaaugugacaacgccugcaucgggagcauucgcaauggaacauaugaccacgauguguacagagacgaggcucugaacaauagguuccagaucaagggugucgaacuuaaaucaggcuauaaggauuggauccuguggauuaguuuugccauauccugcuucuugcucugugugguacuguuaggguuuaucaugugggcaugccaaaaaggaaacauucgguguaauaucugcauuuga

SEQ ID NO: 129229 - RNA, 1701 nt, Artificial Sequence
  derived and/or modified CDS sequence (opt3) from hemagglutinin__InfluenzaA__ABI20914
augaagaccaucauugcccugagcuacauacucugccuuguguucgcucagaaacugcccggcaacgacaauuccacagcaacuuuguguuuagggcaccaugccgucccuaacggaacgcugguuaagaccaucacaaaugaucaaauugaggugacuaacgcgaccgaacuuguacagucuucaaguacagguagaaucugcgacagcccacacaggauucucgauggcaaaaauuguacccugaucgacgcucuacugggggauccgcauugcgacggauuucagaacaaggagugggauuuguucguggaacgguccaaagccuauucuaauuguuaccccuaugacgucccugauuacgcaucgcuccgcucacugguggccagcaguggcacucuggaguuuauaaacgaagacuucaauuggacagguguugcucaggaugggaaguccuaugcaugcaagcgaggaucugugaacagcuuuuucucccgucucaauugguuacacaaacuggaguacaaguauccagcccuuaacgucaccaugcccaauaacggcaaauuugacaaguuguacaucuggggcgugcaucacccuucaacggauagugaccaaacuagccuguacguaagagcuucugggaggguuaccguguccacaaaacggucacagcagacugucauuccaaauaucggauuccgccccugggugagaggucuaagcaguaggauuucuaucuauuggaccauagugaagccuggcgacauucuccugaucaacuccacagggaaccuuauugccccacggggauacuuuaagauccgcaauggcaaaagcucgaucaugcgaucugaugcgccgauugguaacuguuccucagagugcauaacccccaaugggaguaucccuaacgacaagccauuccagaaugucaacagaauuacguauggagcaugucccagguacguuaaacaaaauacucugaaguuggccacaggcaugcggaacgugccugaaaaacagacccguggcaucuuuggggcuauagccggauucauugagaaugguugggaaggcaugguagaugggugguauggauuucgccaccagaacagcgagggcacuggucaggcagcugaccucaaguccacacaagccgcgaucgaucagaucaaugggaaacugaacagauuaauugagaagaccaaugaaaaguuccaucagaucgagaaagaguucucugaaguggaaggcaggauucaagaccuggagaaguacgucgaggauacgaaaauagaccucuggagcuauaacgccggacuucugguggcauuggaaaaucagcacaccaucgaucuaacagacucagagaugaacaagcuguuugaacggacucgaaaacagcuccgcgagaacgcugaagauaugggcaaugggugcuucaagauuuaccauaagugugacaacgccugcaucggaaguaucagaaaugguaccuacgaccacgauguuuauagggacgaggcucugaacaaucgguuucagauuaaaggcguggagcuuaaguccggguacaaagauuggauacuguggaucagcuucgccauuucuugcuuuuugcucugugucgugucacugggauucaucaugugggcaugccaaaagggcaacauucgcuguaauaucugcauauga

SEQ ID NO: 129230 - RNA, 1701 nt, Artificial Sequence; identical to SEQ ID NO: 129114
  derived and/or modified CDS sequence (opt3) from hemagglutinin__InfluenzaA__ABI20925

SEQ ID NO: 129231 - RNA, 1701 nt, Artificial Sequence; identical to SEQ ID NO: 129114
  derived and/or modified CDS sequence (opt3) from hemagglutinin__InfluenzaA__ABI20936

SEQ ID NO: 129232 - RNA, 1701 nt, Artificial Sequence
  derived and/or modified CDS sequence (opt3) from hemagglutinin__InfluenzaA__ABI20947
augaagaccaucauugcccugagcuacauacucugccuuguguucgcucagaaacugcccggcaacgacaauuccacagcaacuuuguguuuagggcaccaugccgucccuaacggaacgcugguuaagaccaucacaaaugaucaaauugaggugacuaacgcgaccgaacuuguacagucuucaaguacagguagaaucugcgacagcccacacaggauucucgauggcaaaaauuguacccugaucgacgcucuacugggggauccgcauugcgacggauuucagaacaaggagugggauuuguucguggaacgguccaaagccuauucuaauuguuaccccuaugacgucccugauuacgcaucgcuccgcucacugguggccagcaguggcacucuggaguuuauaaacgaagacuucaauuggacagguguugcucaggaugggaaguccuaugcaugcaagcgaggaucugugaacagcuuuuucucccgucucaauugguuacacaaacuggaguacaaguauccagcccuuaacgucaccaugcccaauaacggcaaauuugacaaguuguacaucuggggcgugcaucacccuucaacggauagugaccaaacuagccuguacguaagagcuucugggaggguuaccguguccacaaaacggucacagcagacugucauuccaaauaucggauuccgccccugggugagaggucuaagcaguaggauuucuaucuauuggaccauagugaagccuggcgacauucuccugaucaacuccacagggaaccuuauugccccacggggauacuuuaagauccgcaauggcaaaagcucgaucaugcgaucugaugcgccgauugguaacuguuccucagagugcauaacccccaaugggaguaucccuaacgacaagccauuccagaaugucaacagaauuacguauggagcaugucccagguacguuaaacaaaauacucugaaguuggccacaggcaugcggaacgugccugaaaaacagacccguggcaucuuuggggcuauagccggauucauugagaaugguugggaaggcaugguagaugggugguauggauuucgccaccagaacagcgagggcacuggucaggcagcugaccucaaguccacacaagccgcgaucgaucagaucaaugggaaacugaacagauuaauugagaagaccaaugaaaaguuccaucagaucgagcaagaguucucugaaguggaaggcaggauucaggaccuggagaaauacgucgaggauacgaagauagaccucuggagcuauaacgccggacuucugguggcauuggaaaaucagcacaccaucgaucuaacagacucagagaugaacaaacuguuugaacggacucgaaagcagcuccgcgagaacgcugaagauaugggcaaugggugcuucaaaauuuaccauaagugugacaacgccugcaucggaaguaucagaaaugguaccuacgaccacgauguuuauagggacgaggcucugaacaaucgguuucaaauuaagggcguggagcuuaaauccggguacaaggauuggauacuguggaucagcuucgccauuucuugcuuuuugcucugugucgugcuguuaggauucaucaugugggcaugccagaaaggcaacauucgcuguaauaucugcauauga

SEQ ID NO: 129233 - RNA, 1701 nt, Artificial Sequence
  derived and/or modified CDS sequence (opt3) from hemagglutinin__InfluenzaA__ABI20958
augaagaccaucauugcccugagcuacauacucugccuuguguucgcucagaaacugcccggcaacgacaauuccacagcaacuuuguguuuagggcaccaugccgucccuaacggaacgcugguuaagaccaucacaaaugaucaaauugaggugacuaacgcgaccgaacuuguacagucuucaaguacagguagaaucugcgacagcccacacaggauucucgauggcaaaaauuguacccugaucgacgcucuacugggggauccgcauugcgacggauuucagaacaaggagugggauuuguucguggaacgguccaaagccuauucuaauuguuaccccuaugacgucccugauuacgcaucgcuccgcucacugguggccagcaguggcacucuggaguuuauaaacgaagacuucaauuggacagguguugcucaggaugggaaguccuaugcaugcaagcgaggaucugugaacagcuuuuucucccgucucaauugguuauacaaacuggaguauaaguacccagcccuuaacgucaccaugcccaauaacggcaaauuugacaaguuguacaucuggggcgugcaccauccuucaacggauagugaccaaacuagccuguauguaagagcuucugggaggguuaccguguccacaaaacggucacagcagacugucauuccaaauaucggauuccgccccugggugagaggucuaagcaguaggauuucuaucuacuggaccauagugaagccuggcgacauucuccugaucaacuccacagggaaccuuauugccccacggggauauuuuaagauccgcaauggcaaaagcucgaucaugcgaucugaugcgccgauugguaacuguuccucagagugcauaacccccaaugggaguaucccuaacgacaagccauuccagaaugucaacagaauuacguacggagcaugucccagguauguuaaacaaaauacucugaaguuggccacaggcaugcggaacgugccugaaaaacagacccguggcaucuuuggggcuauagccggauucauugagaaugguugggaaggcaugguagaugggugguacggauuucgccaccagaacagcgagggcacuggucaggcagcugaccucaaguccacacaagccgcgaucgaucagaucaaugggaaacugaacagauuaauugagaagaccaaugaaaaguuccaccagaucgagaaagaguucucugaaguggaaggcaggauucaagaccuggagaaguaugucgaggauacgaaaauagaccucuggagcuacaacgccggacuucugguggcauuggaaaaucagcauaccaucgaucuaacagacucagagaugaacaagcuguuugaacggacucgaaaacagcuccgcgagaacgcugaagauaugggcaaugggugcuucaagauuuaccacaagugugacaacgccugcaucggaaguaucagaaaugguaccuaugaccaugauguuuacagggacgaggcucugaacaaucgguuucagauuaaaggcguggagcuuaaguccggguauaaagauuggauacuguggaucagcuucgccauuucuugcuuuuugcucugugucgugcuguuaggauucaucaugugggcaugccaaaagggcaacauucgcuguaauaucugcauauga

SEQ ID NO: 129234 - RNA, 1701 nt, Artificial Sequence
  derived and/or modified CDS sequence (opt3) from hemagglutinin__InfluenzaA__ABI20969
augaagaccaucauugcccugagcuacauacucugccuuguguucgcucagaaacugcccgucaacgacaauuccacagcaacuuuguguuuaggccaccaugccguuccuaacgggacgcuggugaagaccaucacaaaugaucacauugagguaacuaacgcgaccgaacuugugcaaucuucaaguacaggaagaaucugcgacagcccacaucagauucucgauggugagaauuguacccugaucgacgcucuacugggcgauccgcacugcgacggguuucagaacaaagaauggaauuuguucgucgagagguccacugccuauucuaacuguuaccccuaugaugugccugacuacgcaucgcuccggucacugguugccagcaguggaacacuggaauuuaauaacgaguccuucaauuggaccggcguggcucagaacgguacgucuagcgcaugcaagcgccgauccauaaaaucauuuuucagucgucucaauugguuacaucaacugaaguauaaguacccagcccuuaacgucacuaugcccaauaacgagaaauuugauaaguuguauaucuggggagugcaccacccuagcaccgacucugaucagauuucccuguacgcucaggccucagggagaguaacaguuagcacuaaaaggagucagcaaaccgugaucccaaacauuggcucucggcccuggguccgcggcguguccagcagaaucucgauauacuggacaauugugaagccuggggacauccuacucauuaauucuaccggaaaccugaucgcgccaagggguuauuucaaaauccgguccggcaagucaaguauuaugcgcagcaaugcaccgauagggaaguguaacuccgaaugcaucacgcccaauggaucuauuccuaacgauaaaccauuucagaaugucaaccgaaucacuuacggcgccugucccagauauguuaagcagaauacacuuaaacuggcuaccgguaugaggaacgugccugagaagcagacucgggggauauucggagccauugcaggcuuuaucgaaaauggcugggaggggaugguagacggaugguacgguuuccgucaucaaaacagcgagggcacagggcaggcugccgacuugaaaucaacccaggcggccaucaaucaaauuaacggaaagcucaaucgccugaucgagaaaacgaacgaaaaguuucaccagauugaaaaggaguucagugaaguggagggcagaauacaggauuuagagaaauaugucgaagacaccaagaucgaucugugguccuacaacgcagagcuccuuguggcucuggaaaaucagcauacaauugacuugacugauagcgagaugaacaaacuauucgaaaggacccggaagcaacugcgagagaaugccgaggacauggguaacgggugcuuuaaaaucuaucacaagugugauaaugcuugcaucggcucuauucgcaacggaacauacgaccacgauguuuacagagacgaagcccucaauaacagguuccagauaaagggcguggagcugaaaucaggguauaaggauuggauccuuuggauuaguuuugcaaucagcugcuuccuguugugugucgugcuccugggauuuauuaugugggccugccagaaagguaauauccgguguaacauaugcaucuga

SEQ ID NO: 129235 - RNA, 1701 nt, Artificial Sequence
  derived and/or modified CDS sequence (opt3) from hemagglutinin__InfluenzaA__ABI20980
augaagaccaucauugcccugagcuacauacucugccuuguguucgcucagaaacugcccgucaacgacaauuccacagcaacuuuguguuuaggccaccaugccguuccuaacgggacgcuggugaagaccaucacaaaugaucacauugagguaacuaacgcgaccgaacuugugcaaucuucaaguacaggaagaaucugcgacagcccacaucagauucucgauggugagaauuguacccugaucgacgcucuacugggcgauccgcacugcgacggguuucagaacaaagaaugggauuuguucgucgagagguccacugccuauucuaauuguuaccccuaugacgugccugauuacgcaucgcuccggucacugguugccagcaguggaacacuggaauuuaacaaugaguccuucaacuggaccggcguggaccagaaugguacgucuagcgcuugcaagcgccgauccacuaaaucauuuuucagucgucucaacugguuacaucaacugaaguauaaguacccagcacuuaaugucaccaugcccaacaaugagaaauuugauaaguuguauauauggggagugcaccacccuagcacagacucugaucagaucucccuguacgcccaggcuucagggagaguaacuguuagcaccaaaaggagucagcaaacagugaccccaaacauuggcucucggcccuggguccgcggcguguccagcagaaucucgauuuacuggacgaucgugaagccuggggacauacuacucauuaacucuacuggaaaucugaucgccccaagggguuauuucaaaauucgguccggcaagucaaguaucaugcgcagcaacgcgcuuaucgggaaguguaauuccgaaugcauuacaccgaacggaucuauacccaaugacaaaccuuuucagaacgucaaucgaaucaccuacggcgcauguccaagauauguuaagcagaacacucugaaauuggccacagguaugaggaaugugcccgagaagcagacccgggggauuuucggagcuaucgccggcuuuauagaaaacggcugggaggggaugguagauggaugguacgguuuccgucaucaaaauagcgagggcacggggcaggcagcugaccucaaaucaacccaggccgcgauuaaccaaaucaauggaaagcugaaccgcuuaaucgagaaaacaaaugaaaaguuucaccagauugaaaaggaguucagugaaguggagggcagaauccaggaucuggagaaauaugucgaagacacuaagauugaucucugguccuacaacgccgagauacuuguggcacuggaaaaccagcauaccaucgacuugacagauagcgagaugaauaaacuauucgaaaggacucggaagcaacugcgagagaacgcugaggacauggguaaugggugcuuuaaaauuuaucacaagugugauaacgccugcaucggcucuauccgcaauggaaccuacgaccacgauguuuacagagacgaagcucucaacaauagguuccagauuaagggcguggagcugaaaucaggguauaaggacuggauacuuuggaucaguuuugccauuagcugcuuccuguugugugucgugcuccugggauuuaucaugugggcaugccagaaagguaacauucgguguaauaucugcauauga

SEQ ID NO: 129236 - RNA, 1701 nt, Artificial Sequence
  derived and/or modified CDS sequence (opt3) from hemagglutinin__InfluenzaA__ABI20991
augaagaccaucauugcccugagcuacauacucugccuuguguucgcucagaaacugcccggcaacgacaauuccacagcaacuuuguguuuagggcaccaugccgucccuaacggaacgcugguuaagaccaucacaaaugaucaaauugaggugacuaacgcgaccgaacuuguacagucuucaaguacagguggcaucugcgacagcccacaccagauucucgauggggagaauuguacccugaucgacgcucuacugggagauccgcauugcgacggcuuucagaacaaagaaugggauuuguucguggagagauccaaggccuauucuaauuguuaccccuaugacgucccugauuacgcaucgcucaggucacugguggccagcagugguacucuggaauuuaacaaugaguccuucaacuggacagggguugcucaaaauggaaccucuagcgcaugcaaacggcgcuccaacaagucauuuuucagucgacucaauugguuacaccagcugaaguauaaauacccagcccuuaacgugacgaugcccaauaacgagaaguuugacaaauuguauauauggggcguccaucacccuagcacugauucugaccagaucucccuguacgcucaggccccaggccgugugaccguaucaacaaagagaagccaacagacuguuauucccaacaucgggaguaggccuugggugcggggagucucuucccgcauuagcaucuacuggaccauagugaaaccaggugauauucuacucaucaauuguacaggcaaccugauugcgccgagaggguauuucaagaucaggucgggaaagucuuccaucaugcggucagacgcaaguauuggcaaaugcaauagcgaauguauaacccccaacgguuccaucccuaaugacaagccauuucagaacgugaaucgcauuacguacggggccugcccccgauaugucaaacagaacacucuuaagcuggcuacaggaaugagaaauguuccugagaaacaaaccaggggcaucuucggcgccauagcaggguuuauugaaaacggaugggaggguaugguggauggcugguacggguuccggcaccagaauagcgagggaacuggccaggcugccgacuugaagucuacacaagcggccaucaaccagaucaaugguaaacucaaccgucugauugaaaagaccaaugagaaguuucaucagaucgaaaaagaguucucagaaguagaggggcgcauucaggauuuagagaaguauguggaagacacgaaaauagaucuguggaguuacaacgcagagcuccuugucgcucuggaaaaccaacacaccaucgacuugacagauuccgagauuaauaagcuauucgaaagaacuaaaaagcagcugagggagaacgccgaggacaugggcaauggauguuuuaagaucuaucauaaaugcgauaacgcuugcaucggcagcauucggaaugggaccuacgaccacgauguguaccgagacgaagcccucaacaaucgcuuccagauaaagggaguugagcugaaaucugguuauaaggacuggauccuuuggauuucauuugcaaucaguuguuuccuguugugcgugguccuccugggcuuuauuaugugggccugucagaaagggaacaucagaugcaauauauguaucuga

SEQ ID NO: 129237 - RNA, 1701 nt, Artificial Sequence; identical to SEQ ID NO: 128758
  derived and/or modified CDS sequence (opt3) from hemagglutinin__InfluenzaA__ABI21002

SEQ ID NO: 129238 - RNA, 1701 nt, Artificial Sequence; identical to SEQ ID NO: 129202
  derived and/or modified CDS sequence (opt3) from hemagglutinin__InfluenzaA__ABI21013

SEQ ID NO: 129239 - RNA, 1701 nt, Artificial Sequence; identical to SEQ ID NO: 128688
  derived and/or modified CDS sequence (opt3) from hemagglutinin__InfluenzaA__ABI21024

SEQ ID NO: 129240 - RNA, 1701 nt, Artificial Sequence; identical to SEQ ID NO: 128564
  derived and/or modified CDS sequence (opt3) from hemagglutinin__InfluenzaA__ABI21035

SEQ ID NO: 129241 - RNA, 1701 nt, Artificial Sequence
  derived and/or modified CDS sequence (opt3) from hemagglutinin__InfluenzaA__ABI21046
augaagaccaucauugcccugagcuacauacucugccuuguguucgcucagaaacugcccggcaacgacaauuccacagcaacuuuguguuuagggcaccaugccgucccuaacggaacgaucguuaagaccauuacaaaugaucaaaucgaggugacuaacgcgaccgaacugguacagucuucaaguacagguggcauuugcgacagcccacaccagauccuagauggggagaauuguacccucauagacgcucugcuuggagauccgcagugcgacggcuuucaaaacaaaaagugggaucuguucguggaaagauccaaagccuauucuaauuguuaccccuaugacgucccugaucaugcaucguugaggucacucguggccagcagugguacucuggaguuuaacaaugaauccuucgacuggacagggguuacccagaacggaacgucuagcgcuugcaagcggcgcuccaauaagucauuuuucagucgacugaacuggcucacucacuuaaaauacaaguauccagcacugaaugugaccaugcccaacaaugagaaauuugauaaacuuuacaucuggggcguccaucacccuggcacagacaacgaucagauuagcuuguaugcccaggcuucugggcguaucacuguguccaccaagagaucacaacagacaguaauuccaaacaucggaagcaggccccggguucgcgacgugaguucuagaauauccauuuacuggaccaucgucaagccuggugacauucugcuaaucaauagcacgggcaaccucaucgccccaaggggguacuucaagauucggucgggaaaaucuuccauaaugcgcucagaugcgccgaucggcaaguguaauagugagugcauuacucccaacgguagcaucccuaaugacaaaccauuucagaacgugaaucgaauaacauauggggcaugucccagauacgugaagcagaacacccugaaacuugccacuggaaugaggaaugucccugaaaagcaaacacggggcauuuucggcgcuaucgccggguuuaucgagaacggaugggaagguaugguugauggcugguauggguuccgucaccaaaauuccgagggaaccggccaggcagcugaccugaaaucuacgcaggccgcgauuaaccagaucaaugguaaguugaaccgccucauugggaagaccaaugagaaauuucaucagauagaaaaggaguucagcgaaguggagggcagaauccaggaucuggaaaaauacguagaggacacaaagauugauuuauggucauauaacgccgagcugcucguggcacuugaaaaccaacacacuaucgaccugaccgauagugagaugaauaaauuguucgaaaggacaaagaagcagcuacgggagaacgcugaagacaugggaaauggcugcuuuaaaaucuaccauaagugugauaacgccugcauuggguccauacgaaauggaacuuaugaccacgacgucuaccgcgaugaggcucugaacaauagauuccagaucaaagguguggagcucaagagcggcuacaaagacuggauucuguggaucucuuuugccauuucaugcuuccuucuguguguugcauugcucggguuuaucaugugggccugccagaagggaaacauaagguguaauaucugcauuuga

SEQ ID NO: 129242 - RNA, 1701 nt, Artificial Sequence
  derived and/or modified CDS sequence (opt3) from hemagglutinin__InfluenzaA__ABI21057
augaagaccaucauugcccugagcuacauacucugccuuguguucgcucagaaacugcccggcaacgacaauuccacagcaacuuuguguuuagggcaccaugccgucccuaacggaacgaucguuaagaccauuacaaaugaucaaaucgaggugacuaacgcgaccgaacugguacaaaauucuucaacagguggcauuugcgacaguccacaccagauccuagauggggagaacuguacccucauagacgcucugcuuggagauccgcagugcgacggcuuucagaauaaaaagugggaucuguucguggaaagaagcaaagccuauuccaacuguuaccccuaugacgucccugaucaugcaucuuugaggucgcucguggccucaagcgguacucuggaguuuaauaacgaaaguuucgacuggacagggguuacccagaauggaacguccucugcuugcaagcggcgcagcaacaaguccuuuuucucacgacugaauuggcucacucacuuaaaauacaaguauccagcacugaacgugaccaugcccaauaacgagaaauuugauaaacuuuacaucuggggcguccaucacccuggcacagacagugaucagauuagcuuguaugcccaggcuucugggcguaucacuguguccaccaagagaucacaacagacaguaauuccaaacaucggaagcaggccccggguucgcgacgugaguucuagaauauccauuuacuggaccaucgucaagccuggugacauucugcuaaucaauagcacgggcaaccucaucgccccaaggggguacuucaagauucggucgggaaaaucuuccauaaugcgcucagaugcgccgaucggcaaguguaauagugagugcauuacucccaacgguagcaucccuaaugacaaaccauuucagaacgugaaucgaauaacauauggggcaugucccagauacgugaagcagaacacccugaaacuugccacuggaaugaggaaugucccugaaaagcaaacacggggcauuuucggcgcuaucgccggguuuaucgagaacggaugggaagguaugguugauggcugguauggguuccgucaccaaaauuccgagggaaccggccaggcagcugaccugaaaucuacgcaggccgcgauuaaccagaucaaugguaaguugaaccgccucauugggaagaccaaugagaaauuucaucagauagaaaaggaguucagcgaaguggagggcagaauccaggaucuggaaaaauacguagaggacacaaagauugauuuauggucauauaacgccgagcugcucguggcacuugaaaaccaacacacuaucgaccugaccgauagugagaugaauaaauuguucgaaaggacaaagaagcagcuacgggagaacgcugaagacaugggaaauggcugcuuuaaaaucuaccauaagugugauaacgccugcauuggguccauacgaaauggaacuuaugaccacgacgucuaccgcgaugaggcucugaacaauagauuccagaucaaagguguggagcucaagagcggcuacaaagacuggauucuguggaucucuuuugccauuucaugcuuccuucuguguguugcauugcucggguuuaucaugugggccugccagaagggaaacauaagguguaauaucugcauuuga

SEQ ID NO: 129243 - RNA, 1701 nt, Artificial Sequence; identical to SEQ ID NO: 128291
  derived and/or modified CDS sequence (opt3) from hemagglutinin__InfluenzaA__ABI21068

SEQ ID NO: 129244 - RNA, 1701 nt, Artificial Sequence; identical to SEQ ID NO: 128330
  derived and/or modified CDS sequence (opt3) from hemagglutinin__InfluenzaA__ABI21079

SEQ ID NO: 129245 - RNA, 1701 nt, Artificial Sequence; identical to SEQ ID NO: 129161
  derived and/or modified CDS sequence (opt3) from hemagglutinin__InfluenzaA__ABI21090

SEQ ID NO: 129246 - RNA, 1701 nt, Artificial Sequence; identical to SEQ ID NO: 129161
  derived and/or modified CDS sequence (opt3) from hemagglutinin__InfluenzaA__ABI21101

SEQ ID NO: 129247 - RNA, 1701 nt, Artificial Sequence
  derived and/or modified CDS sequence (opt3) from hemagglutinin__InfluenzaA__ABI21123
augaagaccaucauugcccugagcuacauacucugccuuguguucgcucagaaacugcccggcaacgacaauuccacagcaacuuuguguuuagggcaccaugccgucccuaacggaacgaucguuaagaccauuacaaaugaucaaaucgaggugacuaacgcgaccgaacugguacagucuucaaguacagguggcauuugcgacagcccacaccagauccuagauggggagaauuguacccucauagacgcucugcuuggagauccgcagugcgacggcuuucaaaacaaaaagugggaucuguucguggaaagauccaaagccuauucuaauuguuaccccuaugacgucccugauuacgcaucguugaggucacucguggccagcagugguacucuggaguuuaacaaugaauccuucaacuggacagggguuacccagaauggaacgucuagcgcuugcaagcggcgcuccaacaauucauuuuucagucgacugaacuggcucacucauuuaaaguuuaaauauccagcacugaaugugaccaugcccaacaacgagaaguucgacaaacuuuacaucuggggcguccaccauccuggcacaaauaacgaucagauuagcuuguaugcccaggcuucugggcguaucacuguguccaccaagagaucacaacagacaguaauuccaaauaucggaagcaggccccggguucgcgacauaccuaguagaauuucuaucuacuggaccauugugaaaccaggugauauccugcuaaucaacuccacgggcaaucucauugccccgaggggguacuuuaagauacggagcggaaagucgucuaucaugcgcuccgacgcgcccauuggcaaauguaacucagagugcaucacuccuaaugguaguauaccaaacgacaagcccuuccagaaugucaaccgaauuacauauggggcauguccuagauacgugaaacagaauacccugaaacuugccacuggaaugaggaacgugccagaaaagcaaacacggggcaucuuuggcgcuaucgccggguucauugagaauggaugggaagguauggucgauggcugguauggguuucgucaccagaacagcgagggaaucggccaggcagcugaccugaaguccacccaagccgcgauuaaucagauaaacgguaaauugaaccgccucaucgggaagacgaaugagaaguuccaccagauugaaaaagaguucucugaaguugagggcagaauccaggaucuggaaaagcauguggaggacaccaaaaucgauuuauggagcuacaacgccgagcugcucguagcacuugaaaaucaacacacaauugaccugacugauucagagaugaacaaguuguuugaaaggaccaaaaagcagcuacgggagaaugcugaagacaugggaaacggcugcuucaagauauaucauaaaugugauaaugccugcaucgggaguauucgaaacggaacauacgaccacgauguguaucgcgacgaggcucugaauaacagauuucagaucaagggugucgagcucaaauccggcuacaaggacuggauucuguggaucagcuucgccauaucuugcuuucuucuguguguggcauugcucggguucaucaugugggccugccagaaaggaaauauuagguguaacaucugcauuuga

SEQ ID NO: 129248 - RNA, 1701 nt, Artificial Sequence
  derived and/or modified CDS sequence (opt3) from hemagglutinin__InfluenzaA__ABI21134
augaagaccaucauugcccugagcuacauacucugccuuguguucgcucagaaacugcccggcaacgacaauuccacagcaacuuuguguuuagggcaccaugccgucccuaacggaacgguugugaagaccaucacaaaugaucaaauugagguaacuaacgcgaccgaacuggugcagucuucaaguacagguggcaucugcgacagcccacaccagauucuagauggggagaauuguacccucauggacgcucugcuuggagauccgcagugcgacggcuuucaaaacaaaaagugggaucuguucgucgaaagauccaaagccuauucuaauuguuaccccuaugacgugccugauuacgcaucguugaggucacucguugccagcagugguacucuggaguuuaacaaugaauccuucaacuggacaggggugacccagaauggaacgucuagcgcuugcaagcggcgcuccaacaauucauuuuucagucgacugaacuggcucacucauuuaaaguuuaaauauccagcacugaaugucaccaugcccaacaacgagaaguucgacaaacuuuacaucuggggcgugcaccauccuggcacagauaaugaccagauauccuuguaugcccaggcuucugggcguaucacuguauccaccaagagaucacaacagacaguuauuccaaacaucggaagcaggagucgggugcgcgauauucccucuagaaucuccauauacuggaccauugucaaaccuggugacauccugcuaauuaauagcacgggcaaccucaucgccccaaggggguacuuuaagauccggucgggaaagucuuccauuaugcgcucagacgcgccgauaggcaaauguaauagugagugcaucacucccaacgguagcauuccuaaugauaagccauuccagaacgugaaucgaaucacauauggggcaugucccagauacgugaaacagaacacccugaaacuugccacuggaaugaggaaugucccugaaaaacaaacacggggcauauuuggcgcuauugccggguucaucgagaacggaugggaagguaugguugacggcugguauggguuucgucaccagaauagcgagggaaccggccaggcagcugaucugaagucuacgcaagccgcgaucaaccagauuaaugguaaauugaaccgccucaucgggaagaccaacgagaaguuccaccagauugaaaaagaguucagcgaaguggagggcagaauacaggaccuggaaaaguacguagaggauacaaaaaucgacuuauggucauauaaugccgagcugcucguggcacuugaaaaccaacauacuauugaucugaccgacagugagaugaauaaguuguuugaaaggacaaagaagcagcuacgggagaacgcugaagauaugggaaauggcugcuucaagaucuaccacaaaugugacaacgccugcaucggguccauucgaaauggaacuuaugaucaugacgucuaccgcgacgaggcucugaacaauagauuucagauaaaggguguggagcucaaaagcggcuacaaggauuggauccuguggauuucuuucgccaucucaugcuuucuucuguguguugcauugcucggguucauuaugugggccugccagaaaggaaacaucagguguaauauaugcaucuga

SEQ ID NO: 129249 - RNA, 1701 nt, Artificial Sequence; identical to SEQ ID NO: 128330
  derived and/or modified CDS sequence (opt3) from hemagglutinin__InfluenzaA__ABI21156

SEQ ID NO: 129250 - RNA, 1701 nt, Artificial Sequence
  derived and/or modified CDS sequence (opt3) from hemagglutinin__InfluenzaA__ABI21167
augaagaccaucauugcccugggcuacauacucugccuuguguucgcucagaaacugcccgggaacgacaauagcacagcaacuuuguguuuaggacaccaugccgucccuaacgguacgaucguuaagaccauuacaaaugaucaaaucgaggugacuaacgcgaccgaacugguacaguccucuucaacaggcgggauuugcgacaguccacaccagauccuagauggagagaauuguacccucauagacgcucugcuuggcgauccgcagugcgacgguuuucaaaacaaaaagugggaucuguucguggaaagaagcaaagccuauuccaauuguuaccccuaugacgucccugauuacgcaucuuugaggucgcucguggccucaagcgggacucuggaguuuaacaaugaaaguuucaacuggacaggaguuacccagaauggcacguccucugcuugcaagcggcgcagcaacaauuccuuuuucucacgacugaacuggcucacucauuuaaaguuuaaauauccagcacugaaugugaccaugcccaacaacgagaaguucgacaaacuuuacaucuggggcguccaccauccugggacaaauaacgaucagauuaguuuguaugcccaggcuagcggacguaucacugugucuaccaagagaucccaacagacaguaauuccaaauaucgguucaaggccccggguucgcgacauaccuagcagaauuaguaucuacuggaccauugugaaaccaggcgauauccugcuaaucaacucuacggggaaucucauugccccgaggggauacuuuaagauacgguccggcaagagcucgaucaugcgcucugacgcgcccauugguaaauguaacuccgagugcaucacuccuaaugggucaauaccaaacgacaagcccuuccagaaugucaaccgaauuacauauggagcauguccuagauacgugaaacagaauacccugaagcuggccacuggcaugaggaacgugccagaaaaacaaacacggggcaucuuuggggcuaucgccggauucauugagaaugguugggaaggcauggucgaugggugguauggauuucgucaccagaacagugagggcaucggucaggcagcugaccuuaagagcacccaagccgcgauuaaucagauaaacgggaaauugaaccgccucaucggcaagacgaaugagaaguuccaccagauugaaaaagaguucuccgaaguugagggaagaauccaggaucuggaaaaguacguggaggacaccaaaaucgauuuauggucuuauaacgccgagcugcucguagcacuugaaaaucaacauacaauugaccugacugauagcgagaugaacaaguuguuugaaaggaccaaaaagcagcuacgggagaaugcugaagacaugggcaacgggugcuucaagauauaccacaaaugugauaaugccugcaucggaucaauucgaaacgguacauaugaccaugagguguaccgcgaugaggcucugaauaacagauuucagaucaagggcgucgaacucaaaaguggguacaaggacuggauucuguggaucuccuucgccauaagcugcuuucuucuguguguggcauugcucggauucaucaugugggccugccagaaaggcaauauuagguguaacaucugcauuuga

SEQ ID NO: 129251 - RNA, 1701 nt, Artificial Sequence
  derived and/or modified CDS sequence (opt3) from hemagglutinin__InfluenzaA__ABI21178
augaagaccaucauugcccugagcuacauacucugccuuguguucgcucagaaacugcccggcaacgacaauuccacagcaacuuuguguuuagggcaccaugccgucccuaacggaacgaucguuaagaccauuacaaaugaucaaaucgaggugacuaacgcgaccgaacugguacagucuucaaguacagguggcauuugcgacagcccacaccagauccuagauggggagaauuguacccucauagacgcucugcuuggagauccgcagugcgacggcuuucaaaacaaaaagugggaucuguucguggaaagauccaaagccuauucuucguguuaccccuaugacgucccugauuacgcaucauugaggagccucguggccaguuccgguacucuggaguuuaauaacgaaucuuucaauuggacagggguuacccagaacggaacgagcuccgcuugcaagcggcgcucaaauaacuccuuuuucagccgacugaauuggcucacucauuuaaaguuuaaauauccagcacugaacgugaccaugcccaauaacgagaaguucgacaaacuuuacaucuggggcguccaccauccuggcacaaacaaugaucagauuucuuuguaugcccaggcuuccgggcguaucacugugucaaccaagagaagccaacagacaguaauuccaaacaucggaaguaggccccggguucgcgacauaccuucuagaauuuccaucuacuggaccauugugaaaccaggugauauccugcuaaucaauagcacgggcaaccucauugccccgaggggguacuuuaagauacggucgggaaagucuuccaucaugcgcucagacgcgcccauuggcaaauguaauagugagugcaucacuccuaacgguagcauaccaaaugacaagcccuuccagaacgucaaucgaauuacauauggggcauguccuagauacgugaaacagaacacccugaaacuugccacuggaaugaggaaugugccagaaaagcaaacacggggcaucuuuggcgcuaucgccggguucauugagaacggaugggaagguauggucgauggcugguauggguuucgucaccagaauagugagggaaucggccaggcagcugaccugaagucuacccaagccgcgauuaaccagauaaaugguaaauugaaccgccucaucgggaagacgaacgagaaguuccaccagauugaaaaagaguucagcgaaguugagggcagaauccaggaucuggaaaaguacguggaggacaccaaaaucgauuuauggucauauaaugccgagcugcucguagcacuugaaaaccaacauacaauugaccugacugauagugagaugaauaaguuguuugaaaggaccaaaaagcagcuacgggagaacgcugaagacaugggaaauggcugcuucaagauauaccacaaaugugauaacgccugcaucggguccauucgaaauggaacauaugaccaugauguguaccgcgacgaggcucugaacaauagauuucagaucaagggugucgagcucaaaagcggcuacaaggacuggauucuguggaucucuuucgccauaucaugcuuucuucuguguguggcauugcucggguucaucaugugggccugccagaaaggaaacauuagguguaauaucugcauuuga

SEQ ID NO: 129252 - RNA, 1698 nt, Artificial Sequence
  derived and/or modified CDS sequence (opt3) from hemagglutinin__InfluenzaA__ABI21200
augaaggugaaacugcucguccuucugugcaccuucacagccacuuacgcugacacgaucuguauuggcuaucacgcaaacaauagcaccgauacaguugacacuguguuggagaagaacguaaccgugacacauuccgucaauuuacuggaagauucucacaacgggaaacuaugccuccugaagggaauagcgccccuucagcuggguaauuguucaguggccggcuggaucuuggggaacccugagugcgaacuccugauuaguaaagagagcugguccuacaucguugaaaccccaaauccggagaacggaacuuguuaucccggcuacuuugcugacuaugaggaacugagagagcaacucucuucggugagcucauucgaaagguuugagauuuucccuaaggagaguuccuggccaaaucauacagucaccggugugucugccagcugcucccacaacgggaagucaaguuuuuaccggaauuuacuguggcuuacgggcaaaaacggauuguaucccaaucugagcaagucuuacgcaaacaauaaagaaaaggagguucuaguacucuggggcgugcaucacccuccaaacaucggggaucagcgcgcccuguaccacacugaaaacgcuuaugucuccguggugucaagccauuacagucgacguuucacccccgagauagcaaaaagaccuaaggucagggaccaggaaggacggaucaauuauuacuggacacuucuggagccaggugauacuauuaucuuugaggccaacggcaauuugauugcuccgcgcuucgccuuugcgcucucuagaggguucggauccggcaucauaaccagcaacgcacccauggacgaaugugaugccaagugccagacaccucaaggugcuauuaauucgucucugccauuucagaacguucaccccgugaccaucggggaguguccuaaauauguaagguccgccaaguuacggauggugacgggacugcgcaauauuccaucaauccagagucgaggccucuucggcgcaaucgcuggguuuauugaaggagguuggacuggcauggucgacgggugguacggauaucaucaccagaacgagcaaggcagcgguuacgccgcggaucagaaauccacacagaaugccauaaacgggaucaccaauaaggugaacucuguuauugaaaagaugaauacucaguucacagcagugggcaaagaguucaacaaacuugagagaaggauggaaaaucugaacaagaaggucgacgauggauuuuuggacaucuggaccuacaacgcugagcuacuggugcuccuggaaaaugagcggacgcuugacuuccacgauagcaacguuaaaaaucuguaugaaaagguaaaaucacaauugaagaacaaugccaaagagauaggcaacgggugcuuugaguucuaccauaaguguaaugacgaaugcauggagagugugaagaacggaaccuaugauuaccccaaauauuccgaagagagcaagcucaaucgugagcgcauugacggugucaaacuggaaucuaugggcguguaccagaucuuagcuaucuauucaacagucgccaguagccuggugcuacucguuucccugggggcaauuucuuuuuggaugugcucgaacggaagccuucaguguagaaucugcauuuga

SEQ ID NO: 129253 - RNA, 1698 nt, Artificial Sequence; identical to SEQ ID NO: 129252
  derived and/or modified CDS sequence (opt3) from hemagglutinin__InfluenzaA__ABI21211

SEQ ID NO: 129254 - RNA, 1698 nt, Artificial Sequence
  derived and/or modified CDS sequence (opt3) from hemagglutinin__InfluenzaA__ABI21233
augaaggugaaacugcucguccuucugugcaccuucacagccacuuacgcugacacgaucuguauuggcuaucacgcaaacaauagcaccgauacaguugacacuguguuggagaagaacguaaccgugacacauuccgucaauuuacuggaagauucucacaacgggaaacuaugccuccugaagggaauagcgccccuucagcuggguaauuguucaguggccggcuggaucuuggggaacccugagugcgaacuccugauuaguaaagagagcugguccuacaucguugaaaccccaaauccggagaacggaacuuguuaucccggcuacuuugcugacuaugaggaacugagagagcaacucaauucugugucgucauucgaaagguuugagauuuucccuaaggagagcaguuggccaaaccauacagucaccgguguguccgccucuugcagccacaaugggaaguccucauuuuaccggaacuuacuguggcuuacgggcaaaaauggauuguaucccaaccugaguaagagcuacgcaaauaacaaagaaaaggaggugcuaguucucuggggcgugcaucacccuccaaacaucggggaucagcgcgcccuguaccacacugaaaaugcuuaugucucugugguguccucacauuacagccgacguuucacccccgagauagcaaaaagaccuaaggucagggaccaggaaggacggaucaacuauuacuggacacuucuggagccaggugauacuauuaucuuugaggccaauggcaacuugauugcuccgcgcuucgccuuugcgcucaguagaggguucggaucuggcaucauaaccuccaaugcacccauggacgaaugugaugccaagugccagacaccucaaggugcuauuaacagcucgcugccauuucagaauguucaccccgugaccaucggggaguguccuaaauauguaaggucugccaaguuacggauggugacgggacugcgcaacauuccauccauccagucacgaggccucuucggcgcaaucgcuggguuuauugaaggagguuggacuggcauggucgacgggugguacggauaucaucaccagaaugagcaaggcagugguuacgccgcggaucagaaaagcacacagaacgccauaaaugggaucaccaacaagguaaauuccguuauugaaaagaugaacacucaguucacagcagugggcaaagaguucaauaaacuugagagaaggauggaaaaccugaacaagaaggucgacgauggauuuuuggacaucuggaccuacaaugcugagcuacuggugcuccuggaaaacgagcggacgcuugacuuccacgauucuaauguuaaaaaccuguaugaaaagguaaaaagccaauugaagaauaacgccaaagagauaggcaaugggugcuuugaguucuaccauaaguguaacgacgaaugcauggagucagugaagaauggaaccuaugauuaccccaaauauagugaagaguccaagcucaaccgugagcgcauugacggugucaaacuggaaagcaugggcguguaccagaucuuagcuaucuauucuacagucgccucaagucuggugcuacucguuagccugggggcaauuuccuuuuggaugugcucuaauggaucgcuucaguguagaaucugcauuuga

SEQ ID NO: 129255 - RNA, 1701 nt, Artificial Sequence
  derived and/or modified CDS sequence (opt3) from hemagglutinin__InfluenzaA__ABI21244
augaagaccaucauugcccugagcuacauacucugccuuguguucgcucagaaacugcccggcaacgacaauuccacagcaacuuuguguuuagggcaccaugccgucccuaacggaacgcugguuaagaccaucacaaaugaucaaauugaggugacuaacgcgaccgaacuuguacagucuucaaguacagguagaaucugcgacagcccacacaggauucucgauggcaaaaauuguacccugaucgacgcucuacugggggauccgcauugcgacggauuucagaacaaggagugggauuuguucguggaacgguccaaagccuauucuaauuguuaccccuaugacgucccugauuacgcaucgcuccgcucacugguggccagcaguggcacucugaaguuuauaaacgaggacuucaauuggacagguguugcucaggaugggaaguccuaugcaugcaaacgaggaucugugaacagcuuuuucucccgucucaauugguuacacaagcuggaauacaaauauccagcccuuaacgucaccaugcccaauaacggcaaguuugacaaauuguacaucuggggcgugcaucacccuucaacggauagugaccaaacuagccuguacguaagagcuucugggaggguuaccguguccacaaagcggucacagcagacugucauuccaaauaucggaagccgccccugggugagaggucuaaguucuaggauuuccaucuauuggaccauagugaagccuggcgacauucuccugaucaacagcacagggaaccuuauugccccacggggauacuucaaaauccgcucgggcaagucuuccaucaugcgaucagaugcgccgauugguaauuguaguagcgagugcauaacccccaacggguccaucccuaaugacaaaccauuucagaacgucaauagaauuacguauggagcaugucccagguacguuaagcaaaacacucugaaauuggccacaggcaugcggaaugugccugagaagcagacccguggcaucuucggggcuauagccggauuuauugaaaacgguugggagggcaugguagaugggugguauggauuccgccaccaaaauucugaaggcacuggucaggcagcugaccucaaaagcacacaggccgcgaucgaucagaucaacgggaagcugaauagauuaauugagaagaccaacgagaaauuucaucagaucgaaaaggaguucucagaaguggagggcaggauucaagaccuggaaaaauacgucgaggauacgaagauagaccucuggaguuauaaugccgagcuucugguggcauuggaaaaccagcacaccaucgaucuaacagacuccgagaugaauaaacuguucgaacggacucgaaagcagcuccgcgagaacgcugaagauaugggaaacggcugcuuuaagauuuaccauaaaugugacaaugccugcaucgggagcaucagaaacggaaccuacgaccacgauguuuauagggacgaggcucugaauaaccgguuccagauuaaggguguggagcuuaaaucuggcuacaaggauuggauacuguggaucucauuugccauuaguugcuucuugcucugugucgugcuguuaggguuuaucaugugggcaugccaaaaaggaaauauucgcuguaacaucugcauauga

SEQ ID NO: 129256 - RNA, 1701 nt, Artificial Sequence; identical to SEQ ID NO: 129101
  derived and/or modified CDS sequence (opt3) from hemagglutinin__InfluenzaA__ABI21255

SEQ ID NO: 129257 - RNA, 1701 nt, Artificial Sequence; identical to SEQ ID NO: 129101
  derived and/or modified CDS sequence (opt3) from hemagglutinin__InfluenzaA__ABI21266

SEQ ID NO: 129258 - RNA, 1701 nt, Artificial Sequence; identical to SEQ ID NO: 129101
  derived and/or modified CDS sequence (opt3) from hemagglutinin__InfluenzaA__ABI21277

SEQ ID NO: 129259 - RNA, 1701 nt, Artificial Sequence
  derived and/or modified CDS sequence (opt3) from hemagglutinin__InfluenzaA__ABI21299
augaagaccaucauugcccugagcuacauacucugccuuguguucgcucagaaacugcccggcaacgacaauuccacagcaacuuuguguuuagggcaccaugccgucccuaacggaacgcugguuaagaccaucacaaaugaucaaauugaggugacuaacgcgaccgaacuuguacagucuucaaguacagguagaaucugcgacagcccacacaggauucucgauggcaaaaauuguacccugaucgacgcucuacugggggauccgcauugcgacggauuucagaacaaggagugggauuuguucguggaacgguccaaagccuauucuaauuguuaccccuaugacgucccugauuacgcaucgcuccgcucacugguggccagcaguggcacucuggaguuuauaaacgaagacuucaauuggacagguguugcucaggaugggaaguccuaugcaugcaagcgaggaucugugaacagcuuuuucucccgucucaauugguuacacaaacuggaguacaaguauccagcccuuaacgucaccaugcccaauaacgacaaauuugauaaguuguacaucuggggcgugcaucacccuucaacggacagugaccaaacuagccuguacguaagagcuucuggcaggguuaccguguccacaaaacggucacagcagacugucauuccaaauaucgggagccgccccugggugagaggacuaaguucuaggauuuccaucuauuggaccauagugaagccuggugauauucuccugaucaacagcacaggcaaccuuauugccccacggggguacuucaagauccgcaauggaaaaucgucuaucaugcgauccgacgcgccgauuggcaacuguucaagugagugcauaacccccaaugguagcaucccuaacgauaagccauuucagaaugucaacagaauuacguauggggcaugucccagguacguuaaacaaaauacucugaaguuggccacaggaaugcggaacgugccugaaaaacagacccguggcaucuucggcgcuauagccggguuuauugagaauggaugggaagguaugguagacggcugguauggguuccgccaccagaacuccgagggaacuggccaggcagcugaucucaagucuacacaagccgcgaucgaccagaucaaugguaaacugaacagauuaauugagaagaccaaugaaaaguuucaucagaucgagaaagaguucagcgaaguggaagggaggauucaagaucuggagaaguacgucgaggacacgaaaauagaucucuggucauauaacgccgaacuucugguggcauuggagaaucagcacaccaucgaccuaacagauagugaaaugaacaagcuguucgagcggacucgaaaacagcuccgcgaaaacgcugaggacaugggcaauggaugcuuuaagauuuaccauaagugugacaacgccugcaucggcuccaucagaaaugggaccuacgaucacgacguuuauagggaugaggcucugaacaaucgguuccagauuaaaggaguggaacuuaagagcgguuacaaagacuggauacuguggaucucuuuugccauuucaugcuucuugcucugugucgugcuguuaggcuuuaucaugugggcaugccaaaaggggaacauucgcuguaauaucugcauauga

SEQ ID NO: 129260 - RNA, 1701 nt, Artificial Sequence; identical to SEQ ID NO: 129101
  derived and/or modified CDS sequence (opt3) from hemagglutinin__InfluenzaA__ABI21310

SEQ ID NO: 129261 - RNA, 1701 nt, Artificial Sequence
  derived and/or modified CDS sequence (opt3) from hemagglutinin__InfluenzaA__ABI21321
augaagaccaucauugcccugagcuacauacucugccuuguguucgcucagaaacugcccggcaacgacaauuccacagcaacuuuguguuuagggcaccaugccgucccuaacggaacgcugguuaagaccaucacaaaugaucaaauugaggugacuaacgcgaccgaacuuguacagucuucaaguacagguagaaucugcgacagcccacacaggauucucgauggcaaaaauuguacccugaucgacgcucuacugggggauccgcauugcgacggauuucagaacaaggagugggauuuguucguggaacgguccaaagccuauucuaauuguuaccccuaugacgucccugauuacgcaucgcuccgcucacugguggccagcaguggcacucuggaguuuauaaacgaagacuucaauuggacagguguugcucaggaugggaaguccuaugcaugcaagcgaggaucugugaacagcuuuuucucccgucucaauugguuacacaaacuggaguacaaguauccagcccuuaacgucaccaugcccaauaacggcaaauuugacaaguuguacaucuggggcgugcaucacccuucaacggauagugaccaaacuagccuguacguaagagcuucugggaggguuaccguguccacaaaacggucacagcagacugucauuccaaauaucggaagccgccccugggugagaggucuaaguucuaggauuuccaucuauuggaccauagugaagccuggcgacauucuccugaucaacagcacagggaaccuuauugccccacggggauacuucaagauccgcaauggcaaaucgucuaucaugcgauccgaugcgccgauugguaacuguucaagugagugcauaacccccaaugggagcaucccuaacgacaagccauuucagaaugucaacagaauuacguauggagcaugucccagguacguuaaacaaaauacucugaaguuggccacaggcaugcggaacgugccugaaaaacagacccguggcaucuucggggcuauagccggauuuauugagaaugguugggaaggcaugguagaugggugguauggauuccgccaccagaacuccgagggcacuggucaggcagcugaccucaagucuacacaagccgcgaucgaucagaucaaugggaaacugaacagauuaauugagaagaccaaugaaaaguuucaucagaucgagaaagaguucagcgaaguggaaggcaggauucaagaccuggagaaguacgucgaggauacgaaaauagaccucuggucauauaacgccgaacuucugguggcauuggagaaucagcacaccaucgaucuaacagacagugaaaugaacaagcuguucgagaaaacucggaagcagcuccgagaaaacgcugaggauaugggaaauggcugcuuuaagauuuaccauaaaugugacaacgccugcaucggguccauccgcaauggaaccuacgaccacgauguuuauagagacgaggcucugaacaauagguuccagauuaaggguguggaacuuaaaagcggcuacaaggauuggauacuguggaucucuuuugccauuucaugcuucuugcucugugucgugcuguuaggguuuaucaugugggcaugccaaaaaggaaacauucgguguaauaucugcauauga

SEQ ID NO: 129262 - RNA, 1701 nt, Artificial Sequence
  derived and/or modified CDS sequence (opt3) from hemagglutinin__InfluenzaA__ABI21332
augaagaccaucauugcccugagcuacauacucugccuuguguucgcucagaaacugcccggcaacgacaauuccacagcaacuuuguguuuagggcaccaugccgucccuaacggaacgcugguuaagaccaucacaaaugaucaaauugaggugacuaacgcgaccgaacuuguacagucuucaaguacagguagaaucugcgacagcccacacaggauucucgauggcaaaaauuguacccugaucgacgcucuacugggggauccgcauugcgacggauuucagaacaaggagugggauuuguucguggaacgguccaaagccuauucuaauuguuaccccuaugacgucccugauuacgcaucgcuccgcucacugguggccagcaguggcacucuggaguuuauaaacgaagacuucaauuggacagguguugcucaggaugggaaguccuaugcaugcaagcgaggaucugugaacagcuuuuucucccgucucaauugguuacacaaacuggaguacaaguauccagcccuuaacgucaccaugcccaauaacggcaaauuugacaaguuguacaucuggggcgugcaucacccuucaacggauagugaccaaacuagccuguacguacaggcuucugggagaguuaccguguccacaaaaaggucacagcagacugucauuccaaauaucggaagccggcccugggugcgcggucuaaguucuagaauuuccaucuauuggaccauagugaagccuggcgacauucuccugaucaacagcacagggaaccuuauugccccaaggggauacuucaagauccggaauggcaaaucgucuaucaugcgcuccgaugcgccgauugguaacuguucaagugagugcauaacccccaaugggagcaucccuaacgacaagccauuucaaaaugucaaccgaauuacguauggagcaugucccagauacguuaaacagaauacucugaaguuggccacaggcaugaggaacgugccugaaaaacagacccggggcaucuucggggcuauagccggauuuauugagaaugguugggaaggcaugguagaugggugguauggauuccgucaccagaacuccgagggcacuggucaagcagcugaccucaagucuacacaggccgcgaucgaucagaucaaugggaaacugaaccgcuuaauugagaagaccaaugaaaaguuucaucaaaucgagaaagaguucagcgaaguggaaggcaggauucaggaccuggagaaguacgucgaggauacgaaaauagaccucuggucauauaacgccgaacuucugguggcauuggagaaucagcacaccaucgaucuaacagacagugaaaugaacaagcuguucgagagaacucggaaacagcuccgagaaaacgcugaggauaugggaaauggcugcuuuaagauuuaccauaagugugacaacgccugcaucggguccauccgcaauggaaccuacgaccacgauguuuauagagacgaggcucugaacaauagguuccaaauuaaagguguggaacuuaagagcggcuacaaagauuggauacuguggaucucuuuugccauuucaugcuucuugcucugugucgugcuguuaggguuuaucaugugggcaugccagaagggaaacauucgguguaauaucugcauauga

SEQ ID NO: 129263 - RNA, 1701 nt, Artificial Sequence; identical to SEQ ID NO: 129101
  derived and/or modified CDS sequence (opt3) from hemagglutinin__InfluenzaA__ABI21343

SEQ ID NO: 129264 - RNA, 1701 nt, Artificial Sequence
  derived and/or modified CDS sequence (opt3) from hemagglutinin__InfluenzaA__ABI21354
augaagaccaucauugcccugagcuacauauccugccucguguucgcucagaaacuucccggcaacgacaauucuacagcaacucuguguuuggggcaccaugccgucccuaacggaacguuaguuaagaccaucacaaaugaucaaauugaggugacuaacgcgaccgaacugguacagucaaguagcacagguagaaucugcgacuccccacacaggauucuagauggcaaaaauuguacccucaucgacgcucugcuuggggauccgcauugcgacggauuucagaacaaggagugggaucuguucguggaacggucuaaagccuauucgaauuguuaccccuaugacgucccugauuacgcaucauugcgcagccucguggccaguuccggcacucuggaguuuauaaacgaagacuucaauuggacagguguugcucaggaugggaagucuuaugcaugcaagcgaggaagcgugaacuccuuuuucucacgucugaauuggcuccacaaauuagaguacaaguauccagcccugaacgucaccaugcccaauaacggcaaauuugacaaguuguacaucuggggcgugcaucacccuaguacggauagcgaccaaacuucuuuguacguaagagcuuccgggaggguuaccgugucaacaaaacggagccagcagacugucauuccaaauaucggaagucgccccugggugagaggucugucuuccaggauuagcaucuauuggaccauagugaagccuggcgacauucuacucaucaacucgacagggaaccugauugccccacggggauacuucaagauccgcaauggcaaaucuuccaucaugcgaucagaugcgccgauugguaacuguaguagcgagugcauaacccccaauggguccaucccuaacgacaagccauuucagaaugucaacagaauuacguauggagcaugucccagguacguuaaacaaaauacucuuaagcuggccacaggcaugcggaacgugccugaaaaacagacccguggcaucuucggggcuauagccggauuuauugagaaugguugggaaggcaugguagaugggugguauggauuccgccaccagaacucugagggcacuggucaggcagcugaccuuaagagcacacaagccgcgaucgaucagaucaaugggaaacucaacagacugauugagaagaccaaugaaaaguuucaucagaucgagaaagaguucucagaaguggaaggcaggauucaagacuuagagaaguacgucgaggauacgaaaauagaccuguggaguuauaacgccgaacuccuuguggcacuggagaaucagcacaccaucgauuugacagacuccgaaaugaacaagcuauucgagcggacucgaaaacagcugcgcgaaaacgcugaggauaugggaaauggcugcuuuaagauuuaccauaagugugacaacgccugcaucgggagcaucagaaauggaaccuacgaccacgauguuuauagggacgaggcucucaacaaucgguuccagauuaaagguguggaacugaagucuggcuacaaagauuggauacuuuggaucucauuugccauuaguugcuuccuguugugugucgugcuccugggguuuaucaugugggcaugccaaaagggaaacauucgcuguaauaucugcauauga

SEQ ID NO: 129265 - RNA, 1701 nt, Artificial Sequence
  derived and/or modified CDS sequence (opt3) from hemagglutinin__InfluenzaA__ABI21365
augaagaccaucauugcccugagcuacauacucugccuuguguucgcucagaaacugcccggcaacgacaauuccacagcaacuuuguguuuagggcaccaugccgucccuaacggaacgcugguuaagaccaucacaaaugaucaaauugaggugacuaacgcgaccgaacuuguacagucuucaaguacagguagaaucugcgacagcccacacaggauucucgauggcaaaaauuguacccugaucgacgcucuacugggggauccgcauugcgacggauuucagaacaaggagugggauuuguucguggaacgguccaaagccuauucuaauuguuaccccuaugacgucccugauuacgcaucgcuccgcucacugguggccagcaguggcacucuggaguuuauaaacgaagacuucaauuggacagguguugcucaggaugggaaguccuaugcaugcaagcgaggaucugugaacagcuuuuucucccgucucaauugguuacacaaacuggaguacaaguauccagcccuuaacgucaccaugcccaauaacggcaaauuugacaaguuguacaucuggggcgugcaucacccuucaacggauagugaccaaacuagccuguacguaagagcuucugggaggguuaccguguccacaaaacggucacagcagacugucauuccaaauaucggaagccgccccugggugagaggucuaaguucuaggauuuccaucuauuggaccauagugaagccuggcgacauucuccugaucaacagcacagggaaccuuauugccccacggggauacuucaagauccgcaauggcaaaucgucuaucaugcgauccgaugcgccgauugguaacuguucaagugagugcauaacccccaaugggagcaucccuaacgacaagccauuucagaaugucaacagaauuacguauggagcaugucccagguacguuaaacaaaauacucugaaguuggccacaggcaugcggaacgugccugaaaaacagacccguggcaucuucggggcuauagccggauuuauugagaaugguugggaaggcaugguagaugggugguauggauuccgccaccagaacuccgagggcacuggucaggcagcugaccucaagucuacacaagccgcgaucgaucagaucaaugggaaacugaacagauuaauugagaagaccaaugaaaaguuucaucagaucgagaaagaguucagcgaaguggaaggcaggauucaagaccuggagaaguacgucgaggauacgaaaauagaccucuggucauauaacgccgaacuucugguggcauuggagaaucagcacaccaucgaucuaacagacagugaaauggauaagcuguucgagcggacucgaaaacagcuccgcgaaaacgcugaggacaugggaaacggcugcuuuaagauuuaccauaagugugacaaugccugcaucggguccaucagaaacggaaccuacgaucacgacguuuauagggaugaggcucugaauaaccgguuccagauuaaagguguggaacuuaagagcggcuacaaagacuggauacuguggaucucuuuugccauuucaugcuucuugcucugugucgugcuguuaggguuuaucaugugggcaugccaaaagggaaauauucgcuguaacaucugcauauga

SEQ ID NO: 129266 - RNA, 1701 nt, Artificial Sequence
  derived and/or modified CDS sequence (opt3) from hemagglutinin__InfluenzaA__ABI21376
augaagaccaucauugcccugagcuacauacucugccuuguguucgcucagaaacugcccggcaacgacaauuccacagcaacuuuguguuuagggcaccaugccgucccuaacggaacgcugguuaagaccaucacaaaugaucaaauugaggugacuaacgcgaccgaacuuguacagucuucaaguacagguagaaucugcgacagcccacacaggauucucgauggcaaaaauuguacccugaucgacgcucuacugggggauccgcauugcgacggauuucagaacaaggagugggauuuguucguggaacgguccaaagccuauucuaauuguuaccccuaugacgucccugauuacgcaucgcuccgcucacugguggccagcaguggcacucuggaguuuauaaacgaagacuucaauuggacagguguugcucaggaugggaaguccuauucuugcaagcgaggaagcgugaacuccuuuuucucacgucucaauugguuacacaaacuggaguacaaguauccagcacuuaacgucaccaugcccaauaacgacaaauuugauaaguuguacaucuggggcgugcaucacccuaguacggacagcgaccaaacuucucuguacguaagagccuccggcaggguuaccgugucaacaaaacggagccagcagacugucauuccaaauaucgggagucgccccugggugagaggacuaucuuccaggauuagcaucuauuggaccauagugaagccuggugauauucuccugaucaacucgacaggcaaccuuauugcuccacggggguacuucaagauccgcaauggaaaaucuuccaucaugcgaucagacgccccgauuggcaacuguaguagcgagugcauaacccccaaugguuccaucccuaacgauaagccauuucagaaugucaacagaauuacguauggggcgugucccagguacguuaaacaaaauacucugaaguuggcaacaggaaugcggaacgugccugaaaaacagacccguggcaucuucggcgccauagcuggguuuauugagaauggaugggaagguaugguagacggcugguauggguuccgccaccagaacucugagggaacuggccaggccgcagaucucaagagcacacaagcugccaucgaccagaucaaugguaaacugaacagauuaauugagaagaccaaugaaaaguuucaucagaucgagaaagaguucucagaaguggaagggaggauucaagaucuggagaaguacgucgaggacacgaaaauagaucucuggaguuauaacgcggaacuucugguggccuuggagaaucagcacaccaucgaccuaacagauuccgaaaugaacaagcuguucgagcggacucgaaaacagcuccgcgaaaacgcagaggacaugggcaauggaugcuuuaagauuuaccauaagugugacaacgcuugcaucggcagcaucagaaaugggaccuacgaucacgacguuuauagggaugaggcccugaacaaucgguuccagauuaaaggaguggaacuuaagucugguuacaaagacuggauacuguggaucucauuugcuauuaguugcuucuugcucugugucgugcuguuaggcuuuaucaugugggccugccaaaaggggaacauucgcuguaauaucugcauauga

SEQ ID NO: 129267 - RNA, 1701 nt, Artificial Sequence; identical to SEQ ID NO: 129101
  derived and/or modified CDS sequence (opt3) from hemagglutinin__InfluenzaA__ABI21387

SEQ ID NO: 129268 - RNA, 1701 nt, Artificial Sequence
  derived and/or modified CDS sequence (opt3) from hemagglutinin__InfluenzaA__ABI21398
augaagaccaucauugcccugagcuacauacucugccuuguguucgcucagaaacugcccggcaacgacaauuccacagcaacuuuguguuuagggcaccaugccgucccuaacggaacgcugguuaagaccaucacaaaugaucaaauugaggugacuaacgcgaccgaacuuguacagucuucaaguacagguagaaucugcgacagcccacacaggauucucgauggcaaaaauuguacccugaucgacgcucuacugggggauccgcauugcgacggauuucagaacaaggagugggauuuguucguggaacgguccaaagccuauucuaauuguuaccccuaugacgucccugauuacgcaucgcuccgcucacugguggccagcaguggcacucuggaguuuguuaacgaagacuucaauuggacagguguggcucaggaugggaaguccuaugcaugcaagcgaggaucugucaacagcuuuuucucccgucucaauugguuacacaaacuggaguacaaguauccagcccuuaacgugaccaugcccaauaacggcaaauuugacaaguuguacauauggggcguacaucacccuucaacggauagugaccaaacuagccuguacguuagagcuucugggagggugaccgucuccacaaaacggucacagcagacugugaucccaaauauuggaagccgccccugggugagaggucuaaguucuaggaucuccauuuauuggaccaucgucaagccuggcgacauacuccugauuaacagcacagggaaccuuaucgccccacggggauacuucaagauucgcaauggcaaaucgucuaucaugcgauccgaugcgccgaucgguaacuguucaagugagugcauuacccccaaugggagcauaccuaacgacaagccauuucagaauguuaacagaaucacguauggagcaugucccagguacgugaaacaaaauacucugaaguuggccacaggcaugcggaacguaccugaaaaacagacccguggcauuuucggggcuaucgccggauuuauagagaaugguugggaaggcaugguggaugggugguauggauuccgccaccagaacuccgagggcacuggucaggcagcugaccucaagucuacacaagccgcgauugaucagaucaaugggaaacugaacagauuaaucgagaagaccaaugaaaaguuucaucagauugagaaagaguucagcgaagucgaaggcaggauccaagaccuggagaaguacguggaggauacgaaaauugaccucuggucauauaacgccgaacuucugguugcauuggagaaucagcacaccauagaucuaacagacagugaaaugaacaagcuguucgagcggacucgaaaacagcuccgcgaaaacgcugaggauaugggaaauggcugcuuuaagaucuaccauaagugugacaacgccugcauuggguccaucagaaauggaaccuacgaccacgauguguauagggacgaggcucugaacaaucgguuccagaucaaaggugucgaacuuaagagcggcuacaaagauuggauucuguggauaucuuuugccaucucaugcuucuugcucugugugguacuguuaggguuuauuaugugggcaugccaaaagggaaacauccgcuguaauauuugcaucuga

SEQ ID NO: 129269 - RNA, 1701 nt, Artificial Sequence; identical to SEQ ID NO: 129101
  derived and/or modified CDS sequence (opt3) from hemagglutinin__InfluenzaA__ABI21409

SEQ ID NO: 129270 - RNA, 1701 nt, Artificial Sequence
  derived and/or modified CDS sequence (opt3) from hemagglutinin__InfluenzaA__ABI21420
augaagaccaucauugcccugagcuacauacucugccuuguguucacacagaaacugcccggcaacgacaauuccacugcuacguuguguuuagggcaccaugcagucccuaacggaacccugguuaagacaaucacuaaugaucaaauugaggugaccaacgccacagagcuaguacagucuucaaguaccgguagaaucugcgacagcccacacaggauucucgauggcaaaaauuguacucugaucgacgcgcuucugggggauccgcauugcgacggauuucagaacaaggaaugggauuuguucguggaacgguccaaggcuuauucuaauuguuaccccuaugacgucccugauuacgccucgcuccgcucacugguggcaagcaguggcacacuggaguuuauaaacgaagacuucaauuggaccgguguugcccaggaugggggauccuauucuugcaaacgaggcagcgugaacuccuuuuucucacgucucaauugguuacacaagcuggaguacaaauauccagcucuuaacgucacgaugcccaauaacggcaaguuugacaaauuguacaucuggggagugcaucacccuaguacugauagcgaccaaaccucucuguacguaagagcauccgggaggguuacagugucaacuaagcggagccagcagaccgucauuccaaauaucgguagucgccccugggugagaggccuaucuuccaggauuagcaucuauuggacaauagugaaaccuggggacauucuccugaucaacucgaccggaaaccuuauugccccacggggcuacuucaagauccgcaaugguaagucuuccaucaugcgaucagaugcuccgauugggaacuguaguagcgagugcauaacgcccaauggauccaucccuaacgacaaaccauuucagaaugucaacagaauuacuuauggcgccugucccagguacguuaagcaaaauacacugaaauuggcgaccggcaugcggaacgugccugaaaagcagacucgugggaucuucggagcaauagccgguuuuauugagaauggcugggaagggaugguagauggaugguauggcuuccgccaccagaacucugaggguacagggcaggcugccgaccucaaaagcacccaagcagcuaucgaucagaucaauggcaagcugaacagauuaauugagaaaacgaaugaaaaguuucaucagaucgagaaggaguucucagaaguggaaggaaggauucaagaccuggagaaauacgucgaggauaccaagauagaccucuggaguuauaacgccgaacuucugguggcguuggagaaucagcacacaaucgaucuaacugacuccgaaaugaacaaacuguucgagcggacccgaaagcagcuccgcgaaaacgccgaggauaugggcaaugggugcuuuaaaauuuaccauaagugugacaacgcaugcaucggaagcaucagaaaugguacauacgaccacgauguuuauagggacgaggcucugaacaaucgguuccagauuaagucuguggaacuuaaaucaggcuacaaggauuggauacuguggaucaguuuugccauuagcugcuucuugcucugugucgugcuguuaggguuuaucaugugggcuugccaaaaaggaaacauucgcuguaauaucugcauauga

SEQ ID NO: 129271 - RNA, 1701 nt, Artificial Sequence; identical to SEQ ID NO: 129101
  derived and/or modified CDS sequence (opt3) from hemagglutinin__InfluenzaA__ABI21431

SEQ ID NO: 129272 - RNA, 1701 nt, Artificial Sequence; identical to SEQ ID NO: 129101
  derived and/or modified CDS sequence (opt3) from hemagglutinin__InfluenzaA__ABI21442

SEQ ID NO: 129273 - RNA, 1701 nt, Artificial Sequence; identical to SEQ ID NO: 129101
  derived and/or modified CDS sequence (opt3) from hemagglutinin__InfluenzaA__ABI21453

SEQ ID NO: 129274 - RNA, 1701 nt, Artificial Sequence; identical to SEQ ID NO: 129101
  derived and/or modified CDS sequence (opt3) from hemagglutinin__InfluenzaA__ABI21464

SEQ ID NO: 129275 - RNA, 1701 nt, Artificial Sequence; identical to SEQ ID NO: 129101
  derived and/or modified CDS sequence (opt3) from hemagglutinin__InfluenzaA__ABI21475

SEQ ID NO: 129276 - RNA, 1701 nt, Artificial Sequence
  derived and/or modified CDS sequence (opt3) from hemagglutinin__InfluenzaA__ABI21486
augaagaccaucauugcccugagcuacauacucugccuuguguucgcucagaaacugcccggcaacgacaauuccacagcaacuuuguguuuagggcaccaugccgucccuaacggaacgcugguuaagaccaucacaaaugaucaaauugaggugacuaacgcgaccgaacuuguacagucuucaaguacagguagaaucugcgacagcccacacaggauucucgauggcaaaaauuguacccugaucgacgcucuacugggggauccgcauugcgacggauuucagaacaaggagugggauuuguucguggaacgguccaaagccuauucuaauuguuaccccuaugacgucccugauuacgcaucgcuccgcucacugguggccagcaguggcacucuggaguuuauaaacgaagacuucaauuggacagguguugcucaggaugggaaguccuaugcaugcaagcgaggaucugugaacagcuuuuucucccgucucaauugguuacacaaacuggaguacaaguauccagcccuuaacgucaccaugcccaauaacggcaaauuugacaaguuguacaucuggggcgugcaucacccuucaacggauagugaccaaacuagccuguacguaagagcuucugggaggguuaccguguccacaaaacggucacagcagacugucauuccaaauaucggaagccgccccugggugagaggucuaaguucuaggauuuccaucuauuggaccauagugaagccuggcgacauucuccugaucaacagcacagggaaccuuauugccccacggggauacuucaagauccgcaauggcaaaucgucuaucaugcgauccgaugcgccgauugguaacuguucaagugagugcauaacccccaaugggagcaucccuaacgacaagccauuucagaaugucaacagaauuacguauggagcaugucccagguacguuaaacaaaauacucugaaguuggccacaggcaugcggaacgugccugaaaaacagacccguggcaucuucggggcuauagccggauuuauugagaaugguugggaaggcaugguagaugggugguauggauuccgccaccagaacuccgagggcacuggucaggcagcugaccucaagucuacacaagaggccaucgaucagaucaaugggaaacugaacagauuaauugaaaagaccaaugagaaguuucaucagaucgaaaaagaguucagcgaaguggagggcaggauucaagaccuggagaaguacgucgaagauacgaaaauagaccucuggucauauaacgcggagcuucugguggccuuggaaaaucagcacaccaucgaucuaacagacagugagaugaacaagcuguucgaacggacucgaaaacagcuccgcgagaacgcagaggauaugggaaauggcugcuuuaagauuuaccauaagugugacaacgcuugcaucggguccaucagaaauggaaccuacgaccacgauguuuauagggacgaagcccugaacaaucgguuccagauuaaagguguggagcuuaagagcggcuacaaagauuggauacuguggaucucuuuugcuauuucaugcuucuugcucugugucgugcuguuaggguuuaucaugugggccugccaaaagggaaacauucgcuguaauaucugcauauga

SEQ ID NO: 129277 - RNA, 1701 nt, Artificial Sequence; identical to SEQ ID NO: 129101
  derived and/or modified CDS sequence (opt3) from hemagglutinin__InfluenzaA__ABI21497

SEQ ID NO: 129278 - RNA, 1698 nt, Artificial Sequence
  derived and/or modified CDS sequence (opt3) from hemagglutinin__InfluenzaA__ABI21530
augaaggccaaacugcucgugcuucugugcaccuucacagcuacuuacgcagacacgaucuguauuggcuaucacgccaacaauagcaccgauacagucgacacuguuuuggagaagaacgugaccguaacacauuccgugaauuuacuggaagauucucacaacgggaaacuaugccuccugaagggaauagcgccccuucagcuggguaauuguucagucgcuggcuggaucuuggggaacccugagugcgaaagucucauuagcaaagaguccuggucuuacaucguggaaaccccaaauccggagaacggaacuuguuaucccggcuacuuugccgacuaugaggaacugagagagcaacugucgucaguuagcaguuucgaaagguuugagauuuucccuaaggaguccucuuggccaaaucauacagugaccggugucagcgcauccugcucacacaacgggaagaguagcuuuuaccggaaucucuuauggcugacggagaaaaacggacuuuaucccaauuugucuaaguccuacgugaacaauaaagaaaaggaaguacugguucuauggggcgugcaucacccuucaaacaucggcguccagcgcgccauauaccgaacugagaacgcuuaugugagcguggucaguucucacuacucccguagauucaccccagaaaucgcaaaaaggcccaagguucgggaucaggaggggcgcauuaauuauuacuggacacuccuggagccuggagacacuaucauuuuugaagccaacgguaaucuuaucgcuccaugguaugccuucgcgcugagcagaggcuuugagucggggauaauuaccucuaacgcaccgaugaaugaaugugaugccaagugccagacaccccaaggagcuaucaacuccucauugccuuuccagaaugugcauccaguaaccauuggcgagugucccaaauacgugaggagugccaagcuccggauggucacgggucugcgcaacaucccuagcauccagucccgaggguuauuuggagcaauugcuggcuucauagaaggcggguggacuggaaugaucgacgguugguauggcuaccaccaucagaaugagcaagggucuggauacgccgcggaucagaaaagcacacagaacgccauuaauggcaucaccaacaagguaaauucaguuauagagaaaaugaacacucaguuuacagcaguggguaaggaguucaauaaacuggaaagaaggauggaaaaccucaacaagaaggucgacgauggguuccuugacauuuggaccuauaaugcugagcuguuggugcuacuggaaaacgagcggacgcucgauuuucacgacaguaaugugaaaaaccuguacgagaagguuaaaucccaacuuaagaauaacgccaaagaaaucggcaauggaugcuucgaguuuuaucacaaguguaacaaugaaugcauggagagcgugaagaacggcaccuacgacuauccaaaauacucugaggaaucaaagcugaaucgugagaaaaucgauggggucaaguuggaaaguaugggaguguaucagauucucgcuaucuacagcacagucgccuccucucugguguuacugguuucgcuaggugcaauuagcuucuggaugugcuccaacggcucacuccagugucgcauaugcaucuga

SEQ ID NO: 129279 - RNA, 1698 nt, Artificial Sequence
  derived and/or modified CDS sequence (opt3) from hemagglutinin__InfluenzaA__ABI21552
augaaggccaaacugcucgugcuucugugcaccuucacagcuacuuacgcagacacgaucuguauuggcuaucacgccaacaauagcaccgauacagucgacacuguuuuggagaagaacgugaccguaacacauuccgugaauuuacuggaagauucucacaacgggaaacuaugccuccugaagggaauagcgccccuucagcuggguaauuguucagucgcuggcuggaucuuggggaacccugagugcgaaagucucauuagcaaagaguccuggucuuacaucguggaaaccccaaauccggagaacggaacuuguuaucccggcuacuuugccgacuaugaggaacugagagagcaacugucgucaguuagcaguuucgaaagguuugagauuuucccuaaggaguccucuuggccaaaucauacagugaccggugucagcgcauccugcucacacaacgggaagaguagcuuuuaccggaaucucuuauggcugacggagaaaaacggacuuuaucccaauuugucuaaguccuacgugaacaauaaagaaaaggaaguacugguucuauggggcgugcaucacccuucaaacaucggcguccagcgcgccauauaccacacugagaacgcuuaugugagcguggucaguucucauuacucccgacguuucaccccagaaaucgcaaaaagacccaagguuagggaucaggaggggcggauuaauuauuacuggacacuccuggagccuggagacacuaucauuuuugaagccaacgguaaucuuaucgcuccaugguaugccuucgcgcugagccgcggcuuugagucggggauaauuaccucuaacgcaccgauggaugaaugugacgccaagugccagacaccccaaggagcuaucaauuccucauugccuuuccagaacgugcacccaguaaccauuggcgagugucccaaauacgugagaagugccaagcucaggauggucacgggucugcggaauaucccuagcauccagucccgcggguuauuuggagcaauugcuggcuucauagaaggcggguggacuggaaugaucgaugguugguauggcuaccaucaccagaacgagcaagggucuggauacgccgcggaccagaaaagcacacagaaugccauuaacggcaucaccaauaaggugaacucaguuauagagaaaaugaauacucaguuuacagcaguggguaaggaguucaacaaacuggaacgaagaauggaaaaucucaacaagaaggucgaugacggguuccuugauauuuggaccuauaacgcugagcuguuggugcuacuggaaaaugagaggacgcucgacuuucacgacaguaacguuaaaaaucuguacgagaagguaaaaucccaacuuaagaacaaugccaaagaaaucggcaacggaugcuucgaguuuuaucauaaguguaauaacgaaugcauggagagcgugaagaauggcaccuacgauuauccaaaauacucugaggaaucaaagcugaaccgggagaaaaucgacggggucaaguuggaaaguaugggaguguaucagauucucgcuaucuacagcacagucgccuccucucugguguuacugguuucgcuaggugcaauuagcuucuggaugugcuccaauggcucacuccagugucguauaugcaucuga

SEQ ID NO: 129280 - RNA, 1698 nt, Artificial Sequence
  derived and/or modified CDS sequence (opt3) from hemagglutinin__InfluenzaA__ABI21563
augaaggccaaacugcucgugcuucugugcaccuucacagcuacuuacgcagacacgaucuguauuggcuaucacgccaacaauagcaccgauacagucgacacuguuuuggagaagaacgugaccguaacacauuccgugaauuuacuggaagauucucacaacgggaaacuaugccuccugaagggaauagcgccccuucagcuggguaauuguucagucgcuggcuggaucuuggggaacccugagugcgaaagucucauuagcaaagaguccuggucuuacaucguggaaaccccaaauccggagaacggaacuuguuaucccggcuacuuugccgacuaugaggaacugagagagcaacugucgucaguuagcaguuucgaaagguuugagauuuucccuaaggaguccucuuggccaaaucauacagugaccggugucagcgcauccugcucacacaacgggaagaguagcuuuuaccggaaucucuuauggcugacggagaaaaacggacuuuaucccaauuugucuaaguccuacgugaacaauaaagaaaaggaaguacugguucuauggggcgugcaucacccuucaaacaucggcguccagcgcgccauauaccacacugagaacgcuuaugugagcguggucaguucucauuacucccgacguuucaccccagaaaucgcaaaaagacccaagguuagggggcaggagggacggauuaauuauuacuggacacuccuggagccuggugauacuaucauuuuugaagccaacggcaaucuuaucgcuccaugguaugccuucgcgcugagccgcggguuugagucgggaauaauuaccucuaacgcaccgaugaaugaaugugacgccaagugccagacaccccaaggcgcuaucaacuccucauugccuuuccagaaugugcacccaguaaccauuggugagugucccaaauacgugagaagugccaagcucaggauggucacggggcugcggaacaucccuagcauccagucccgcggauuauuuggcgcaauugcuggcuucauagaagggggauggacugguaugaucgauggcugguauggguaccaucaccagaaugagcaaggaucuggcuacgccgcggaccagaaaagcacacagaacgccauuaaugguaucaccaacaagguaaauucaguuauagagaaaaugaacacucaguuuacagcaguggggaaggaguucaauaaacuggaacgaagaauggaaaaccucaacaagaaggucgaugacggcuuccuugauauuuggaccuauaaugcugagcuguuggugcuacuggaaaacgagaggacgcucgacuuucacgauaguaaugugaaaaaccuguacgagaagguuaaaucccaacuuaagaauaacgccaaagaaaucggaaauggcugcuucgaguuuuaucauaaguguaacaaugaaugcauggagagcgugaagaacgggaccuacgacuauccaaaauacucugaggaaucaaagcugaaucgggagaaaaucgacggagucaaguuggaaaguauggguguguaucagauucucgcuaucuacagcacagucgccuccucucugguguuacugguuucgcuaggcgcaauuagcuucuggaugugcuccaacgggucacuccagugucguauaugcaucuga

SEQ ID NO: 129281 - RNA, 1698 nt, Artificial Sequence; identical to SEQ ID NO: 129280
  derived and/or modified CDS sequence (opt3) from hemagglutinin__InfluenzaA__ABI21574

SEQ ID NO: 129282 - RNA, 1701 nt, Artificial Sequence
  derived and/or modified CDS sequence (opt3) from hemagglutinin__InfluenzaA__ABI21736
augaagaccaucauugcccugagcuacauacucugccuuguguucgcucagaaacugcccggcaacgacaauuccacagcaacuuuguguuuagggcaccaugccgucccuaacggaacgcugguuaagaccaucacaaaugaucaaauugaggugacuaacgcgaccgaacuuguacagucuucaaguacagguggcaucugcgacagcccacaccagauucucgauggggagaauuguacccugaucgacgcucuacugggagauccgcauugcgacggcuuucagaacaaagaaugggauuuguucguggagagauccaaggccuauucuaauuguuaccccuaugacgucccugauuacgcaucgcucaggucacugguggccagcagugguacucuggaauuuaacaaugaguccuucaacuggacagggguugcucaaaauggaaccucuagcgcaugcaaacggcgcuccaacaagucauuuuucagucgacucaauugguuacaccagcugaaguauaaauacccagcccuuaacgugacgaugcccaauaacgagaaguuugacaaauuguauauauggggcguccaucacccuagcacugauucugaccagaucucccuguacgcucaggccccaggccgugugaccguaucaacaaagagaagccaacagacuguuauucccaacaucgggaguaggccuugggugcggggagucucuucccgcauuagcaucuacuggaccauagugaaaccaggugauauucuacucaucaauuguacaggcaaccugauugcgccgagaggguauuucaagaucaggucgggaaagucuuccaucaugcggucagacgcaaguauuggcaaaugcaauagcgaauguauaacccccaacgguuccaucccuaaugacaagccauuucagaacgugaaucgcauuacguacggggccugcccccgauaugucaaacagaacacucuuaagcuggcuacaggaaugagaaauguuccugagaaacaaaccaggggcaucuucggcgccauagcaggguuuauugaaaacggaugggaggguaugguggauggcugguacggguuccggcaccagaauagcgagggaacuggccaggcugccgacuugaagucuacacaagcggccaucaaccagaucaaugguaaacucaaccgucugauugaaaagaccaaugagaaguuucaucagaucgaaaaagaguucucagaaguagaggggcgcauucaggauuuagagaaguauguggaagacacgaaaauagaucuguggaguuacaacgcagagcuccuugucgcucuggaaaaccaacacaccaucgacuugacagauuccgagaugaauaagcuauucgaaagaacuaaaaagcagcugagggagaacgccgaggacgugggcaauggauguuuuaagauuuaucauaaaugcgauaacgcuugcaucggcagcauccggaaugggaccuacgaccacgauguuuaccgagacgaagcccucaacaaucgcuuccagauuaagggaguggagcugaaaucugguuauaaggacuggauacuuuggaucucauuugcaauuaguuguuuccuguugugcgucgugcuccugggcuuuaucaugugggccugucagaaagggaacauuagaugcaauaucuguauauga

SEQ ID NO: 129283 - RNA, 1701 nt, Artificial Sequence
  derived and/or modified CDS sequence (opt3) from hemagglutinin__InfluenzaA__ABI22159
augaagaccaucauugcccugagcuacauacucugccuuguguucgcucagaaacugcccggcaacgacaauuccacagcaacuuuguguuuagggcaccaugccgucccuaacggaacgaucguuaagaccauuacaaaugaucaaaucgaggugacuaacgcgaccgaacugguacagucuucaaguacaggugagauuugcgacagcccacaccagauccuagauggcgaaaauuguacccucauagacgcucugcuuggggauccgcagugcgacggauuucaaaacaaaaagugggaucuguucguggagagauccaaugccuauucuaacuguuaccccuaugacgucccugauuacgcaucguugaggucacucguggccagcaguggcacucuggaauuuaauaacgaguccuucaauuggacagguguuacccagaacgggacgucuagcgcuugcaaacggcgcuccaauaacucauuuuucagucgacugaauuggcucacucauuuaaaguuuaaguauccagcacugaacgugaccaugcccaacaaugagaaauucgacaaguuguacaucuggggaguccaccauccuggcacagauaacgaccagauuuuucuuuaugcccaggcuagcggccguaucacugugucuaccaaaagaucccaacagacaguaauuccaaauaucgggucaaggccccggguucgcaacauaccuagcagaauuaguaucuacuggaccauugugaagccaggagauauccugcuaaucaauucuacggguaaccucauugccccgaggggcuacuucaaaauacgguccggaaagagcucgaucaugcgcucugacgcgcccauugggaaguguaauuccgaaugcaucacuccuaacggcucaauaccaaaugacaaacccuuucagaacgucaaucgaauuacauauggugcauguccuagauacgugaagcagaacacccugaaacuugccacugggaugaggaaugugccagagaagcaaacacggggaaucuucggcgcuaucgccggcuuuauugaaaacgggugggagggaauggucgaugguugguauggcuuccgucaccagaauagugaggggaucggacaggcagcugaccugaaaagcacccaagccgcgauuaaccagauaaacggcaaguugaaucgccucaucgguaaaacgaacgaaaaguuccaccagauugagaaggaauuuuccgagguugaagggagaauccaggaucuggagaaauacguggaggacaccaagaucgauuuauggucuuauaaugccgaacugcucguagcacuugagaaccaacauacaauugaccugacugauagcgaaaugaauaaauuguucgagaggaccaagaaacagcuacgggaaaacgcugaggacaugggcaauggaugcuuuaagauauaccacaagugugauaacgccugcaucggcucaauucgaaaugggacauaugaccaugauguguaccgcgacgaggcucugaacaauagauuccagaucaaaggagucgaacucaagagugguuacaaagacuggauucuguggaucuccuuugccauaagcugcuuccuucuguguguggcauugcucggcuuuaucaugugggccugccagaaggggaacauuagguguaauaucugcauuuga

SEQ ID NO: 129284 - RNA, 1707 nt, Artificial Sequence
  derived and/or modified CDS sequence (opt3) from hemagglutinin__InfluenzaA__ABI23979
auggagaagaucgugcugcuccuugccauuauaagccuggucaaauccgaccagaucugcauuggcuaccacgcuaacaauucuaccgaacaaguugauacaaucauggagaagaacgugacuguaacgcaugcacaggacauuuuggaaaagacccacaaugggaaauuaugugaucuggacggagugaaaccccuaauccucagagauugcucagucgccgguuggcugcuuggcaacccuaugugugacgaguuccugaaugugccagaauggaguuauauaguugagaagaucaacccggcgaaugauuugugcuaccccgggaacuuuaaugacuaugaggaacucaagcaucugcugagcaggauuaaccacuucgagaaaauccagauuaucccuaaguccucuuggucggaucaugaagcuaguagcggagugaguuccgccuguccauaccagggccggucuagcuuuuuccgcaaugucguguggcucauuaaaaaggacaacgcauaucccacaauaaaacgauccuacaauaacacuaaucaagaggauuuacugguacuuugggguauccaccacccuaacgacgccgcugagcagacccguuuguaucagaacccaacaaccuacauuucaguugggacuucaacacugaaucagaggcuagugcccaagaucgcaaccagaagcaaggucaacggacaaucuggccggauggaauuuuucuggacgauccucaaaccuaaugaugccauuaacuuugaguccaauggcaacuucauagcuccagaaaaugccuacaagaucgugaaaaagggggacucaacuauuaugaaaagcgagcuggaauauggaaacugcaauaccaagugucagacaccgaucggugcgauaaacaguucuaugcccuuucauaauauucacccucuuacuaucggcgagugcccaaaauacgugaaguccaaccgccuggucuuggcaaccgggcucagaaauagcccccagggagagaggcggcgcaagaaacgaggccuguucggugccaucgcuggguuuauugaaggaggcuggcagggcaugguugacgggugguauggauaccaucacucgaacgagcaagguucuggcuaugccgcagauaaggaauccacacagaaagcuaucgacggggugaccaauaagguaaacucaauuauagauaaaaugaacacgcaguucgaggccgugggaagagaauuuaauaacuuagagaggcggaucgagaaucugaacaagaagauggaagacggcuuccucgaugucuggacuuacaaugcggagcuucugguguugauggaaaacgagcguacacuagacuuccacgauaguaauguuaaaaaccuguaugacaaggugcgccuccaacugagagauaaugccaaagaacuugguaacggguguuuugaguucuaccauaggugcgacaaugaguguauggaaagcguccggaacggcaccuacgauuauccucaguacuccgaggaaucucgacugaagcgcgaggagauuagcggagugaaauuggaaucaaucggcacuuaucagauccucaguauuuacuccacaguagcaagcucucuggcuuuagccauaaugguugcugggcugucacuauggaugugcaguaauggaagccuccagugcagaaucuguauuuga

SEQ ID NO: 129285 - RNA, 1701 nt, Artificial Sequence; identical to SEQ ID NO: 128330
  derived and/or modified CDS sequence (opt3) from hemagglutinin__InfluenzaA__ABI26646

SEQ ID NO: 129286 - RNA, 1701 nt, Artificial Sequence; identical to SEQ ID NO: 128959
  derived and/or modified CDS sequence (opt3) from hemagglutinin__InfluenzaA__ABI30367

SEQ ID NO: 129287 - RNA, 1701 nt, Artificial Sequence; identical to SEQ ID NO: 128969
  derived and/or modified CDS sequence (opt3) from hemagglutinin__InfluenzaA__ABI30378

SEQ ID NO: 129288 - RNA, 1701 nt, Artificial Sequence; identical to SEQ ID NO: 128698
  derived and/or modified CDS sequence (opt3) from hemagglutinin__InfluenzaA__ABI30400

SEQ ID NO: 129289 - RNA, 1701 nt, Artificial Sequence
  derived and/or modified CDS sequence (opt3) from hemagglutinin__InfluenzaA__ABI30411
augaagaccaucauugcccugagcuacauacucugccuuguguucgcucagaaacugcccggcaacgacaauuccacagcaacuuuguguuuagggcaccaugccgucccuaacggaacgcugguuaagaccaucacaaaugaucaaauugaggugacuaacgcgaccgaacuuguacagucuucaaguacagguggcaucugcgacagcccacaccagauucucgauggggagaauuguacccugaucgacgcucuacugggagauccgcauugcgacggcuuucagaacaaagaaugggauuuguucguggagagauccaaggccuauucuaauuguuaccccuaugacgucccugauuacgcaucgcucaggucacugguggccagcagugguacucuggaauuuaacaaugaguccuucaacuggacagggguugcucaaaauggaaccucuagcgcaugcaaacggcgcuccaacaagucauuuuucagucgacucaauugguuacaccagcugaaguauaaauacccagcccuuaacgugacgaugcccaauaacgagaaguuugacaaauuguauauauggggcguccaucacccuagcacugauucugaccagaucucccuguacgcucaggccccaggccgugugaccguaucaacaaagagaagccaacagacuguuauucccaacaucgggaguaggccuugggugcggggagucucuucccgcauuagcaucuacuggaccauagugaaaccaggugauauucuacucaucaauuguacaggcaaccugauugcgccgagaggguauuucaagaucaggucgggaaagucuuccaucaugcggucagacgcaaguauuggcaaaugcaauagcgaauguauaacccccaacgguuccaucccuaaugacaagccauuucagaacgugaaucgcauuacguacggggccugcccccgauaugucaaacagaacacucuuaagcuggcuacaggaaugagaaauguuccugagaaacaaaccaggggcaucuucggcgccauagcaggguuuauugaaaacggaugggaggguaugguggauggcugguacggguuccggcaccagaauagcgagggaacuggccaggcugccgacuugaagucuacacaagcggccaucaaccagaucaaugguaaacucaaccgucugauugaaaagaccaaugagaaguuucaucagaucgaaaaagaguucucagaaguagaggggcgcauucaggauuuagagaaguauguggaagacacgaaaauagaucuguggaguuacaacgcagagcuccuugucgcucuggaaaaccaacacaccaucgacuugacagauuccgagauggacaagcuauucgaaagaacuaaaaagcagcugagggagaaugccgaggauaugggcaacggauguuuuaagauuuaucauaaaugcgacaaugcuugcaucggcagcauccggaacgggaccuacgaucacgacguguaccgagacgaagcccucaauaaccgcuuccagauuaagggaguugagcugaaaucugguuauaaggauuggauacuuuggaucucauuugcaauuaguuguuuccuguugugcgugguccuccugggcuuuaucaugugggccugucagaaagggaauauuagaugcaacaucuguauauga

SEQ ID NO: 129290 - RNA, 1701 nt, Artificial Sequence; identical to SEQ ID NO: 128639
  derived and/or modified CDS sequence (opt3) from hemagglutinin__InfluenzaA__ABI30422

SEQ ID NO: 129291 - RNA, 1701 nt, Artificial Sequence; identical to SEQ ID NO: 128330
  derived and/or modified CDS sequence (opt3) from hemagglutinin__InfluenzaA__ABI30433

SEQ ID NO: 129292 - RNA, 1701 nt, Artificial Sequence; identical to SEQ ID NO: 128639
  derived and/or modified CDS sequence (opt3) from hemagglutinin__InfluenzaA__ABI30444

SEQ ID NO: 129293 - RNA, 1701 nt, Artificial Sequence; identical to SEQ ID NO: 128330
  derived and/or modified CDS sequence (opt3) from hemagglutinin__InfluenzaA__ABI30455

SEQ ID NO: 129294 - RNA, 1701 nt, Artificial Sequence; identical to SEQ ID NO: 128330
  derived and/or modified CDS sequence (opt3) from hemagglutinin__InfluenzaA__ABI30466

SEQ ID NO: 129295 - RNA, 1701 nt, Artificial Sequence; identical to SEQ ID NO: 128330
  derived and/or modified CDS sequence (opt3) from hemagglutinin__InfluenzaA__ABI30477

SEQ ID NO: 129296 - RNA, 1701 nt, Artificial Sequence; identical to SEQ ID NO: 128330
  derived and/or modified CDS sequence (opt3) from hemagglutinin__InfluenzaA__ABI30488

SEQ ID NO: 129297 - RNA, 1701 nt, Artificial Sequence; identical to SEQ ID NO: 128330
  derived and/or modified CDS sequence (opt3) from hemagglutinin__InfluenzaA__ABI30499

SEQ ID NO: 129298 - RNA, 1701 nt, Artificial Sequence; identical to SEQ ID NO: 128291
  derived and/or modified CDS sequence (opt3) from hemagglutinin__InfluenzaA__ABI30510

SEQ ID NO: 129299 - RNA, 1701 nt, Artificial Sequence
  derived and/or modified CDS sequence (opt3) from hemagglutinin__InfluenzaA__ABI30521
augaagaccaucauugcccugagcuacauacucugccuuguguucgcucagaaacugcccggcaacgacaauuccacagcaacuuuguguuuagggcaccaugccgucccuaacggaacgaucguuaagaccauuacaaaugaucaaaucgaggugacuaacgcgaccgaacugguacagucuucaaguacagguggcauuugcgacagcccacaccagauccuagauggggagaauuguacccucauagacgcucugcuuggagauccgcagugcgacggcuuucaaaacaaaaagugggaucuguucguggaaagauccaaagccuauucuaauuguuaccccuaugacgucccugauuacgcaucguugaggucacucguggccagcagugguacucuggaguuuaacaaugaauccuucaacuggacagggguuacccagaauggaacgucuagcgcuugcaagcggcgcuccaacaauucauuuuucagucgacugaacuggcucacucauuuaaaguuuaaauauccagcacugaaugugaccaugcccaacaacgagaaguucgacaaacuuuacaucuggggcguccaccauccuggcacaaauaacgaucagauuagcuuguaugcccaggcuucugggcguaucacuguguccaccaagagaucacaacagacaguaauuccaaauaucggaagcaggccccggguucgcgacauaccuaguagaauuucuaucuacuggaccauugugaaaccaggugauauccugcuaaucaacuccacgggcaaucucauugccccgaggggguacuuuaagauacggagcggaaagucgucuaucaugcgcuccgacgcgucaauuggcaaauguaacagugagugcaucacucccaaugguagcauaccuaacgacaagccauuccagaaugucaaccgaauuacauauggggcaugucccagauacgugaaacagaauacccugaaacuugccacuggaaugaggaacgugccugaaaagcaaacacggggcaucuuuggcgcuaucgccggguucauugagaauggaugggaagguauggucgauggcugguauggguuucgucaccagaacuccgagggaaucggccaggcagcugaccugaagucuacccaagccgcgauuaaucagauaaacgguaaauugaaccgccucaucgggaagacgaaugagaaguuccaccagauugaaaaagaguucagcgaaguugagggcagaauccaggaucuggaaaaguacguggaggacaccaaaaucgauuuauggucauauaacgccgagcugcucguagcacuugaaaaucaacauacaauugaccugacugauagugagaugaacaaguuguuugaaaggaccaaaaagcagcuacgggagaaugcugaagacaugggaaacggcugcuucaagauauaccacaaaugugauaaugccugcaucggguccauucgaaacggaacauaugaccaugauguguaccgcgacgaggcucugaauaacagauuucagaucaagggugucgagcucaaaagcggcuacaaggacuggauucuguggaucucuuucgccauaucaugcuuucuucuguguguggcauugcucggguucaucaugugggccugccagaaaggaaauauuagguguaacaucugcauuuga

SEQ ID NO: 129300 - RNA, 1701 nt, Artificial Sequence; identical to SEQ ID NO: 128330
  derived and/or modified CDS sequence (opt3) from hemagglutinin__InfluenzaA__ABI30532

SEQ ID NO: 129301 - RNA, 1701 nt, Artificial Sequence; identical to SEQ ID NO: 129161
  derived and/or modified CDS sequence (opt3) from hemagglutinin__InfluenzaA__ABI30543

SEQ ID NO: 129302 - RNA, 1701 nt, Artificial Sequence; identical to SEQ ID NO: 128330
  derived and/or modified CDS sequence (opt3) from hemagglutinin__InfluenzaA__ABI30554

SEQ ID NO: 129303 - RNA, 1698 nt, Artificial Sequence; identical to SEQ ID NO: 129252
  derived and/or modified CDS sequence (opt3) from hemagglutinin__InfluenzaA__ABI30565

SEQ ID NO: 129304 - RNA, 1701 nt, Artificial Sequence; identical to SEQ ID NO: 128681
  derived and/or modified CDS sequence (opt3) from hemagglutinin__InfluenzaA__ABI30587

SEQ ID NO: 129305 - RNA, 1701 nt, Artificial Sequence
  derived and/or modified CDS sequence (opt3) from hemagglutinin__InfluenzaA__ABI30609
augaagaccaucauugcccugagcuacauacucugccuuguguucgcucagaaacugcccggcaacgacaauuccacagcaacuuuguguuuagggcaccaugccgucccuaacggaacgaucguuaagaccauuaugaaugaucaaaucgaggugacaaacgcgacugaacugguacagucuucaaguaccgguggcauuugcgacagcccacaccagauccuagauggggagaauuguacacucauagacgcucugcuuggagauccgcagugcgacggcuuucaaaacaaaaagugggaucuguucguggaaagauccaaagccuauucuaauuguuaccccuaugacgucccugauuacgcaucguugaggucacucguggccagcagugguacccuggaguuuaacaaugaauccuucaacuggacugggguuacacagaauggaaccucuagcgcuugcaagcggcgcuccaacaauucauuuuucagucgacugaacuggcucacgcauuuaaaguuuaaauauccagcacugaaugugacuaugcccaacaacgagaaguucgacaaacuuuacaucuggggcguccaccauccuggcaccgauaaugaccagaucuuuuuguaugcccaggcuagcgggcguauuacagugucuacuaagagaucccaacagaccguaauuccaaacaucggaucaaggccccggguucgcaauauaccuagcagaauuaguaucuacuggacaauugugaaaccaggugauauccugcuaaucaacucuaccggcaaucucauugccccgaggggguacuucaagauacgguccggaaagagcucgaucaugcgcucugacgcgcccauuggcaaauguaacuccgagugcaucacgccuaaugguucaauaccaaacgacaagcccuuucagaaugucaaccgaauuacuuauggggcauguccuagauacgugaaacagaauacacugaagcuggccaccggaaugaggaacgugccagaaaaacaaacucggggcaucuucggcgcuaucgccggguuuauugagaauggaugggaagguauggucgauggcugguauggguuccgucaccagaacagugagggaacaggccaggcagcugaccuuaagagcacccaagccgcgaucaaucagauuaacgguaaauugaaccgccucauagggaagacgaaugagaaguuccaccagaucgaaaaagaguuuuccgaaguugagggcaggauucaggaucuggaaaaguacguggaggacaccaaaaucgauuuauggucuuauaacgccgagcugcucguagcacuugaaaaucaacauacaaucgaccugacugauagcgagaugaacaaguuguucgaaagaaccaaaaagcagcuacgggagaaugcugaagacaugggaaacggcugcuuuaagauuuaccacaaaugugauaaugccugcauagggucaauccgaaacggaacauaugaccaugauguguaccgcgacgaggcucugaauaacagauuccagauuaagggugucgagcucaaaaguggcuacaaggacuggauccuguggauuuccuuugccaucagcugcuuccuucuguguguggcauugcucggguuuauaaugugggccugccagaaaggaaauaucagguguaacauuugcaucuga

SEQ ID NO: 129306 - RNA, 1701 nt, Artificial Sequence
  derived and/or modified CDS sequence (opt3) from hemagglutinin__InfluenzaA__ABI30620
augaagaccaucauugcccugagcuacauacucugccuuguguucgcucagaaacugcccggcaacgacaauuccacagcaacuuuguguuuagggcaccaugccgucccuaacggaacgaucguuaagaccauuacaaaugaucaaaucgaggugacuaacgcgaccgaacugguacagucuucaaguacagguggcauuugcgacagcccacaccagauccuagauggggagaauuguacccucauagacgcucugcuuggagauccgcagugcgacggcuuucaaaacaaaaagugggaucuguucaucgaaagauccaaagccuauucuaauuguuaccccuaugacgugccugauuacgcaucguugaggucacucgucgccagcagugguacucuggaguuuaacaaugaauccuucaacuggacaggggugacccagaauggaacgucuagcgcuugcaagcggcgcuccaacaauucauuuuucagucgacugaacuggcucacucauuuaaaguuuaaauauccagcacugaauguuaccaugcccaacaacgagaaguucgacaaacuuuacauuuggggcgugcaccauccuggcacagauaaugaccagaucagcuuguaugcccaggcuucugggcguauuacugucuccaccaagagaucacaacagacagugaucccaaacauaggaagcaggccccggguacgcgauauuccuaguagaaucucuauuuacuggaccaucguuaaaccaggugacauccugcuaauuaauuccacgggcaaccucauagccccgaggggguacuuuaagauccggagcggaaagucgucuauuaugcgcuccgacgcgcccaucggcaaauguaauucagagugcauaacuccuaacgguaguauuccaaaugauaagcccuuccagaacgugaaucgaaucacauauggggcauguccuagauacgucaaacagaacacccugaaacuugccacuggaaugaggaaugugccagaaaagcaaacacggggcaucuuuggcgcuauugccggguucaucgagaacggaugggaagguaugguggacggcugguauggguuucgucaccagaauagcgagggaauuggccaggcagcugaucugaaguccacccaagccgcgauaaaccagaucaaugguaaauugaaccgccucauugggaagacgaacgagaaguuccaccagaucgaaaaagaguucucugaagucgagggcagaauccaggaccuggaaaaguacguugaggauaccaaaguggacuuauggagcuauaaugccgagcugcucguagcacuugaaaaccaacauacaauugaucugacugacucagagaugaauaaguuguuugaaaggaccaaaaagcagcuacgggagaacgcugaagauaugggaaauggcugcuucaagauauaccacaaaugugacaacgccugcaucgggaguauucgaaauggaacauaugaucaugacguguaccgcgacgaggcucugaacaauagauuucagaucaagggugucgagcucaaauccggcuacaaggauuggauucuguggaucagcuucgccauaucuugcuuucuucuguguguggcauugcucggguucaucaugugggccugccagaaaggaaacauuagguguaauaucugcauuuga

SEQ ID NO: 129307 - RNA, 1701 nt, Artificial Sequence; identical to SEQ ID NO: 128681
  derived and/or modified CDS sequence (opt3) from hemagglutinin__InfluenzaA__ABI30733

SEQ ID NO: 129308 - RNA, 1701 nt, Artificial Sequence; identical to SEQ ID NO: 128681
  derived and/or modified CDS sequence (opt3) from hemagglutinin__InfluenzaA__ABI30744

SEQ ID NO: 129309 - RNA, 1701 nt, Artificial Sequence; identical to SEQ ID NO: 128681
  derived and/or modified CDS sequence (opt3) from hemagglutinin__InfluenzaA__ABI30755

SEQ ID NO: 129310 - RNA, 1701 nt, Artificial Sequence; identical to SEQ ID NO: 128681
  derived and/or modified CDS sequence (opt3) from hemagglutinin__InfluenzaA__ABI30766

SEQ ID NO: 129311 - RNA, 1701 nt, Artificial Sequence; identical to SEQ ID NO: 128681
  derived and/or modified CDS sequence (opt3) from hemagglutinin__InfluenzaA__ABI30777

SEQ ID NO: 129312 - RNA, 1701 nt, Artificial Sequence
  derived and/or modified CDS sequence (opt3) from hemagglutinin__InfluenzaA__ABI30788
augaagaccaucauugcccugagcuacauacucugccuuguguucgcucagaaacuguccggcaacgacaauucuacagcaacuuuguguuuagggcaccaugccguccccaacggaacgaucguuaagaccauuacaaaugaucaaaucgaggugacuaacgcgaccgaacugguacagucaaguagcacagguggcauuugcgacuccccucaccagauccuagauggggagaauuguacccucauagacgcucugcuuggagauccacagugcgacggcuuucaaaacaaaaagugggaucuguucguggaaagaucuaaagccuauucgaauuguuacccguaugacguccccgauuacgcaucauugaggagccucaucgccaguuccgguacucuggaguuuaacaaugaaucuuucaacuggacaggggugacccagaauggaacgagcuccgcuugcaagcggcgcucaaacaguagcuuuuucucucgacugaauuggcucacucauuuaaaguuuaaauauccugcacugaacguuaccaugccaaauaacgaggaguucgacaaacuuuacauuuggggcgugcaccaucccggcacauauaacgaucagaucuccuuguacgcccaggcuucagggcguauuacugucagcaccaagagaagucaacagacagugaucccuaauauaggaucuaggccacggguacgcgacauucccuccagaaucagcauuuacuggaccaucguuaagccuggugauauccugcuaauuaacucgacgggcaaucucauagccccaaggggguauuuuaaaauccggucuggaaaguccucaauuaugcgcagugacgcgccgaucggcaaguguaacagcgaaugcauaacucccaaugguuccauuccuaacgacaaaccauuccagaaugugaaccgaaucacauacggggcaugucccagauaugucaagcagaauacccugaaacuugccacuggaaugaggaacgugccugagaagcaaacacggggcaucuuuggcgcuauugccggguucaucgaaaauggaugggaggguaugguggauggcugguacggguuucgucaccagaacucugagggaauuggccaggcagcugaccugaaaagcacccaagccgcgauagaucagaucaaugguaaguugaaccgccucauugggaaaacgaaugaaaaguuccaccagaucgagaaggaguucucagaagucgaaggcagaauccaggaccuggagaaauauguugaggauaccaagauugacuuauggaguuacaacgccgaacugcucguggcacuugagaaccaacauacaauagaucugacugacuccgaaaugaauaaauuguuugagaggaccaagaaacagcuacgggaaaacgcugaggauaugggaaauggcugcuucaagaucuaucacaagugugacaacgccugcauugggagcauccgaaauggaacauacgaucaugacguauaccgcgacgaggcucugaacaauagauuucagauuaaagguguggaacucaagucuggcuauaaagauuggauccuguggauaucauucgccaucaguugcuuucuucugugugucgcauugcucggguucauuaugugggccugccagaagggaaacaucagguguaauauuugcaucuga

SEQ ID NO: 129313 - RNA, 1701 nt, Artificial Sequence; identical to SEQ ID NO: 128681
  derived and/or modified CDS sequence (opt3) from hemagglutinin__InfluenzaA__ABI30799

SEQ ID NO: 129314 - RNA, 1701 nt, Artificial Sequence
  derived and/or modified CDS sequence (opt3) from hemagglutinin__InfluenzaA__ABI30810
augaagaccaucauugcccugagcuacauacucugccuuguguucgcucagaaacugcccggcaacgacaauuccacagcaacuuuguguuuagggcaccaugccgucccuaacggaacgaucguuaagaccauuacaaaugaucaaaucgaggugacuaacgcgaccgaacugguacagucuucaaguacagguggcauuugcgacagcccacaccagauccuagauggggagaauuguacccucauagacgcucugcuuggagauccgcagugcgacggcuuucaaaacaaaaagugggaucuguucguggaaagauccaaagccuauucuaauuguuaccccuaugacgucccugauuacgcaucguugaggucacucaucgccagcagugguacucuggaguuuaacaaugaauccuucaacuggacaggggugacccagaauggaacgucuagcgcuugcaagcggcgcuccaacucaaguuucuucagccgacugaauuggcucacucauuuaaaguuuaaauauccagcacugaacguuaccaugcccaauaacgaggaguucgacaaacuuuacauuuggggcgugcaccauccuggcacauauaacgaucagaucucuuuguacgcccaggcuuccgggcguauuacugucucaaccaagagaagccaacagacagugaucccaaauauaggaaguaggccccggguacgcgacauuccuucuagaaucuccauuuacuggaccaucguuaagccaggugauauccugcuaauuaacagcacgggcaaucucauagccccgaggggguauuuuaaaauccggucgggaaagucuuccauuaugcgcucagacgcgcccaucggcaaguguaacagugaaugcauaacuccuaaugguagcauuccaaacgacaaacccuuccagaaugugaaccgaaucacauacggggcauguccuagauaugucaagcagaauacccugaaacuugccacuggaaugaggaacgugccagagaagcaaacacggggcaucuuuggcgcuauugccggguucaucgaaaauggaugggaggguaugguggauggcugguacggguuucgucaccagaacuccgagggaauuggccaggcagcugaccugaaaucuacccaagccgcgauagaucagaucaaugguaaguugaaccgccucauugggaaaacgaaugaaaaguuccaccagaucgagaaggaauuuagcgaggucgaaggcagaauccaggaccuggagaaauauguugaggauaccaagauugacuuauggucauacaacgccgaacugcucguggcacuugagaaccaacauacaauagaucugacugacagugaaaugaauaaauuguuugagaggaccaagaaacagcuacgggaaaacgcugaggauaugggaaauggcugcuucaagaucuaucacaagugugacaacgccugcauuggguccaucaaaaauggaacauacgaucaugacguauaccgagacgaggcucugaacaaucgcuuucagauuaaggguguggaacucaaaagcggcuauaaggauuggauccuguggauaucuuucgccaucucaugcuuucuucugugugucgcauugcucggguucauuaugugggccugccagaaaggaaacaucagauguaauauuugcaucuga

SEQ ID NO: 129315 - RNA, 1701 nt, Artificial Sequence
  derived and/or modified CDS sequence (opt3) from hemagglutinin__InfluenzaA__ABI30821
augaagaccaucauugcccugagcuacauacucugccuuguguucgcucagaaacugcccggcaacgacaauuccacagcaacuuuguguuuagggcaccaugccgucccuaacggaacgaucguuaagaccauuacaaaugaucaaaucgaggugacuaacgcgaccgaacugguacagucuucaaguacagguggcauuugcgacagcccacaccagauccuagauggggagaauuguacccucauagacgcucugcuuggagauccgcagugcgacggcuuucaaaacaaaaagugggaucuguucguggaaagauccaaagccuauucuaauuguuaccccuaugacgucccugauuacgcaucguugaggucacucaucgccagcagugguacucuggaguuuaacaaugaauccuucaacuggacaggggugacccagaauggaacgucuagcgcuugcaagcggcgcuccaacucaaguuucuucagccgacugaauuggcucacucauuuaaaguuuaaauauccagcacugaacguugccaugcccaauaacgaggaguucgacaaacuuuacauuuggggcgugcaccauccuggcaccuauaacgaucagaucucuuuguacgcucaggccuccgggcguauuacagucucaacuaagagaagccaacagaccgugaucccaaauauaggaaguaggccccggguacgcgacauuccuucuagaaucuccauuuacuggacaaucguuaagccaggugauauccugcuaauuaacagcaccggcaaucucauagcgccgaggggguauuuuaaaauccggucgggaaagucuuccauuaugcgcucagacgcacccaucggcaaguguaacagugaaugcauaacgccuaaugguagcauuccaaacgacaaacccuuccagaaugugaaccgaaucacuuacggggccuguccuagauaugucaagcagaauacacugaaacuugcuaccggaaugaggaacgugccagagaagcaaacucggggcaucuuuggcgccauugcaggguucaucgaaaauggaugggaggguaugguggauggcugguacggguuucgucaccagaacuccgagggaauuggccaggcugccgaccugaaaucuacacaagcggccauagaucagaucaaugguaaguugaaccgccucauugggaaaaccaaugaaaaguuccaccagaucgagaaggaauuuagcgaggucgaaggcagaauccaggaccuggagaaauauguugaggauacgaagauugacuuauggucauacaacgcagaacugcucguggcucuugagaaccaacauaccauagaucugacagacagugaaaugaauaaauuguuugagaggacuaagaaacagcuacgggaaaacgccgaggauaugggaaauggcugcuucaagaucuaucacaagugugacaacgcuugcauuggguccauccgaaauggaaccuacgaucaugacguauaccgcgacgaggcccugaacaauagauuucagauuaaagguguggaacucaagagcggcuauaaagauuggauccuguggauaucuuucgcaaucucaugcuuucuucugugugucgccuugcucggguucauuaugugggcuugccagaagggaaacaucagguguaauauuugcaucuga

SEQ ID NO: 129316 - RNA, 1701 nt, Artificial Sequence; identical to SEQ ID NO: 128681
  derived and/or modified CDS sequence (opt3) from hemagglutinin__InfluenzaA__ABI30832

SEQ ID NO: 129317 - RNA, 1701 nt, Artificial Sequence
  derived and/or modified CDS sequence (opt3) from hemagglutinin__InfluenzaA__ABI30843
augaagaccaucauugcccugagcuacauacucugccuuguguucgcucagaaacugcccggcaacgacaauuccacagcaacuuuguguuuagggcaccaugccgucccuaacggaacgaucguuaagaccauuacaaaugaucaaaucgaggugacuaacgcgaccgaacugguacagucuucaaguacagguggcauuugcgacagcccacaccagauccuagauggggagaauuguacccucauagacgcucugcuuggagauccgcagugcgacggcuuucaaaacaaaaagugggaucuguucguggaaagauccaaagccuauucuaauuguuaccccuaugacgucccugauuacgcaucguugaggucacucaucgccagcagugguacucuggaguuuaacaaugaauccuucaacuggacaggggugacccagaauggaacgucuagcgcuugcaagcggcgcuccaacucaaguuucuucagccgacugaauuggcucacucauuuaaaguuuaaauauccagcacugaacguuaccaugcccaauaacgaggaguucgacaaacuuuacauuuggggcgugcaccauccuggcacauauaacgaucagaucucuuuguacgcccaggcuuccgggcguauuacugucucaaccaagagaagccaacagacagugaucccaaauauaggaaguaggccccggguacgcgacauuccuucuagaaucuccauuuacuggaccaucguuaagccaggugauauccugcuaauuaacagcacgggcaaucucauagccccgaggggguauuuuaaaauccggucgggaaagucuuccauuaugcgcucagacgcgcccaucggcaaguguaacagugaaugcauaacuccuaaugguagcauuccaaacgacaaacccuuccagaaugugaaccgaaucacauacggggcauguccuagauaugucaagcagaauacccugaaacuugccacuggaaugaggaacgugccagagaagcaaacacggggcaucuuuggcgcuauugccggguucaucgaaaauggaugggaggguaugguggauggcugguacggguuucgucaccagaacuccgagggaauuggccaggcagcugaccugaaaucuacccaagccgcgauagaucagaucaaugguaaguugaaccgccucauugggaaaacgaaugaaaaguuccaccagaucgagaaggaauuuagcgaggucgaaggcagaauccaggaccuggagaaauauguugaggauaccaagauugacuuauggucauacaacgccgaacugcucguggcacuugagaaccaacauacaauagaucugacugacagugaaaugaauaaauuguuugagaggacccggaagcagcuacgagaaaacgcugaggauaugggaaauggcugcuucaaaaucuaucacaagugugacaacgccugcauuggguccauccgcaauggaacauacgaucaugacguauacagagacgaggcucugaacaauagguuucagauuaaggguguggaacucaaaagcggcuauaaggauuggauccuguggauaucuuucgccaucucaugcuuucuucugugugucgcauugcucggguucauuaugugggccugccagaaaggaaacauccgguguaauauuugcaucuga

SEQ ID NO: 129318 - RNA, 1701 nt, Artificial Sequence; identical to SEQ ID NO: 129261
  derived and/or modified CDS sequence (opt3) from hemagglutinin__InfluenzaA__ABI30865

SEQ ID NO: 129319 - RNA, 1707 nt, Artificial Sequence
  derived and/or modified CDS sequence (opt3) from hemagglutinin__InfluenzaA__ABI36155
auggagaagaucgugcugcuccuugccaccgucagccugguuaaauccgaccagauuugcauaggcuaccacgcuaacaauucuacagaacaaguggauacuaucauggagaagaacguaacggugacccaugcacaggacauuuuggaaaagacacacaaugggaaauuaugugaucuggacggagucaaaccccuaauccucagagauugcucaguggccgguuggcugcuuggcaacccuaugugugacgaguucauuaauguuccagaauggaguuauaucguggagaaggcgaacccggcuaaugggcugugcuaccccggaaacuuuaaugauuaugaggaauugaagcaucuccugagcaggauaaaccacuucgagaaacugcagaucauuccuaaguccucuuggucggaccaugaagccucacucggcgucagcagugcauguccauacuuaggucgguccuccuuuuuccgcaaugugguauggcugaucaaaaagaacaauacuuaucccaccauuaaacgaagcuacaacaauacaaaccaggaggaucuuuugguucugugggggauccaccacccuaacgacgccgcugagcaaacccgucuauaucagaauccaacuacauacauauccgugggaaccucaacgcucaaccagagacugguccccaagauugcaacuaggaguaaggugaauggccagagcggccggauggaauuuuucuggaccauccuuaaaccuaacgaugccauuaauuuugagucuaacgggaauuucaucgcuccagaauacgccuauaagaucgugaaaaagggagacuccgcgauuaugaaaucagagcuggaauacggugauugcaacacaaagugucaaacuccgaugggcgcaauaaauagcaguaugcccuugcauaacauccacccucucaccauuggggagugcccaaaauaugucaagucuaaucgccugguuuuagccacaggacugagaaacucuccccagagggagcggcgccgaaagaaaagaggccucuuuggugcuaucgccggguucauagaaggaggcuggcagggcaugguggacgggugguacggauaucaucacagcaaugagcaggguucgggcuacgcagcugacaaggaaucuacccaaaaagccauugaugggguaacgaacaaggucaauuccaucaucgacaaaaugaacacucaguuugaggcggugggaagggaguucaacaaucuugaacggcguauugagaaccugaauaagaagauggaagauggcuuuuuggacguguggacauauaacgccgagcuacugguucucauggaaaaugagcgcacccuggauuuccacgacucaaacgugaaaaaucuuuacgauaaggucagacugcaguugagggacaacgcaaaagaacucgguaauggguguuucgaguuuuaccauaagugcgauaacgaguguauggaaaguauccggaauggcacuuauaacuacccucaauauagcgaggaagcucgacugaaacgcgaggagauuuccggagugaaguuagaaucuauaggcaucuaccagauucugagcaucuauucaacaguagccaguucccuagcucucgccaucaugauggcagggcugagccuuuggaugugcucuaauggaucauugcagugcagaguuuguauuuga

SEQ ID NO: 129320 - RNA, 1707 nt, Artificial Sequence
  derived and/or modified CDS sequence (opt3) from hemagglutinin__InfluenzaA__ABI36166
auggagaagaucgugcugcuccuugccaccgucagccugguuaaauccgaccagauuugcauaggcuaccacgcuaacaauucuacagaacaaguggauacuaucauggagaagaacguaacggugacccaugcacaggacauuuuggaaaagacacacaaugggaaauuaugugaucuggacggagucaaaccccuaauccucagagauugcucaguggccgguuggcugcuuggcaacccuaugugugacgaguucauuaauguuccagaauggaguuauaucguggagaaggcgaacccggcuaaugggcugugcuaccccggaaacuuuaaugauuaugaggaauugaagcaucuccugagcaggauaaaccacuucgagaaacugcagaucauuccuaaguccucuuggucggaccaugaagccucacucggcgucagcagugcauguccauacuuaggucgguccuccuuuuuccgcaaugugguauggcugaucaaaaagaacaauacuuaucccaccauuaaacgaagcuacaacaauacaaaccaggaggaucuuuugguucugugggggauccaccacccuaacgacgccgcugagcaaacccgucuauaucagaauccaacuacauacauauccgugggaaccucaacgcucaaccagagacugguccccaagauugcaacuaggaguaaggugaauggccagagcggccggauggaauuuuucuggaccauccuuaaaccuaacgaugccauuaauuuugagucuaacgggaauuucaucgcuccagaauacgccuauaagaucgugaaaaagggagacuccgcgauuaugaaaucagagcuggaauacggugauugcaacacaaagugucaaacuccgaugggcgcaauaaauagcaguaugcccuuucauaacauccacccuuugaccauuggggagugcccaaaauaugucaagucuaaucgccucguucuggccacaggauuaagaaacucuccccagagggagcggcgccgaaagaaaagaggccuguucggugcuaucgccggguuuauagaaggaggcuggcagggcaugguggacgggugguacggauaucaucacagcaaugagcaggguucgggcuacgcagcugacaaggaaucuacccaaaaagccauugaugggguaacgaacaaggucaauuccaucaucgacaaaaugaacacucaguucgaggcggugggaagggaauuuaacaaucucgagcggcguauugagaaccuuaauaagaagauggaagauggcuuccuggacguguggacauauaacgccgaguugcuaguucugauggaaaaugagcgcacccucgauuuccacgacucaaacgugaaaaaucuguacgauaaggucagacuucagcugagggacaacgcaaaagaauuggguaauggguguuuugaguucuaccauaagugcgauaacgaguguauggaaaguauccggaauggcacuuauaacuacccucaauauagcgaggaagcucgacucaaacgcgaggagauuuccggagugaagcuggaaucuauaggcaucuaccagauuuuaagcaucuauucaacaguagccaguucccuggcucuagccaucaugauggcagggcucagccuguggaugugcucuaauggaucacuucagugcagaguuuguauuuga

SEQ ID NO: 129321 - RNA, 1707 nt, Artificial Sequence; identical to SEQ ID NO: 129320
  derived and/or modified CDS sequence (opt3) from hemagglutinin__InfluenzaA__ABI36177

SEQ ID NO: 129322 - RNA, 1707 nt, Artificial Sequence
  derived and/or modified CDS sequence (opt3) from hemagglutinin__InfluenzaA__ABI36406
auggagaagaucgugcugcuccuugccaccgucagccugguuaaauccgaccagauuugcauaggcuaccacgcuaacaauucuacagaacaaguggauacuaucauggagaagaacguaacggugacccaugcacaggacauuuuggaaaagacacacaaugggaaauuaugugaucuggacggagucaaaccccuaauccucagagauugcucaguggccgguuggcugcuuggcaacccuaugugugacgaguucauuaauguuccagaauggaguuauaucguggagaaggcgaacccggcuaaugggcugugcuaccccggaaacuuuaaugauuaugaggaauugaagcaucuccugagcaggauaaaccacuucgagaaacugcagaucauuccuaaguccucuuggucggaccaugaagccucacucggcgucagcagugcauguccauacuuaggucgguccuccuuuuuccgcaaugugguauggcugaucaaaaagaacaauacuuaucccaccauuaaacgaagcuacaacaauacaaaccaggaggaucuuuugguucugugggggcuacaccacccuaacgacgccgcugagcaaacccgucucuaucagaauccaacuacauacaucuccgugggaaccucaacgcugaaccagagacuuguccccaagauagcaacuaggaguaaggugaauggccagagcggccggauggaauuuuucuggaccauucugaaaccuaacgaugccaucaauuuugagucuaacgggaauuucauugcuccagaauacgccuauaagaucgugaaaaagggagacuccgcgaucaugaaaucagaguuggaauacggugauugcaacacaaagugucaaacuccgaugggcgcaauuaauagcaguaugcccuuucauaacauacacccucucaccaucggggagugcccaaaauaugucaagucuaaucgccugguuuuagccacaggacugagaaacucuccccagagggagcggcgccgaaagaaaagaggccucuucggugcuauugccggguuuaucgaaggaggcuggcagggcaugguggacgggugguacggauaucaucacagcaaugagcaggguucgggcuacgcagcugacaaggaaucuacccaaaaagccauagaugggguaacgaacaaggucaauuccauuaucgacaaaaugaacacucaguucgaggcggugggaagggaauuuaacaaucuugagcggcguaucgagaaccugaauaagaagauggaagauggcuucuuggacguguggacauauaacgccgagcuacugguucucauggaaaaugagcgcacccuggauuuccacgacucaaacgugaaaaaucuuuacgauaaggucagacugcaguugagggacaacgcaaaagaacucgguaauggguguuuugaguucuaccauaagugcgauaacgaguguauggaaaguauucggaauggcacuuauaacuacccucaauauagcgaggaagcucgacugaaacgcgaggagaucuccggagugaaguuagaaucuauuggcauauaccagauccugagcauuuauucaacaguagccaguucccuagcucucgccaucaugauggcagggcugagccuuuggaugugcucuaauggaucauugcagugcagaguuuguaucuga

SEQ ID NO: 129323 - RNA, 1707 nt, Artificial Sequence
  derived and/or modified CDS sequence (opt3) from hemagglutinin__InfluenzaA__ABI36450
auggagaagaucgugcugcuccuugccauugucagccugguuaaauccgaccagauaugcaucggcuaccacgcuaacaauucuaccgaacaaguggauacaauuauggagaagaacguaacugugacgcaugcacaggacaucuuggggaaaacccacaauggaaaguuaugugaucuggacggugucaaaccccuaauucucagagauugcucaguggccggcuggcugcuugggaacccuaugugugacgaguucaucaauguuccagaauggaguuauauaguggaaaaggcgaacccgacaaaugaucugugcuaccccggauccuuuaacgacuaugaggaguugaagcaucuccuguccaggaucaaucacuucgagaaaauucagaucauuccuaagucuucguggucagaucaugaagcuagcaguggcgucuccucugccuguccauaccuggguagccccuccuuuuuccggaacgugguauggcucaucaaaaagaacucaacuuauccuaccauaaaaacaaguuacaauaauaccaaccaggaagacuuacugguucuuugggggauucaccacagcaaugaugcagccgagcaaacucgcuuguaucagaacccaacaaccuacaucucuauuggaacguccacucugaaccagcgucuagugcccaagaucgcuacccgaucaaaggucaauggccagagcggcagaauggaguuuuucuggacaauccucaaaccuaacgacgcaauuaauuuugaaaguaacgggaauuucauagccccagaguacgcuuauaagaucgugaaaaagggagauucugccauuaugaaauccgaacuggaguacgguaacugcaauacuaagugucaaaccccgaugggcgcgaucaacagcucgaugcccuuucauaauauacacccucuuacaauuggggaaugcccaaaauaugugaagucuaacaggcuggucuuggcaaccggacuccggaauagcccccagcgcgagucaagaaggaagaaacggggccuguucggugccaucgcuggguuuaucgagggaggcuggcagggcaugguugacgggugguacggauaucaucacaguaacgaacaggguagcggcuacgccgcagacaaggaguccacgcaaaaagcuauugauggggugacuaauaagguaaacucuaucauugacaaaaugaauacacaguucgaagccgugggacgcgaguuuaacaacuuagaacgaagaauagagaaucugaacaagaagauggaggauggcuuccucgacgucuggaccuauaaugcggaacuucugguguugauggagaacgaaaggacucuagauuuccacgacagcaauguuaaaaaccuguacgauaaggugcggcuccagcugcgugacaaugccaaagagcuugguaacggguguuuugaguucuaccauaagugcgauaaugaauguauggagucaauccgcaacggcacauauaauuacccucaauauagugaagaggcaagacugaaaagggaagagauuuccggagucaaguuggagagcaucggcaccuaccagauccucucuauuuauucaacgguggcuaguagccuggccuuagcuauaaugaucgccgggcugucccuauggaugugcucuaacggaucgcuccagugccggauuuguaucuga

SEQ ID NO: 129324 - RNA, 1707 nt, Artificial Sequence
  derived and/or modified CDS sequence (opt3) from hemagglutinin__InfluenzaA__ABI49396
auggagaagaucgugcugcuccuugccauugucagccugguuaaauccgaccagauaugcaucggcuaccacgcuaacaauucuaccgaacaaguggauacaauuauggagaagaacguaacugugacgcaugcacaggacaucuuggggaaaacccacaauggaaaguuaugugaucuggacggugucaaaccccuaauucucagagauugcucaguggccggcuggcugcuugggaacccuaugugugacgaguucaucaauguuccagaauggaguuauauaguggaaaaggcgaacccgacaaaugaucugugcuaccccggaucauuuaacgacuaugaggaguugaagcaucuccuguccaggaucaaucacuucgagaaaauucagaucauuccuaagucuucguggucagaucaugaagcuagcaguggcgucuccucugccuguccauaccuggguagccccuccuuuuuccggaacgugguauggcucaucaaaaagaauagcacuuauccuaccauuaaaaagaguuacaacaauacaaaccaggaagacuuacugguucuuugggggauacaccacccaaaugaugcagccgagcaaacccgcuuguaucagaaccccacuacauacaucagcauuggaaccucuacgcugaaccagcggcuagugccuaagaucgcuacucguuccaaagucaauggccagucaggcagaauggaguuuuucugggcaauccucaagccaaacgacgccauuaauuuugaaagcaacgggaauuucauagcuccggaguacgccuauaaaaucgugaagaaaggagauagugcgauuaugaagucugaacuggaguacgguaacugcaauaccaaaugucaaacacccaugggcgcaaucaacuccagcaugccuuuucauaauauacacccacuuacuauuggggaaugccccaaguaugugaagucgaacaggcuggucuuggccaccggacuccgaaauucuccucagcgcgaguccagaaggaaaaagcggggccuguucggugcuaucgccggguuuaucgagggaggcuggcagggcaugguugacgggugguacggauaucaucacucaaacgaacaggguaguggcuacgcagcugacaaagagagcacacaaaaggccauugauggggugaccaauaaaguaaacuccaucauugacaagaugaauacgcaguucgaagcggugggacgcgaguuuaacaacuuagaacgaagaauagagaaucugaacaagaaaauggaggauggcuuccucgacgucuggacuuauaaugccgaacuucugguguugauggagaacgaaaggacacuagauuuccacgacucuaauguuaagaaccuguacgauaaagugcggcuccagcugcgugacaaugcaaaggagcuugguaacggguguuuugaguucuaccauaaaugcgauaaugaauguauggagagcauccgcaacggcaccuauaauuacccacaauauucagaagaggcuagacugaagagggaagagauuaguggagucaaguuggaguccaucggcacuuaccagauccucagcauuuauucuacaguggccucaagucuggcuuuagccauaaugaucgcagggcugagccuauggaugugcuccaacggaucucuccagugccggauuuguaucuga

SEQ ID NO: 129325 - RNA, 1704 nt, Artificial Sequence
  derived and/or modified CDS sequence (opt3) from hemagglutinin__InfluenzaA__ABI85000
augaacacccagauccuggccuucauugcuugcaugcucauaggcacaaagggggacaaaaucugucuuggacaccaugcaguggccaaugguacuaaggucaacacgcugaccgagagaggcauugaaguugugaaugcgacagagacuguagaaaccgugaacaucaaaaagauuugcacacaagggaaaaggcccaccgauuugggacaguguggcuuacuggguacucuaaucgggccuccacagugcgaccaguuucucgaguucgaugcuaaucugauaaucgaacggcgcgagggaacagacgucuguuacccgggcaaguuuaccaacgaggaaagccuucgacaaauucugcguggcuccgggggaaucgauaaggagucuauggguuucacguauucaggcauuagaacuaauggggccaccagugcaugcaggcggagcggauccucuuuuuacgccgaaaugaaaugguugcucucgaacucagacaaugcugcauucccccagaugacaaagagcuaucgcaacccuagaaauaaaccagcccugaucauauggggcgugcaccauagugguuccgcuacugagcagaccaagcuguacgggucuggaaacaaacucauuacaguuggcagcuccaaguaucagcaaucauuuacccccaguccuggcgccaggccacaggugaaugggcagagcggacggaucgauuuccacugguuacugcuugaccccaacgauacggucacuuuuacauucaauggugcguuuauugcaccugaccgcgccucuuucuuucgaggcgaguccuugggggugcagucagauguaccacuggacagcggaugugaaggcgauugcuuccauaguggugggaccaucguuucuucccuaccguuccaaaacaucaaccccagaacugugggcaaguguccuagguacgucaaacagacaagccuccugcuugcuaccggaaugcggaaugugccagagaaccccaagcaggccuaucaaaaacguaugacgcgcggccuguuuggggcaauugcuggauucauagaaaaugguugggagggcuugaucgacgggugguacggauuuagacaccagaacgcccagggcgaagguaccgcggccgacuacaagucgacacagucugcaauugaucaaaucacugggaaacucaauaggcugauagacaagaccaaccagcaguucgaguuaauugauaaugaguuuuccgaaaucgagcagcaaaucggcaacgugauuaauuggacacgggacucaaugacugaagucuggaguuauaacgcugagcugcucguugccauggaaaaucagcacaccaucgaucuugcugacagcgagaugaacaaacuguacgagcgagugcgcaagcaguugagagaaaaugccgaggaagauggaacaggcugcuucgagauuuuucauaagugugacgaucagugcauggaauccauaaggaacaauaccuaugaccacacucaauaccggacggagucucuacagaaccgcauccagauugauccuguaaaacugagcucaggguauaaggacaucauccucugguucaguuuuggagcauccugcuuccugcuucuggccauugcuauggguuugguguuuauauguaucaaaaacggcaauaugagaugcacaauuuguaucuga

SEQ ID NO: 129326 - RNA, 1701 nt, Artificial Sequence; identical to SEQ ID NO: 128878
  derived and/or modified CDS sequence (opt3) from hemagglutinin__InfluenzaA__ABI92291

SEQ ID NO: 129327 - RNA, 1701 nt, Artificial Sequence
  derived and/or modified CDS sequence (opt3) from hemagglutinin__InfluenzaA__ABI92302
augaaggccaaacugcucgugcuucugugcgcuuugagcgcaaccgacgccgauacaaucuguauuggcuaccacgcgaacaauuccacugacacggucgauaccguuuuagagaagaacgugacaguaacucauucugugaaucugcuagaagacucacacaacgggaaacucugcagacugaagggaauagcuccccuucagcuggguaaauguaguaucgccggcuggauuuuggggaauccugagugcgaaagccucuucuccaagaagucuuggucguauaucgcagagaccccaaacucagaaaauggaacauguuacccgggcuauuuugccgauuacgaggagcugagggaacaacugagcagugucuccucuuucgagcgguuugaaauuuuccccaaagagagcuccuggccuaagcauaacgugacccgcgguguuacugcuucaugcagucacaaagggaaaagcucuuuuuaucgaaaucucuuauggcugacagagaaaaacggauccuacccaaaucuuucaaagagcuaugugaacaauaaggaaaaagaggucuuggugcuguggggcguacaucaccccaguaacaucgaagaccagaagaccauauaccguaaagagaaugcauacguuucuguggucuccagccacuauaacagaagguucacgccugaaaucgccaagcggccaaaagugcgcgaucaggagggcagaauuaacuacuauuggacucuacucgagcccggggacaccaucauuuuugaagcuaauggaaaccugaucgccccuugguacgcguucgcacuuucgagggguuuuggcucugggauaauuacauccaaugccucaauggaugagugugacgcuaagugccagacuccacaaggagccaucaacaguagccugccguuccagaaugugcaucccgucaccauuggcgaauguccuaaauauguucgguccacaaaguugcgcauggugaccggucuccgaaacaucccaucuauccagagcagagggcuguuuggagcaauugcuggcuucauagagggcggguggacgggaaugaucgaugguugguacggcuaucaccaucagaaugaacaagggucaggauacgccgcggaccagaagaguacucagaacgccauuaauggcaucacaaacaaaguaaauuccgugauagagaagaugaacauucaguuuaccgcagucgguaaagaguucaauaaguuagaaaagaggauggagaaccugaauaagaagguggaugacggguuccucgacaucuggacuuacaacgcugaacuucugguuuugcuagagaacgaacggacacuggauuuucacgacagcaaugugaaaaaccucuaugagaaggucaaaucucaacugaagaauaacgccaaagagaucggcaauggaugcuucgaauuuuaccacaaguguaacaaugagugcauggaaucagugaagaacggcaccuaugauuaccccaaauauagugaggagagcaaacuuaaucgugaaaagauugacgggguaaagcuggaguccaugggaguuuaccagaucuuggcuauuuauucuacgguggccucgagccucguccuguuagugucccugggugcaauaucauucuggaugugcaguaacggcucucuacagugucgcaucugcauuuga

SEQ ID NO: 129328 - RNA, 1701 nt, Artificial Sequence
  derived and/or modified CDS sequence (opt3) from hemagglutinin__InfluenzaA__ABI92313
augaaggccaaacugcucgugcuucugugcgcuuucaccgcaacauacgccgacacuaucuguauuggcuaucacgcgaacaauagcacggauaccgucgacacaguuuuggagaagaacgugacuguaacccauuccgugaauuuacuggaagauucucacaacgggaaacuaugcagacucaagggaacagcuccccugcagcuugguaauuguucagucgccggcuggauacuggggaacccugagugcgaaaguuuguuuagcaaagaguccuggucuuacaucgcagaaaccccaaauccggagaacggaacuuguuaucccggcuacuucgccgacuaugaggaacucagggagcaacugucgucaauuagcaguuuugaacgguucgagaucuuuccuaaggaguccucuuggccaaaucauacagugaccaaggguguuacggcuagcugcucccacaacgggaaaucaaguuucuacaagaaucugcucugguuaacugaaaagaacggacuguaucccaaucuuagcaagucuuacgugaacaauaaagagaaggaagucuuggugcuguggggcguacaucacccuuccaacauuggcgaucagcgcgcaaucuaccacaccgagaacgccuauguuucaguggucagcagucauuacucucgacguuuuacaccagaaauaacuaagagacccaaagugagggaccaggaggggcggaucaauuauuacuggacccuacucgagccuggagauacaauuaucuucgaagcuaacgguaaucugauugccccaugguaugcguuugcacuuucccgcggcuucgggagcggaaucauaaccucgaacgccucuaugggcgagugugacgcuaagugccagacgccgcaaggugccauuaauuccucacugcccuuucagaacgugcacccugucacuaucggggaauguccaaaauacguuagaaguacaaaguugaggauggugaccggacuccggaauauucccagcauccagucccgcggccuguucggcgcaaucgcuggguuuauugagggagguuggacuggcaugauagaugggugguauggauaccaucaccagaacgaacaaggcucugguuacgccgcggaccagaaaagcacacagaaugccaucgaugggauuaccaacaagguaaauucagugaucgagaaaaugaacacgcaguucaccgcagucggcaaggaguucaauaaguuagaacgaagaauggagaaccugaauaaaaagguggacgauggauuucucgacauauggacauauaacgcugaacuucugguuuugcuagagaacgaaaggacucuggacuuccacgauaguaaugugaaaaaccucuacgagaaggucaaaaaucaacugaagaacaaugccaaggagauuggcaacgggugcuuugaguucuaucauaaauguaauaacgaaugcauggaauccgugaagaauggaaccuacgacuauccuaaauacagcgaggagucuaaacuuaaccgggagaaaaucgaugguguaaagcuggaaucaaugggcguuuaucacaucuuggcuauuuacaguacaguggccagcucccucguccuguuagugucucugggggcaaucucguuuuggaugugcagcaauggaucccuacagugucguauuugcauauga

SEQ ID NO: 129329 - RNA, 1701 nt, Artificial Sequence
  derived and/or modified CDS sequence (opt3) from hemagglutinin__InfluenzaA__ABI92324
augaagaccaucauugcccugagcuacauacucugccuuguguucgcucagaaacugcccggcaacgacaauuccacagcaacuuuguguuuagggcaccaugccgucccuaacggaacgcugguuaagaccaucacaaaugaucaaauugaggugacuaacgcgaccgaacuuguacagucuucaaguacagguagaaucugcgacagcccacacaggauucucgauggcaaaaauuguacccugaucgacgcucuacugggggauccgcauugcgacggauuucagaacaaggagugggauuuguucguggaacgguccaaagccuauucuaauuguuaccccuaugacgucccugauuacgcaucgcuccgcucacugguggccagcaguggcacucuggaguuuauaaacgaagacuucaauuggacagguguugcucaggaugggaaguccuaugcaugcaagcgaggaucugugaacagcuuuuucucccgucucaauugguuacacaaacuggaguacaaguauccagcccuuaacgucaccaugcccaauaacggcaaauuugacaaguuguacaucuggggcgugcaucacccuucaacggauagugaccaaacuagccuguacguaagagcuucugggaaaguuaccguguccacaaagaggucacagcagacugucauuccaaauaucggauuccggcccugggugcgcggucuaagcaguagaauuucuaucuauuggaccauagugaagccuggcgacauucuccugaucaacuccacagggaaccuuauugccccaaggggauacuuuaaaauccggaauggcaagagcucgaucaugcgcucugaugcgccgauugguaacuguuccucagagugcauaacccccaaugggaguaucccuaacgacaaaccauuccagaaugucaaccgaauuacguauggagcaugucccagauacguuaagcaaaauacucugaaauuggccacaggcaugaggaacgugccugaaaagcagacccggggcaucuuuggggcuauagccggauucauugagaaugguugggaaggcaugguagaugggugguauggauuucgucaccagaacagcgagggcacuggucaggcagcugaccucaaauccacacaagccgcgaucgaucagaucaaugggaagcugaaccgcuuaauugagaagaccaaugaaaaauuccaucagaucgagaaggaguucucugaaguggaaggcaggauucaagaccuggagaaauacgucgaggauacgaagauagaccucuggagcuauaacgccggacuucugguggcauuggaaaaucagcacaccaucgaucuaacagacucagagaugaacaaacuguuugaaagaacucggaagcagcuccgagagaacgcugaagauaugggcaaugggugcuucaagauuuaccauaaaugugacaacgccugcaucggaaguauccgcaaugguaccuacgaccacgauguuuauagagacgaggcucugaacaauagguuucagauuaagggcguggagcuuaaauccggguacaaggauuggauacuguggaucagcuucgccauuucuugcuuuuugcucugugucgugcuguuaggauucaucaugugggcaugccaaaaaggcaacauucgguguaauaucugcauauga

SEQ ID NO: 129330 - RNA, 1701 nt, Artificial Sequence
  derived and/or modified CDS sequence (opt3) from hemagglutinin__InfluenzaA__ABI92335
augaagaccaucauugcccugagcuacauacucugccuuguguucgcucagaaacugcccggcaacgacaauuccacagcaacuuuguguuuagggcaccaugccgucccuaacggaacgcugguuaagaccaucacaaaugaucaaauugaggugacuaacgcgaccgaacuuguacagucuucaaguacaagcagaaucugcgacuccccacaccagauucucgauggugagaauuguacccugaucgacgcucuacugggcgauccgcauugcgacggguuucagaacaaagaaugggauuuguucguggagaggucuaaggccuauucgaauuguuaccccuaugacgucccugauuacgugucacuccggagccugguugcaaguuccggaacucuggaauuuaacaaugagucuuucaacuggacaggcguggcccaaaaugguaccagcuccgcuugcaaacgccgaucagacaagagcuuuuucagucgucucaacugguuacaccagcugaaguauaaauacccagcacuuaaugucacgaugcccaacaaugagaaguuugauaaauuguauauauggggagugcaucacccugggacugacucugaucagaucucccuguacgcccaggcuucaggcagaguaaccguuagcacaaagaggagucaacagacugugauuccaaacaucggcucucggcccuggguccgcgggguguccagcagaauuucgaucuacuggaccauagugaaaccuggagacauucuacucaucaacucuacagguaaucugauugccccaaggggcuauuucaagauccgguccgggaagucaaguaucaugcgcagcgacgcgccgauuggaaaauguaacuccgaaugcauaacccccaauggcucuaucccuaacgauaagccauuucagaaugucaaccgaauuacguacggugcaugucccagauauguuaaacagaauacucuuaagcuggccacagggaugaggaacgugccugagaaacaaacccggggaaucuucggcgcuauagccggcuuuauugaaaaugggugggagggaaugauggacgguugguacggcuuccgucaccagaacagcgaggggacuggacaggcagcugauuugaagucaacacaagccgcgaucaaucagaucaacggcaaacucaaucgccugauugaaaagaccaacgagaaguuucaucagaucgaaaaagaguucagugaaguagaggguaggauucaggacuuagagaaguauguggaagauacgaaaauagaccugugguccuacaaugccgagcuccuugucgcacuggaaaaccaacacaccaucgauuugacagacagcgagaugaacaagcuauucgaaagaacuaaaaagcagcugcgggagaaugcugaggauauggggaacggcugcuuuaagauuuaucauaaaugugacaaugccugcaugggaucuauccgaaacggcaccuacgaucacgacguguaccgcgacgaagcucucaauaacagauuccagaucaaggggguugagcugaaaucaggauauaaggauuggauucuuuggauaaguuuugccaucagcugcuuccuguuguguauugugcucauggguuuuaucaugugggcaugccagaaaggcaauauuagguguaacaucugcauauga

SEQ ID NO: 129331 - RNA, 1701 nt, Artificial Sequence
  derived and/or modified CDS sequence (opt3) from hemagglutinin__InfluenzaA__ABI92346
augaagaccaucauugcccugagcuacauacucugccuuguguucgcucagaaacugcccggcaacgacaauuccacagcaacuuuguguuuagggcaccaugccgucccuaacggaacgcugguuaagaccaucacaaaugaucaaauugaggugacuaacgcgaccgaauugguacagucuucaaguacagguagaaucugcgacagcccacaccagauucucgauggcgagaauuguacccugaucgacgcccuucugggggauccgcauugcgacggauuucagaacaaagaaugggauuuguucguggagagguccaaggcuuauucuaauuguuaccccuaugacgucccugauuacgugucgcuccggucacugguugcaagcaguggcacucuggaauuuaacaaugaguccuucaacuggacagguguggcccaaaaugggaccucuagcgcuugcaaacgccgauccgacaagucauuuuucagucgucucaacugguuacaccagcugaaguauaaauacccagcacuuaaugucacgaugcccaacaaugagaaguuugauaaauuguauauauggggagugcaucacccuggcacugacagcgaucagaucucucuguacgcccaggcuuccggcagaguaaccguuucaacaaagaggagccaacagacugugauuccaaacaucgggagucggcccuggguccgcggagugucuuccagaauuagcaucuacuggaccauagugaaaccuggugacauucuacucaucaacucgacaggcaaucugauugccccaaggggguauuucaagauccggucuggaaaguccucaaucaugcgcagugacgcgccgauuggcaaauguaacagcgaaugcauaacccccaaugguuccaucccuaacgauaagccauuucagaaugucaaccgaauuacguacggggcaugucccagauauguuaaacagaauacucuuaagcuggccacaggaaugaggaacgugccugagaaacaaacccggggcaucuucggcgcuauagccggguuuauugaaaauggaugggaggguaugauggacggcugguacggguuccgucaccagaacucugagggaacuggccaggcagcugaucuaaagagcacacaagccgcgaucaaucagaucaacgguaaacucaaucgccugauugaaaagaccaacgagaaguuucaucagaucgaaaaagaguucucagaaguagaggggaggauucaggacuuagagaaguauguggaagauacgaaaauagaccuguggaguuacaaugccgagcuccuugucgcacuggaaaaccaacacaccaucgauuugacagacuccgagaugaacaagcuauucgaaagaacuaaaaagcagcugcgggagaaugcugaggauaugggcaacggaugcuuuaagauuuaucauaaaugugacaaugccugcaucggcagcauccgaaacgggaccuacgaucacgacguguaccgcgacgaagcucucaauaacagauuccacauuaagggaguugagcugaaaucugguuauaaggauugggugcuuuggauaucauuugccaucaguugcuuccuguuguguauuguccuccugggcuuuaucaugugggcaugccagaaagggaauauuagguguaacaucugcauauga

SEQ ID NO: 129332 - RNA, 1701 nt, Artificial Sequence; identical to SEQ ID NO: 128330
  derived and/or modified CDS sequence (opt3) from hemagglutinin__InfluenzaA__ABI92357

SEQ ID NO: 129333 - RNA, 1701 nt, Artificial Sequence; identical to SEQ ID NO: 128330
  derived and/or modified CDS sequence (opt3) from hemagglutinin__InfluenzaA__ABI92368

SEQ ID NO: 129334 - RNA, 1698 nt, Artificial Sequence; identical to SEQ ID NO: 129252
  derived and/or modified CDS sequence (opt3) from hemagglutinin__InfluenzaA__ABI92379

SEQ ID NO: 129335 - RNA, 1701 nt, Artificial Sequence
  derived and/or modified CDS sequence (opt3) from hemagglutinin__InfluenzaA__ABI92390
augaagaccaucauugccuucagcuacauacugugccucguguuugcucagaaacuucccggcaacgacaauuccacagcaacucuguguuuggggcaccaugccgucccuaacggaacgaucguuaagaccauuacaaaugaucaaaucgaggugacuaacgcgaccgaauuaguacagucuucaaguacagguggcauuugcgacagcccacaccagauccuggauggggagaauuguacccuaauagacgcucuccugggagauccgcagugcgacggcuuccaaaacaaaaagugggaucuuuuuguggaaagauccaaagccuauucuaauuguuaccccuaugacgucccugauuacgcaucgcugaggucauugguggccagcagugguacucucgaguucaacaaugaauccuuuaacuggacagggguuacccagaauggaacgucuagcgcuugcaagcggcgcuccaacaauucauucuuuagucgacugaacuggcugacucaucucaaguucaaauauccagcauuaaaugugaccaugcccaacaacgagaaguuugacaaacuguacaucuggggcguccaccauccuggcacagauaaugaccagacuagccuuuaugcccaggcuucugggcguauuaccguguccacaaagagaucacaacagaccguaacgccaaacaucggaagcaggccccggguucgcgauauuccuaguagaaucucuauauacuggacuauugugaaaccaggugacaucuugcugauuaauuccacaggcaaccuaaucgccccgaggggguacuucaagauccggagcggaaagucgucuauuaugcgcuccgacgcgcccauaggcaaauguaauucagagugcaucaccccuaacgguaguauuccaaaugauaagcccuuucagaacgucaaucgaaucacuuauggggcauguccuagauacgugaaacagaacacacucaagcuggccaccggaaugaggaaugugccagaaaaacaaacgcggggcauauucggcgcuauugccggguuuaucgagaacggaugggaagguauggucgacggcugguauggguuccgucaccagaauagcgagggaaccggccaggcagcugaucuuaaguccacacaagccgcgaucaaccagauuaaugguaaacugaaccgcuugaucgggaagacuaacgagaaguuccaccagauugaaaaagaguuuucugaaguugagggcagaauacaggaccucgaaaaguacguggaggauaccaaaaucgaccuguggagcuauaaugccgaguuacugguagcacucgaaaaccaacauacaauugaucuuacugacucagagaugaauaagcuguucgaaaggaccaaaaagcaguugcgggagaacgcugaagauaugggaaauggcugcuuuaagaucuaccacaaaugugacaacgccugcaucgggaguauucgaaauggaacauaugaucaugacguguaccgcgacgaggcucuaaacaauagauuccagauaaagggugucgagcugaaauccggcuacaaggauuggauccucuggauuagcuuugccaucucuugcuuccugcuuuguguggcacuguugggguuuauuaugugggccugccagaaaggaaacaucagguguaauauaugcaucuga

SEQ ID NO: 129336 - RNA, 1701 nt, Artificial Sequence; identical to SEQ ID NO: 128330
  derived and/or modified CDS sequence (opt3) from hemagglutinin__InfluenzaA__ABI92401

SEQ ID NO: 129337 - RNA, 1701 nt, Artificial Sequence
  derived and/or modified CDS sequence (opt3) from hemagglutinin__InfluenzaA__ABI92412
augaagaccaucauugcccugagcuacauacucugccuuguguucgcucagaaacugcccggcaacgacaauuccacagcaacuuuguguuuagggcaccaugccgucccuaacggaacgcugguuaagaccaucacaaaugaucaaauugaggugacuaacgcgaccgagcuaguacagucuucaaguacagguggcaucugcgacagcccacaccagauucucgauggggaaaauuguacccugaucgacgcucugcugggagauccgcagugcgacggcuuucaaaacaaaaagugggauuuguucguggaaagauccaaagccuauucuaauuguuaccccuaugacgucccugauuacgcaucgcucaggucacugauagccagcagugguacucuggaguuuaacaaugaauccuucaacuggacaggggugacccagaauggaacgucuagcgcuugcaagcggcgcuccaacucaaguuucuucagccgacucaauugguuaacucaucugaaguuuaaauauccagcacuuaacguuaccaugcccaauaacgaggaguucgacaaguuguacaucuggggcgugcaccauccuggcacauauaacgaucagauuucucuguacgcccaggcuuccgggcguaucacugucucaaccaaaagaagccaacagacagugauuccaaauaucggaaguaggccccggguacgcgacauaccuucuagaauuuccaucuacuggaccauuguuaagccaggugauauccuacucaucaacagcacgggcaaucugauugccccgaggggguauuuuaaaauacggucgggaaagucuuccaucaugcgcucagacgcgcccauuggcaaguguaacagugaaugcaucacuccuaaugguagcauaccaaacgacaaacccuuccagaauauuaaccgaaucacauacggggcauguccuagauaugugaagcagaauacccuuaaacuggccacuggaaugaggaacgucccagagaagcaaacacggggcaucuuuggcgcuauugccggguucaucgaaaauggaugggaggguaugguggauggcugguacggguuucgucaccagaacuccgagggaauuggccaggcagcugacuugaaaucuacccaagccgcgauagaucagaucaaugguaagcucaaccgccugauugggaaaacgaaugaaaaguuccaccagaucgagaaggaauuuagcgagguggaaggcagaauccaggacuuagagaaauaugucgaggauaccaagauugaccuguggucauacaacgccgaacuccuuguugcacuggagaaccaacauacaauagauuugacugacagugaaaugaauaaacuauuugagaggaccaagaaacagcugcgggaaaacgcugaggauaugggaaauggcugcuucaagaucuaucacaagugugacaacgccugcauuggguccauccgaaauggaacauacgaucaugacguguaccgcgacgaggcucucaacaauagauuucagauuaaagguguagaacuuaagagcggcuauaaagauuggauccuuuggauaucuuucgccaucucaugcuuucuguuguguguggcacuccugggguucauuaugugggccugccagaagggaaacaucagguguaauauuugcaucuga

SEQ ID NO: 129338 - RNA, 1701 nt, Artificial Sequence
  derived and/or modified CDS sequence (opt3) from hemagglutinin__InfluenzaA__ABI92423
augaagaccaucauugcccugagcuacauacucugccuuguguucgcucagaaacugcccggcaacgacaauuccacagcaacuuuguguuuagggcaccaugccgucccuaacggaacgaucguuaagaccauuacaaaugaucaaaucgaggugacuaacgcgaccgaacugguacagucuucaaguacagguggcauuugcgacagcccacaccagauccuagauggggagaauuguacccucauagacgcucugcuuggagauccgcagugcgacggcuuucaaaacaaaaagugggaucuguucguggaaagauccaaagccuauucuaauuguuaccccuaugacgucccugauuacgcaucguugaggucacucaucgccagcagugguacucuggaguuuaacaaugaauccuucaacuggacaggggugacccagaauggaacgucuagcgcuugcaagcggcgcuccaacucaaguuucuuuagccgacugaauuggcucacucauuuaaaguuuaaauauccagcacugaacguuaccaugcccaauaacgaggaguucgacaaacuuuacauuuggggcgugcaccauccuggcacauauaacgaucagaucucuuuguacgcccaggcuuccgggcguauuacugucucaaccaagagaagccaacagacagugaucccaaauauaggaaguaggccccggguacgcgacauuccuucuagaaucuccauuuacuggaccaucguuaagccaggugauauccugcuaauuaacagcacgggcaaucucauagccccgaggggguauuuuaaaauccggucgggaaagucuuccauuaugcgcucagacgcgcccaucggcaaguguaacagugaaugcauaacuccuaaugguagcauuccaaacgacaaacccuuccagaaugugaaccgaaucacauacggggcauguccuagauaugucaagcagaauacccugaaacuugccacuggaaugaggaacgugccagauaagcaaacacggggcaucuuuggcgcuauugccggguucaucgagaauggaugggaagguaugguggacggcugguacggguuucgucaccagaacuccgagggaauuggccaggcagcugaucugaaaucuacccaagccgcgauagaccagaucaaugguaaguugaaccgccucauugggaaaacgaaugagaaguuccaccagaucgaaaaggaguucagcgaagucgagggcagaauccaggaucuggaaaaauauguugaggacaccaagauugauuuauggucauacaacgccgagcugcucguggcacuugaaaaccaacauacaauagaccugacugauagugagaugaauaaauuguuugaaaggaccaagaaacagcuacgggagaacgcugaagacaugggaaauggcugcuucaagaucuaucacaagugugauaacgccugcauuggguccauccgaaauggaacauacgaccaugacguauaccgcgaugaggcucugaacaauagauuucagauuaaagguguggagcucaagagcggcuauaaagacuggauccuguggauaucuuucgccaucucaugcuuucuucugugugucgcauugcucggguucauuaugugggccugccagaagggaaacaucagguguaauauuugcaucuga

SEQ ID NO: 129339 - RNA, 1701 nt, Artificial Sequence; identical to SEQ ID NO: 128681
  derived and/or modified CDS sequence (opt3) from hemagglutinin__InfluenzaA__ABI92434

SEQ ID NO: 129340 - RNA, 1701 nt, Artificial Sequence
  derived and/or modified CDS sequence (opt3) from hemagglutinin__InfluenzaA__ABI92445
augaagaccaucauugcccugagcuacauacucugccuuguguucacacagaaacugcccggcaacgacaauuccacugcuacguuguguuuagggcaccaugcagucccuaacggaaccaucguuaagacaauuacuaaugaucaaaucgaggugaccaacgccacagaacugguacagucuucaaguaccgguggcauuugcgacagcccacaccagauccuagauggggagaauuguacucucauagacgcgcugcuuggagauccgcagugcgacggcuuucaaaacaaaaagugggaucuguucguggaaagauccaaggcuuauucuaauuguuaccccuaugacgucccugauuacgccucguugaggucacucaucgcaagcagugguacacuggaguuuaacaaugaauccuucaacuggaccggggugaaucagaacggaacgucuagcgccugcaagcggcgcuccaauucauccuuuuucagccgacugaacuggcucacucauuuaaaguuuaaauauccagcucugaauguuaccaugcccaacaacgaggaguucgacaaacuuuacauuuggggcgugcaccauccuggcacauauaaugaucagaucucuuuguacgcacaggccuccgggcguauuacugucucaaccaaaagaagccaacagacagugaucccaaacauaggaaguaggccccggguacgcgacauuccuucuagaaucuccauuuacuggaccaucguuaagccaggugauauccugcuaauuaauagcacgggcaaccucauagcuccgaggggguauuuuaaaauccggucgggaaagucuuccauuaugcgcucagacgcccccaucggcaaguguaauagugaaugcauaacuccuaacgguagcauuccaaaugacaaacccuuccagaacgugaaucgaaucacauacggggcguguccuagauaugucaagcagaacacccugaaacuugcaacuggaaugaggaaugugccagagaagcaaacacggggcaucuuuggcgccauugcuggguucaucgaaaacggaugggaggguaugguggauggcugguacggguuucgucaccagaauagugagggaauuggccaggccgcagaccugaaaucuacccaagcugccauagaucagaucaacgguaaguugaaucgccucauugggaaaacgaacgaaaaguuccaccagaucgagaaggaguucagcgaagucgaaggcagaauccaggaccuggagaaauauguugaggauaccaagauugacuuauggucauacaacgcggaacugcucguggcccuugagaaucaacauacaauagaucugacugacagugaaaugaacaaauuguuugagaggaccaagaaacagcuacgggaaaaugcagaggauaugggaaacggcugcuucaagaucuaucacaagugugacaauacaugcauuggguccauccgaaacggaacuuacgaucaugacguauaccgcgacgaggcucugaauaacagauuucagauuaaagguguggaacucaagagcggcuauaaagauuggauccuguggauaucuuucgccaucucaugcuuucuucugugugucgcuuugcucggguucauuaugugggccugccagaagggaaauaucagguguaacauuugcaucuga

SEQ ID NO: 129341 - RNA, 1701 nt, Artificial Sequence; identical to SEQ ID NO: 128681
  derived and/or modified CDS sequence (opt3) from hemagglutinin__InfluenzaA__ABI92456

SEQ ID NO: 129342 - RNA, 1701 nt, Artificial Sequence; identical to SEQ ID NO: 129289
  derived and/or modified CDS sequence (opt3) from hemagglutinin__InfluenzaA__ABI92467

SEQ ID NO: 129343 - RNA, 1701 nt, Artificial Sequence; identical to SEQ ID NO: 128698
  derived and/or modified CDS sequence (opt3) from hemagglutinin__InfluenzaA__ABI92478

SEQ ID NO: 129344 - RNA, 1701 nt, Artificial Sequence; identical to SEQ ID NO: 129289
  derived and/or modified CDS sequence (opt3) from hemagglutinin__InfluenzaA__ABI92489

SEQ ID NO: 129345 - RNA, 1701 nt, Artificial Sequence
  derived and/or modified CDS sequence (opt3) from hemagglutinin__InfluenzaA__ABI92500
augaagaccaucauugcccugagcuacauacucugccuuguguucgcucagaaacugcccggcaacgacaauuccacagcaacuuuguguuuagggcaccaugccgucccuaacggaacgcugguuaagaccaucacaaaugaucaaauugaggugacuaacgcgaccgaacuuguacagucuucaaguacagguggcaucugcgacagcccacaccagauucucgauggggagaauuguacccugaucgacgcucuacugggagauccgcauugcgacggcuuucagaacaaagaaugggauuuguucguggagagauccaaggccuauucuaauuguuaccccuaugacgucccugauuacgcaucgcucaggucacugguggccagcagugguacucuggaauuuaacaaugaguccuucaacuggacagggguugcucaaaauggaaccucuagcgcaugcaaacggcgcuccaacaagucauuuuucagucgacucaauugguuacaccagcugaaguauaaauacccagcccuuaacgugacgaugcccaauaacgagaaguuugacaaauuguauauauggggcguccaucacccuagcacugauucugaccagaucucccuguacgcucaggccccaggccgugugaccguaucaacaaagagaagccaacagacuguuauucccaacaucgggaguaggccuugggugcggggagucucuucccgcauuagcaucuacuggaccauagugaaaccaggugauauucuacucaucaauuguacaggcaaccugauugcgccgagaggguauuucaagaucaggucgggaaagucuuccaucaugcggucagacgcaaguauuggcaaaugcaauagcgaauguauaacccccaacgguuccaucccuaaugacaagccauuucagaacgugaaucgcauuacguacggggccugcccccgauaugucaaacagaacacucuuaagcuggcuacaggaaugagaaauguuccugagaaacaaaccaggggcaucuucggcgccauagcaggguuuauugaaaacggaugggaggguaugguggauggcugguacggguuccggcaccagaauagcgagggaacuggccaggcugccgacuugaagucuacacaagcgguaaucaaccagaucaaugguaaacucaaccgucugauugaaaagaccaaugagaaguuucaucagaucgaaaaagaguucucagaaguggaggggcgcauucaggauuuagagaaguaugucgaagacacgaaaauagaucuguggaguuacaacgccgagcuccuuguggcacuggaaaaccaacacaccaucgacuugacagauuccgagaugaauaagcuauucgaaagaacuaaaaagcagcugagggagaacgcugaggacaugggcaauggauguuuuaagauuuaucauaaaugcgauaacgccugcaucggcagcauccggaaugggaccuacgaccacgauguuuaccgagacgaagcucucaacaaucgcuuccagauuaagggaguggagcugaaaucugguuauaaggacuggauacuuuggaucucauuugccauuaguuguuuccuguugugcgucgugcuccugggcuuuaucaugugggcaugucagaaagggaacauuagaugcaauaucuguauauga

SEQ ID NO: 129346 - RNA, 1701 nt, Artificial Sequence
  derived and/or modified CDS sequence (opt3) from hemagglutinin__InfluenzaA__ABI92511
augaagaccaucauugcccugagcuacauacucugccuuguguucgcucagaaacugcccggcaacgacaauuccacagcaacuuuguguuuagggcaccaugccgucccuaacggaacgcugguuaagaccaucacaaaugaucaaauugaggugacuaacgcgaccgaacuuguacaaaauucuucaacagguaucauuugcgacaguccacaccagauccucgauggcgagaacuguacccugauagacgcucuacugggggauccgcauugcgacggauuucagaauaaagaaugggauuuguucguggagagaagcaaggccuauuccaacuguuaccccuaugacgucccugauuacgcaucucucaggucgcugguggccucaagcggcacucuggaauuuaauaacgagaguuucaauuggacagguguugcucagaacgggaccuccucugcaugcaaacggcgcagcgacaaguccuuuuucucacgacucaauugguuacaccagcugaaguauaaauacccagcccuuaacgugacgaugcccaauacugagaaguuugauaaauuguauaucuggggaguccaucacccuaguaccgacagcgaucagauuucucuguacgcucaggccuccggccgugugacaguaucaacuaagagaagccaacagaccguuaucccaaacauuggcaguaggcccugggugcgcggggucucuucccgggugagcaucuacuggacaauagugaaaccuggagacauucuacucaucaacucgaccgguaaucugauugcgccaagaggcuauuucaagaucaggucugggaaguccucaaucaugcggagugacgcaagcauuggaaaauguaacuccaagugcauaacgccgaauggcucuauccccaacgauaaaccuuuucagaaugucaaccgcauuacuuacggugccuguccacgauauguuaagcagaauacacuuaaacuggcuaccgggaugagaaacgugcccgaaaagcaaacuaggggaaucuucggcgccauagcaggcuuuauugagaaugggugggaaggaaugguagacgguugguacggcuuccggcaccagaacagcgaggggacaggacaggcugccgauuugaaaucaacccaagcggccaucaaucagaucaacggcaagcucaaucgucugauugagaagacgaacgaaaaauuucaucagaucgagaaggaguucagugaaguggaaggucgcauucaggacuuagagaaauaugucgaggauaccaagauagaccugugguccuacaaugcagaacuccuuguggcucuggagaaccaacacacaaucgauuugacugacagcgaaaugaacaaacuauucgagagaaccaagaagcagcugagggaaaaugccgaggauauggggaacggcugcuuuaaaauuuaucauaagugugacaauacaugcaucggaucuauccggaacggcacuuacgaucacgacguuuaccgagacgaggcucucaauaaccgcuuccagauuaaagggguggaacugaagucaggauauaaagauuggauacuuuggaucaguuuugccauuagcugcuuccuguugugugucgugcuccuggguuuuaucaugugggcaugccagaagggcaauauuagauguaacaucugcauauga

SEQ ID NO: 129347 - RNA, 1701 nt, Artificial Sequence
  derived and/or modified CDS sequence (opt3) from hemagglutinin__InfluenzaA__ABI92522
augaagaccaucauugcccugagcuacauacucugccuuguguucgcucagaaacugcccggcaacgacaauuccacagcaacuuuguguuuagggcaccaugccgucccuaacggaacgcugguuaagaccaucacaaaugaucaaauugaggugacuaacgcgaccgaacuuguacagucuucaaguacagguagaaucugcgacagcccacaccagauucucgauggcgagaauuguacccugaucgacgcucuacugggggauccgcauugcgacggauuucagaacaaagaaugggauuuguucguggagagguccaaggccuauucuaauuguuaccccuaugacgucccugauuacgugucgcuccggucacugguugcaagcaguggcacucuggaauuuaacaaugaguccuucaacuggacagguguggcccaaaaugggaccucuagcgcuugcaaacgccgauccaacaagucauuuuucagucgucucaauugguuacaccagcugaaguauaaauacccagcacuuaacgucacgaugcccaauaacgagaaguuugacaaauuguauauauggggagugcaucacccuggcacugauagcgaccagaucucucuguacgcccaggcuuccggcagaguaaccguuucaacaaagaggagccaacagacugugauuccaaacaucgggagucggcccuggguccgcggagugucuuccagaauuagcaucuacuggaccauagugaaaccuggugauauucuacucaucaauucgacaggcaaccugauugccccaaggggguauuucaagauccggucuggaaaguccucaaucaugaaaagugacgcgccgauuggcaaguguaauagcgaaugcauaacccccaacgguuccaucccuaaugacaaaccauuucagaacgucaaucgcauuacguacggggcauguccccgauauguuaagcagaacacucuuaaacuggccacaggaaugagaaaugugccugagaagcaaaccaggggcaucuucggcgcuauagccggguuuauugaaaacggaugggaggguaugauggauggcugguacggguuccggcaccaaaauucugagggaacuggccaggcagcugacuugaaaagcacacaggccgcgaucaaccagaucaaugguaagcucaaccgucugauugaaaagaccaaugagaaauuucaucagaucgaaaaggaguucucagaaguagaggggcgcauucaggauuuagagaaauauguggaagacacgaagauagaucuguggaguuacaacgccgagcuccuugucgcacuggaaaaccaacacaccaucgacuugacagauuccgagaugaauaaacuauucgaaagaacuaagaagcagcugagggagaacgcugaggacaugggcaauggaugcuuuaaaauuuaucauaagugugauaacgccugcaucggcagcauccggaaugggaccuacgaccacgauguguaccgagacgaagcucucaacaaucgcuuccagauuaaaggaguugagcugaagucugguuauaaagacuggauacuuuggaucucauuugccauuaguugcuuccuguuguguaucgugcuccugggcuuuauuaugugggcaugccagaaggggaacaucagauguaauauaugcaucuga

SEQ ID NO: 129348 - RNA, 1701 nt, Artificial Sequence
  derived and/or modified CDS sequence (opt3) from hemagglutinin__InfluenzaA__ABI92533
augaagaccaucauugcccugagcuacauacucugccuuguguucgcucagaaacugcccggcaacgacaauuccagagcaacauuguguuuagggcaccaugccgucccuaacggaacucugguuaagacgaucaccaaugaucaaauugaggugacaaacgcgacugaacuuguacagucuucaaguaccgguaggaucugcgacagcccacaccagauucucgauggcgagaauuguacacugaucgacgcucuacugggggauccgcauugcgacggauuucagaacaaagaaugggauuuguucguggagcgguccaaggccuauucuaauuguuaccccuaugacgucccugauuacgugucgcuccgcucacugguugcaagcaguggcacccuggaauuuaacaaugaguccuucaacuggacugguguggcccaaaaugggacaucuagcgcuugcaaacgacguuccgacaagucauuuuucaguagacucaacugguuacaccagcugaaguauaaauacccagcacuuaaugucaccaugcccaacaaugagaaguuugauaaauuguauauauggggagugcaucacccuggcacggacagcgaucagaucucucuguacgcccaggcuuccggcaggguaacuguuucaaccaagcggagccaacagacagugauuccaaacaucgggagucgccccugggucagaggagugucuuccaggauuagcaucuacuggacuauagugaaaccuggugacauucuacucaucaacucgaccggcaaucugauugccccacggggguauuucaagauccgcucuggaaaguccucaaucaugcgaagugacgcgccgauuggcaaauguaacagcgaaugcauaacacccaaugguuccaucccuaacgauaagccauuucagaaugucaacagaauuaccuacgggcccuguccuagguauguuaaacagaauacgcuuaagcuggcaacuggaaugcggaacgugccagagaaacaaacacguggcaucuucggcgccauagcuggguuuauugaaaauggaugggaggguaugauggacggcugguacggguuccgccaccagaacucugagggaaccggccaggccgcagauuugaaaagcacucaagcugccaucaaucagaucaacgguaaacucaauagacugauugaaaagacaaacgagaaguuucaucagaucgaaaaagaguucucagaaguagaggggaggauucaggacuuagagaaguauguggaagauaccaaaauagaccuguggaguuacaaugcggagcuccuugucgcccuggaaaaccaacacacgaucgauuugaccgacuccgagaugaacaagcuauucgaacggacaaagaagcagcugcgagagaaugcagaggauaugggcaacggaugcuuuaagauuuaucauaaaugugacaaugcuugcaucggcagcauccgcaacgggacuuacgaucacgacguguacagagacgaagcccucaauaacagguuccagauuaagggaguugagcugaaaucugguuauaaggauuggauacuuuggaucucauuugcuauuaguugcuuccuguuguguaucgugcuccugggcuuuauuaugugggccugccagaaagggaauauccgguguaacauaugcaucuga

SEQ ID NO: 129349 - RNA, 1701 nt, Artificial Sequence; identical to SEQ ID NO: 129348
  derived and/or modified CDS sequence (opt3) from hemagglutinin__InfluenzaA__ABI92544

SEQ ID NO: 129350 - RNA, 1701 nt, Artificial Sequence
  derived and/or modified CDS sequence (opt3) from hemagglutinin__InfluenzaA__ABI92577
augaagaccaucauugcccugagcuacauacucugccuuguguucgcucagaaacugcccggcaacgacaauuccacagcaacuuuguguuuagggcaccaugccgucccuaacggaacgcugguuaagaccaucacaaaugaucaaauugaggugacuaacgcgaccgaauugguacagucuucaaguacagguagaaucugcgacagcccacaccagauucucgauggcgagaauuguacccugaucgacgcccuucugggggauccgcauugcgacggauuucagaacaaagaaugggauuuguucguggagaggucccgggcuuauucuaauuguuaccccuaugacgucccugauuacgugucgcuccgcucacugguugcaagcaguggcacucuggaauuuaacaaugaguccuucaacuggacagguguggcccaaaaugggaccucuagcgcuugcaagcgacguuccgacaaaucauuuuucaguagacucaacugguuacaccagcugaaguauaaguacccagcacuuaaugucacgaugcccaacaaugagaaauuugauaaguuguauauauggggagugcaucacccuggcacugacagcgaucagaucucucuguacgcccaggcuuccggcaggguaaccguuucaacaaaacggagccaacagacugugauuccaaacaucgggagucgccccugggucagaggagugucuuccaagauuagcaucuacuggaccauagugaaaccuggugacauucuacucaucaacucgacaggcaaucugauugccccaaggggguauuucaagauccggucuggaaaguccucaaucaugcgcagugacgcgccgauuggcaaauguaacagcgaaugcauaacccccaaugguuccaucccuaacgauaagccauuucagaaugucaaccgaauuacguacgggcccuguccuagauauguuaaacagaauacucuuaagcuggcaacaggaaugaggaacgugccagagaaacaaacccggggcaucuucggcgccauagcuggguuuauugaaaauggaugggaggguaugauggacggcugguacggguuccgucaccagaacucugagggaacuggccaggccgcagaucuaaagagcacacaagcugccaucaaucagaucaacgguaaacucaaucgccugauugaaaagaccaacgagaaguuucaucagaucgaaaaagaguucucagaaguagaggggaggauucaggacuuagagaaguauguggaagauacgaaaauagaccuguggaguuacaaugcggagcuccuugucgcccuggaaaaccaacacaccaucgauuugacagacuccgagaugaacaagcuauucgaaagaacuaaaaagcagcugcgggagaaugcagaggauaugggcaacggaugcuuuaagauuuaucauaaaugugacaaugcuugcaucggcagcauccgaaacgggaccuacgaucacgacguguaccgcgacgaagcccucaauaacagauuccagauuaagggaguugagcugaaaucugguuauaaggauuggauacuuuggaucucauuugcuauuaguugcuuccuguuguguaucgugcuccugggcuuuauuaugugggccugccagaaagggaauaucagguguaacauaugcaucuga

SEQ ID NO: 129351 - RNA, 1701 nt, Artificial Sequence; identical to SEQ ID NO: 129087
  derived and/or modified CDS sequence (opt3) from hemagglutinin__InfluenzaA__ABI92588

SEQ ID NO: 129352 - RNA, 1701 nt, Artificial Sequence
  derived and/or modified CDS sequence (opt3) from hemagglutinin__InfluenzaA__ABI92599
augaagaccaucauugcccugagcuacauacucugccuuguguucgcucagaaacugcccggcaacgacaauuccacagcaacuuuguguuuagggcaccaugccgucccuaacggaacgcugguuaagaccaucacaaaugaucaaauugaggugacuaacgcgaccgaacuuguacagucuucaaguacagguagaaucugcaauagcccacaccagauucucgacggcgagaacuguacccugaucgaugcucuacugggggacccgcauugcgauggauuucagaauaaagaaugggacuuguucguggagagguccaaggccuauucuaacuguuaccccuaugaugucccugacuacgugucgcuccggucacugguugcaagcaguggcacucuggaauuuaauaacgaguccuucaauuggacagguguggcccaaaacgggaccucuagcgcuugcaaacgccgauccgauaagucauuuuucagucgucucaauugguuacaccagcugaaguauaaauacccagcacuuaacgucacgaugcccaauaacgagaaguuugacaaauuguauauauggggagugcaucacccuggcacugauagcgaccagaucucucuguacgcccaggcuuccggcagaguaaccguuucaacaaagaggagccaacagacugugauuccaaacaucgggagucggcccuggguccgcggagugucuuccagaauuagcaucuacuggaccauagugaaaccuggugauauucuacucaucaauucgacaggcaaccugauugccccaaggggguauuucaagauccggucuggaaaguccucaaucaugcgcagugacgcgccgauuggcaaauguaauagcgaaugcauaacccccaacgguuccaucccuaaugacaagccauuucagaacgucaaucgaauuacguacggggcaugucccagauauguuaaacagaagacucuuaaacuggccacaggaaugaggaacgugccugagaagcaaacccggggcaucuucggcgcuauagccggguuuauugaaaauggaugggaggguaugauggauggcugguacggguuccgucaccagaacucugagggaacuggccaggcagcugacuugaaaagcacacaagccgcgaucaaucagaucaacgguaagcucaaucgccugauugaaaagaccaacgagaaauuucaucagaucgaaaaggaguucucagaaguagaggggaggauucaggauuuagagaaauauguggaagacacgaagauagaucuguggaguuacaaugccgagcuccuugucgcacuggaaaaccaacacaccaucgacuugacagauuccgagaugaacaaacuauucgaaagaacuaagaagcagcugcgggagaaugcugaggacaugggcaacggaugcuuuaaaauuuaucauaagugugauaaugccugcaucggcagcauccgaaacgggaccuacgaccacgauguguaccgcgacgaagcucucaauaacagauuccagauuaaaggaguugagcugaagucugguuauaaagacuggauacuuuggaucucauuugccauuaguugcuuccuguuguguaucgugcuccugggcuuuauuaugugggcaugccagaaggggaauaucagguguaacauaugcaucuga

SEQ ID NO: 129353 - RNA, 1701 nt, Artificial Sequence
  derived and/or modified CDS sequence (opt3) from hemagglutinin__InfluenzaA__ABI92610
augaagaccaucauugcccugagcuacauacucugccuuguguucgcucagaaacugcccggcaacgacaauuccacagcaacuuuguguuuagggcaccaugccgucccuaacggaacgcugguuaagaccaucacaaaugaucaaauugaggugacuaacgcgaccgaauugguacagucuucaaguacagguagaaucugcgacagcccacaccagauucucgauggcgagaauuguacccugaucgacgcccuucugggggauccgcauugcgacggauuucagaacaaagaaugggauuuguucguggagagguccaaggcuuauucuaauuguuaccccuaugacgucccugauuacgugucgcuccggucacugguugcaagcaguggcacucuggaauuuaacaaugaguccuucaacuggacagguguggcccaaaaugggaccucuagcgcuugcaaacgccgauccgacaagucauuuuucagucgucucaacugguuacaccagcugaaguauaaauacccagcacuuaaugucacgaugcccaacaaugagaaguuugauaaauuguauauauggggagugcaucacccuggcacugacagcgaucagaucucucuguacgcccaggcuuccggcagaguaaccguuucaacaaagaggagccaacagacugugauuccaaacaucgggagucggcccuggguccgcggagugucuuccagaauuagcaucuacuggaccauagugaaaccuggugacauucuacucaucaacucgacaggcaaucugauugccccaaggggguauuucaagauccggucuggaaaguccucaaucaugcgcagugacgcgccgauuggcaaauguaacagcgaaugcauaacccccaaugguuccaucccuaacgauaagccauuucagaaugucaaccgaauuacguacggggcaugucccagauauguuaaacagaauacucuuaagcuggccacaggaaugaggaacgugccugagaaacaaacccggggcaucuucggcgcuauagccggguuuauugaaaauggaugggaggguaugauggacggcugguacggguuccgucaccagaacucugagggaacuggccaggcagcugaucuaaagagcacacaagccgcgaucaaucagaucaacgguaaacucaaucgccugauugaaaagaccaacgagaaguuucaucagaucgaaaaagaguucucagaaguagaggggaggauucaggacuuagagaaguauguggaagauacgaaaauagaccuguggaguuacaaugccgagcuccuugucgcacuggaaaaccaacacaccaucgauuugacagacuccgagaugaacaagcuauucgaaagaacuaaaaagcagcugcgggagaaugcugaggauaugggcaacggaugcuuuaagauuuaucauaaaugugacaaugccugcaucggcagcauccgaaacgggaccuacgaucacgacguguaccgcgacgaagcucucaauaacagauuccagauuaagggaguugagcugaaaucugguuauaaggauuggauacuuuggaucucauuugccauuaguugcuuccuguuguguaucgugcuccugggcuuuauuaugugggcaugccagaaagggaauaucagguguaacauaugcaucuga

SEQ ID NO: 129354 - RNA, 1701 nt, Artificial Sequence
  derived and/or modified CDS sequence (opt3) from hemagglutinin__InfluenzaA__ABI92621
augaagaccaucauugcccugagcuacauacucugccuuguguucgcucagaaacugcccggcaacgacaauuccauggcaacauuguguuuagggcaccaugccgucccuaacggaacucugguuaagacgaucaccaaugaucaaauugaggugacaaacgcgacugaacuuguacagucuucaaguaccgguagaaucugcaauagcccacaccagauucucgacggcgagaacuguacacugaucgaugcucuacugggggacccgcauugcgaaggauuucagaauaaagagugggauuuguucguggaaagguccaaggccuauucuaacuguuaccccuaugacgucccugauuacgugucgcuccggucacugguugcaagcaguggcacccuggaguuuaauaacgaguccuucaauuggacugguguggcccaaaacgggacaucuagcgcuugcaaacgccgauccgacaagucauuuuucagucgucucaauugguuacaccagcugaaguauaaauacccagcacuuaacgucaccaugcccaauaacgaaaaguuugauaaauuguauauauggggagugcaucacccuggcacggacagcgaucagaucucucuguacgcccaggcuuccggcagaguaacuguuucaaccaagaggagccaacagacagugauuccaaacaucgggagucggcccuggguccgcggagugucuuccaaaauuagcaucuacuggacuauagugaagccuggugacauucuacucaucaauucgaccggcaaccugauugccccaagaggguauuucaagaucaggucuggaaaauccucaaucaugcggagugaugcgccgauugacaaguguaauagcgagugcauaacacccaacggcuccaucccuaaugacaaaccauuucagaacgucaaucgcauuaccuacggucuuuguccccgauauguuaagcagaacacgcugaaauuggcaacugggaugagaaaugugccugaaaagcaaacaaggggaaucuucggcgccauagcuggcuuuauugagaacgggugggagggaaugauggaugguugguacggcuuccggcaccaaaauucugaagggaccggacaggccgcagaccucaaaagcacucaggcugccaucaaccagaucaauggcaagcugaaccguuuaauugagaagacaaaugaaaaauuucaucagaucgagaaggaguucucagaaguagagggucgcauucaggaucuggaaaaauauguggaggacaccaagauagaucucuggaguuacaacgcggaacuucuggucgccuuggagaaccaacacacgaucgaccuaaccgauuccgaaaugaauaaacuguucgagagaacaaagaagcagcucagggagaacgcagaagacauggggaauggcugcuuuaaaauuuaucauaagugugauaacgcuugcaucggaagcauccggaauggcacuuacgaccacgauguguaccgagacgaggcccugaacaaucgcuuccagauuaaagggguugaacuuaagucuggauauaaagacuggauacuguggaucucauuugcuauuaguugcuucuugcucuguaucgugcuguuagguuuuauuaugugggccugccagaagggcaacaucagauguaauauaugcaucuga

SEQ ID NO: 129355 - RNA, 1701 nt, Artificial Sequence; identical to SEQ ID NO: 128610
  derived and/or modified CDS sequence (opt3) from hemagglutinin__InfluenzaA__ABI92632

SEQ ID NO: 129356 - RNA, 1701 nt, Artificial Sequence
  derived and/or modified CDS sequence (opt3) from hemagglutinin__InfluenzaA__ABI92643
augaagaccaucauugcccugagcuacauacucugccuuguguucgcucagaaacugcccggcaacgacaauuccacagcaacuuuguguuuagggcaccaugccgucccuaacggaacgaucguuaagaccauuacaaaugaucaaaucgaggugacuaacgcgaccgaacugguacagucuucaaguacagguggcauuugcgacagcccacaccagauccuagauggggagaauuguacccucauagacgcucugcuuggagauccgcagugcgacggcuuucaaaacaaaaagugggaucuguucguggaaagauccaaagccuauucuaauuguuaccccuaugacgucccugauuacgcaucguugaggucacucguggccagcagugguacucuggaguuuaacaaugaauccuucgacuggacagggguuacccagaacggaacgucuagcgcuugcaagcggcgcuccaauaagucauuuuucagucgacugaacuggcucacucauuuaaaauauaaguacccagcacugaaugugaccauccccaacaaugagaaauuugauaaacuuuauauuuggggcguccaccauccuggcacagacagcgaucagaucucuuuguacgcccaggcuuccgggcguauuacugugucaaccaagagaagccaacagacaguaaucccaaacauaggaaguaggccccggguucgcgacgugucuuccagaauuagcaucuacuggaccauugucaagccuggugacauccugcuaaucaacucgacgggcaaucucauugccccaaggggguauuucaagauacggucuggaaaauccucaaucaugcgcagugaugcgccgauuggcaaguguaacagcgagugcaucacucccaaugguuccauaccuaacgacaaaccauuucagaaugugaaccgaauuacauacggggcaugucccagauaugugaagcagaauacccugaaacuugccacuggaaugaggaacgucccugaaaagcaaacacggggcaucuucggcgcuaucgccggguuuauugagaauggaugggaagguaugguugauggcugguacggguuccgucaccagaacucugagggaaccggccaggcagcugaccugaaaagcacgcaagccgcgaucaaucagauuaacgguaaguugaaucgccucauagggaagaccaacgagaaauuucaccagaucgaaaaggaguucucagaaguggagggcaggauucaggaucuggaaaaauauguagaggacacaaagaucgauuuauggaguuacaaugccgagcugcucguggcacuugaaaaccaacauacuaucgaccugaccgauuccgagaugaacaaauuguucgaaagaacaaagcggcagcuacgagagaaugcugaagacaugggaaacggcugcuuuaagauuuaucacaaaugugauaaugccugcauagggagcauccgcaacggaacuuacgaccaugacgucuacagagaugaggcucugaauaacagguuccagauuaaggguguggagcucaaaucuggcuauaaggacuggauccuguggauuucauuugccaucaguugcuuccuucuguguguugcauugcucggguuuauaaugugggccugccagaaaggaaauauccgguguaacauuugcaucuga

SEQ ID NO: 129357 - RNA, 1701 nt, Artificial Sequence
  derived and/or modified CDS sequence (opt3) from hemagglutinin__InfluenzaA__ABI92665
augaagaccaucauugcccugagcuacauacucugccuuguguucgcucagaaacugcccggcaacgacaauuccacagcaacuuuguguuuagggcaccaugccgucccuaacggaacgaucguuaagaccauuacaaaugaucaaaucgaggugacuaacgcgaccgaacugguacagucuucaaguacagguggcauuugcgacagcccacaccagauccuagauggggagaauuguacccucauagacgcucugcuuggagauccgcagugcgacggcuuucaaaacaaaaagugggaucuguucguggaaagauccaaagccuauucuaauuguuaccccuaugacgucccugauuacgcaucguugaggucacucguggccagcagugguacucuggaguuuaacaaugaauccuucgacuggacagggguuacccagaacggaacgucuagcgcuugcaagcggggcuccaauaagucauuuuucagucgccugaacuggcucacucauuuaaaauauaaguacccagcacugaaugugaccaugcccaacaaugagaaauuugauaaacuuuauaucuggggcguccaccauccugggacagacagcgaucagauuucuuuguacgcccaggcuuccggacgaaucacugugucaaccaagcguagccaacagacaguaauuccaaacaucgguaguagacccaggguucgggacgugucuucccgcauaagcauuuacuggaccaucgucaagccuggcgacauucugcuaaucaacucgacggggaaucucaucgccccaagaggauauuucaagauuaggucuggcaaauccucaauaaugcggagugaugcgccgaucgguaaguguaacagcgagugcauuacucccaauggguccaucccuaacgacaaaccauuucagaaugugaaccgcauaacauacggagcauguccccgauaugugaagcagaauacccugaaacuugccacuggcaugagaaacgucccugaaaagcaaacaaggggcauuuucggggcuaucgccggauuuaucgagaaugguugggaaggcaugguugaugggugguacggauuccggcaccagaacucugagggcaccggucaggcagcugaccugaaaagcacgcaagccgcgauuaaucagaucaacgggaaguugaaucgucucauuggcaagaccaacgagaaauuucaccagauagaaaaggaguucucagaaguggagggacgcauccaggaucuggaaaaauauguagaggacacaaagauugauuuauggaguuacaaugccgagcugcucguggcacuugaaaaccaacauacuaucgaccugaccgauuccgagaugaacaaauuguucgaaagaacaaagaggcagcuacgggagaaugcugaagacaugggcaacgggugcuuuaagaucuaucacaaaugugauaaugccugcauuggaagcauacgaaacgguacuuacgaccaugacgucuaccgcaaugaggcucugaacaauagauuccagaucaagggcguggagcucaaaucuggguauaaggauuggauucuguggaucucauuugccauuaguugcuuccuucuguguguugcauugcucggauuuaucaugugggccugccagaaaggcaacauaagguguaauaucugcauuuga

SEQ ID NO: 129358 - RNA, 1701 nt, Artificial Sequence
  derived and/or modified CDS sequence (opt3) from hemagglutinin__InfluenzaA__ABI92676
augaagaccaucauugcccugagcuacauacucugccuuguguucgcucagaaacugcccggcaacgacaauuccacagcaacuuuguguuuagggcaccaugccgucccuaacggaacgaucguuaagaccauuacaaaugaucaaaucgaggugacuaacgcgaccgaacugguacagucuucaaguacagguggcauuugcgacagcccacaccagauccuagauggggagaauuguacccucauagacgcucugcuuggagauccgcagugcgacggcuuucaaaacaaaaagugggaucuguucguggaaagauccaaagccuauucuaauuguuaccccuaugacgucccugaucaugcaucguugaggucacucguggccagcagugguacucuggaguuuaacaaugaauccuucgacuggacagggguuacccagaacggaacgucuagcgcuugcaagcggcgcuccaauaagucauuuuucagucgacugaacuggcucacucacuuaaaauacaaguauccagcacugaaugugaccaugcccaacaaugagaaauuugauaaacuuuacaucuggggcguccaucacccuggcacagacagcgaucagauuucuuuguaugcccaggcuuccgggcguaucacugugucaaccaagagaagccaacagacaguaauuccaaacaucggaaguaggccccggguucgcgacgugucuuccagaauaagcauuuacuggaccaucgucaagccuggugacauucugcuaaucaacucgacgggcaaucucaucgccccaaggggguacuucaagauucggaacggaaaaucuuccauaaugcgcucagaugcgccgaucggcaaguguaauagugagugcauuacucccaacgguagcaucccuaaugacaaaccauuucagaacgugaaucgaauaacauauggggcaugucccagauacgugaagcagaacacccugaaacuugccacuggaaugaggaaugucccugaaaagcaaacacggggcauuuucggcgcuaucgccggguuuaucgagaacggaugggaagguaugguugauggcugguauggguuccgucaccaaaauuccgagggaaccggccaggcagcugaccugaaaucuacgcaggccgcgauuaaccagaucaaugguaaguugaaccgccucauugggaagaccaaugagaaauuucaucagauagaaaaggaguucagcgaaguggagggcagaauccaggaucuggaaaaauacguagaggacacaaagauugauuuauggucauauaacgccgagcugcucguggcacuugaaaaccaacacacuaucgaccugaccgauagugagaugaauaaauuguucgaaaggacaaagaagcagcuacgggagaacgcugaagacaugggaaauggcugcuuuaaaaucuaccauaagugugauaacgccugcauuggguccauacgaaauggaacuuaugaccacgacgucuaccgcgaugaggcucugaacaauagauuccagaucaaagguguggagcucaagagcggcuacaaagacuggauucuguggaucucuuuugccauuucaugcuuccuucuguguguugcauugcucggguuuaucaugugggccugccagaagggaaacauaagguguaauaucugcauuuga

SEQ ID NO: 129359 - RNA, 1701 nt, Artificial Sequence
  derived and/or modified CDS sequence (opt3) from hemagglutinin__InfluenzaA__ABI92687
augaagaccaucauugcccugagcuacauacucugccuuguguucgcucagaaacugcccggcaacgacaauuccacagcaacuuuguguuuagggcaccaugccgucccuaacggaacgaucguuaagaccauuacaaaugaucaaaucgaggugacuaacgcgaccgaacugguacagucuucaaguacagguggcauuugcgacagcccacaccagauccuagauggggagaauuguacccucauagacgcucugcuuggagauccgcagugcgacggcuuucaaaacaaaaagugggaucuguucguggaaagauccaaagccuauucuaauuguuaccccuaugacgucccugauuacgcaucguugaggucacucguggccagcagugguacucuggaguuuaacaaugaauccuucgacuggacagggguuacccagaacggaacgucuagcgcuugcaagcggggcuccaauaagucauuuuucagucgccugaacuggcucacucauuuaaaauauaaguacccagcacugaaugugaccaugcccaacaaugagaaauuugauaaacuuuauaucuggggcguccaccauccugggacagacagcgaucagauuucuuuguacgcccaggcuuccggacgaaucacugugucaaccaagcguagccaacagacaguaauuccaaacaucgguaguagacccaggguucgggacgugucuucccgcauaagcauuuacuggaccaucgucaagccuggcgacauucugcuaaucaacucgacggggaaucucaucgccccaagaggauauuucaagauuaggucuggcaaauccucaauaaugcggagugaugcgccgaucgguaaguguaacagcgagugcauuacucccaauggguccaucccuaacgacaaaccauuucagaaugugaaccgcauaacauacggagcauguccccgauaugugaagcagaauacccugaaacuugccacuggcaugagaaacgucccugaaaagcaaacaaggggcauuuucggggcuaucgccggauuuaucgagaaugguugggaaggcaugguugaugggugguacggauuccggcaccagaacucugagggcaccggucaggcagcugaccugaaaagcacgcaagccgcgauuaaucagaucaacgggaaguugaaucgucucauuggcaagaccaacgagaaauuucaccagauagaaaaggaguucucagaaguggagggacgcauccaggaucuggaaaaauauguagaggacacaaagauugauuuauggaguuacaaugccgagcugcucguggcacuugaaaaccaacauacuaucgaccugaccgauuccgagaugaacaaauuguucgaaagaacaaagaggcagcuacgggagaaugcugaagacaugggcaacgggugcuuuaagaucuaucacaaaugugauaaugccugcauuggaagcauacgaaacgguacuuacgaccaugacgucuaccgcgaugaggcucugaauaacagauuccagaucaagggcguggagcucaaaucuggguauaaggacuggauucuguggaucucauuugccauuaguugcuuccuucuguguguugcauugcucggauuuaucaugugggccugccagaaaggcaauauaagguguaacaucugcauuuga

SEQ ID NO: 129360 - RNA, 1701 nt, Artificial Sequence; identical to SEQ ID NO: 129359
  derived and/or modified CDS sequence (opt3) from hemagglutinin__InfluenzaA__ABI92698

SEQ ID NO: 129361 - RNA, 1701 nt, Artificial Sequence; identical to SEQ ID NO: 128564
  derived and/or modified CDS sequence (opt3) from hemagglutinin__InfluenzaA__ABI92709

SEQ ID NO: 129362 - RNA, 1701 nt, Artificial Sequence
  derived and/or modified CDS sequence (opt3) from hemagglutinin__InfluenzaA__ABI92720
augaagaccaucauugcccugagcuacauacucugccuuguguucgcucagaaacugcccggcaacgacaauuccacagcaacuuuguguuuagggcaccaugccgucccuaacggaacgaucguuaagaccauuacaaaugaucaaaucgaggugacuaacgcgaccgaacugguacagucuucaaguacagguggcauuugcgacagcccacaccagauccuagauggggagaauuguacccucauagacgcucugcuuggagauccgcagugcgacggcuuucaaaacaaaaagugggaucuguucguggaaagauccaaagccuauucuaauuguuaccccuaugacgucccugaucaugcaucguugaggucacucguggccagcagugguacucuggaguuuaacaaugaauccuucgacuggacagggguuacccagaacggaacgucuagcgcuugcaagcggcgcuccaauaagucauuuuucagucgacugaacuggcucacucacuuaaaauacaaguauccagcacugaaugugaccaugcccaacaaugagaaauuugauaaacuuuacaucuggggcguccaucacccuggcacagagagcgaccagauuucuuuguaugcccaggcuuccgggcguaucacugugucaaccaagagaagccaacagacaguaauuccaaacaucggaaguaggccccggguucgcgaugugucuuccagaauaagcauuuacuggaccaucgucaagccuggugacauucugcuaaucaacucgacgggcaaucucaucgccccaaggggguacuucaagauucggucuggaaaauccucaauaaugcgcagugacgcgccgaucggcaaguguaacagcgaaugcauuacucccaaugguuccaucccuaacgauaaaccauuucagaaugugaaccgaauaacauauggggcaugucccagauacgugaagcagaauacccugaaacuugccacuggaaugaggaacgucccugagaagcaaacacggggcauuuucggcgcuaucgccggguuuaucgaaaauggaugggaggguaugguugacggcugguauggguuccgucaccagaacucugagggaaccggccaggcagcugaucugaaaagcacgcaagccgcgauuaaucagaucaacgguaaguugaaucgccucauugggaagaccaacgaaaaauuucaucagauagagaaggaguucucagaaguggaaggcagaauccaggaccuggagaaauacguagaggauacaaagauugacuuauggaguuauaaugccgaacugcucguggcacuugagaaccaacacacuaucgaucugaccgacuccgaaaugaacaaauuguucgagaggacaaagaagcagcuacgggaaaaugcugaggauaugggaaacggcugcuuuaaaaucuaccauaagugugacaaugccugcauugggagcauacgaaacggaacuuaugaucacgacgucuaccgcgacgaggcucugaauaacagauuccagaucaaagguguggaacucaagucuggcuacaaagauuggauucuguggaucucauuugccauuaguugcuuccuucuguguguugcauugcucggguuuaucaugugggccugccagaagggaaauauaagguguaacaucugcauuuga

SEQ ID NO: 129363 - RNA, 1701 nt, Artificial Sequence
  derived and/or modified CDS sequence (opt3) from hemagglutinin__InfluenzaA__ABI92731
augaagaccaucauugcccugagcuacauacucugccuuguguucgcucagaaacugcccggcaacgacaauuccacagcaacuuuguguuuagggcaccaugccgucccuaacggaacgaucguuaagaccauuacaaaugaucaaaucgaggugacuaacgcgaccgaacugguacagucuucaaguacagguggcauuugcgacagcccacaccagauccuagauggggagaauuguacccucauagacgcucugcuuggagauccgcagugcgacggcuuucaaaacaaaaagugggaucuguucguggaaagauccaaagccuauucuaauuguuaccccuaugacgucccugauuacgcaucguugaggucacucguggccagcagugguacucuggaguuuaacaaugaauccuucgacuggacagggguuacccagaacggaacgucuagcgcuugcaagcggcgcuccaauaagucauuuuucagucgacugaacuggcucacucauuuaaaauauaaguacccagcacugaaugugaccaugcccaacaaugagaaauuugauaaacuuuauaucuggggcguccaccauccuggcacagacagcgaucagauuucuuuguacgcccaggcuuccgggcguaucacugugucaaccaagagaagccaacagacaguaauuccaaacaucggaaguaggccccggguucgcgacgugucuuccagaauaagcauuuacuggaccaucgucaagccuggugacauucugcuaaucaacucgacgggcaaucucaucgccccaaggggguauuucaagauucggucuggaaaauccucaauaaugcgcagugaugcgccgaucggcaaguguaacagcgagugcauuacucccaaugguuccaucccuaacgacaaaccauuucagaaugugaaccgaauaacauacggggcaugucccagauaugugaagcagaauacccugaaacuugccacuggaaugaggaacgucccugaaaagcaaacacggggcauuuucggcgcuaucgccggguuuaucgagaauggaugggaagguaugguugauggcugguacggguuccgucaccagaacucugagggaaccggccaggcagcugaccugaaaagcacgcaagccgcgauuaaucagaucaacgguaaguugaaucgccucauugggaagaccaacgagaaauuucaccagauagaaaaggaguucucagaaguggagggcagaauccaggaucuggaaaaauauguagaggacacaaagauugauuuauggaguuacaaugccgagcugcucguggcacuugaaaaccaacauacuaucgaccugaccgauuccgagaugaacaaauuguucgaaaggacaaagcggcagcuacgagagaaugcugaagacaugggaaacggcugcuuuaagaucuaucacaaaugugauaaugccugcauugggagcauacgcaacggaacuuacgaccaugacgucuacagagaugaggcucugaauaacagguuccagaucaaggguguggagcucaaaucuggcuauaaggacuggauucuguggaucucauuugccauuaguugcuuccuucuguguguugcauugcucggguuuaucaugugggccugccagaaaggaaauauacgguguaacaucugcauuuga

SEQ ID NO: 129364 - RNA, 1701 nt, Artificial Sequence
  derived and/or modified CDS sequence (opt3) from hemagglutinin__InfluenzaA__ABI92742
augaagaccaucauugcccugagcuacauacucugccuuguguucucccagaaacugcccggcaacgacaauucuacagcuacuuuguguuuagggcaccaugcagucccuaacggaacgaucguuaagaccauuacaaaugaucaaaucgaggugacuaacgccaccgaacugguacagucaaguagcacagguggcauuugcgacuccccacaccagauccuagauggggagaauuguacccucauagacgcgcugcuuggagauccgcagugcgacggcuuucaaaacaaaaagugggaucuguucguggaaagaucuaaggcuuauucgaauuguuaccccuaugacgucccugaucaugccucauugaggagccucguggcaaguuccgguacucuggaguuuaacaaugaaucuuucgacuggacagggguuacccagaacggaacgagcuccgccugcaagcggcgcucaaauaagagcuuuuucagucgacugaacuggcucacucacuuaaaauacaaguauccagcucugaaugugaccaugcccaacaaugagaaauuugauaaacuuuacaucuggggcguccaucacccuggcacagacucugaucagauuuccuuguaugcacaggccucagggcguaucacugugagcaccaaaagaagucaacagacaguaauuccaaacaucggaucuaggccccggguucgcgacguguccagcagaauaucgauuuacuggaccaucgucaagccuggugacauucugcuaaucaacucuacgggcaaucucaucgcuccaaggggguacuucaagauucgguccggaaaaucaaguauaaugcgcagcgaugccccgaucggcaaguguaacuccgagugcauuacucccaaugguucuaucccuaacgacaaaccauuucagaaugugaaccgaauaacauauggggcgugucccagauacgugaagcagaauacccugaaacuugcaacuggaaugaggaacgucccugaaaagcaaacacggggcauuuucggcgccaucgcuggguuuaucgagaauggaugggaagguaugguugauggcugguauggguuccgucaccagaacagcgagggaaccggccaggccgcagaccugaaaucaacgcaagcugccauuaaucagaucaacgguaaguugaaucgccucauugggaagaccaacgagaaauuucaucagauagaaaaggaguucagugaaguggagggcagaauccaggaucuggaaaaauacguagaggacacaaagauugauuuaugguccuauaaugcggagcugcucguggcccuugaaaaccaacacacuaucgaccugaccgauagcgagaugaacaaauuguucgaaaggacaaagaagcagcuacgggagaaugcagaagacaugggaaacggcugcuuuaaaaucuaccauaagugugauaaugcuugcauugggucuauacgaaacggaacuuaugaccacgacgucuaccgcgaugaggcccugaauaacagauuccagaucaaagguguggagcucaagucaggcuacaaagacuggauucuguggaucaguuuugcuauuagcugcuuccuucuguguguugccuugcucggguuuaucaugugggcaugccagaagggaaauauaagguguaacaucugcauuuga

SEQ ID NO: 129365 - RNA, 1701 nt, Artificial Sequence
  derived and/or modified CDS sequence (opt3) from hemagglutinin__InfluenzaA__ABI92753
augaagaccaucauugcccugagcuacauacucugccuuguguucgcucagaaacugcccggcaacgacaauuccacagcaacuuuguguuuagggcaccaugccgucccuaacggaacgaucguuaagaccauuacaaaugaucaaaucgaggugacuaacgcgaccgaacugguacagucuucaaguacagguggcauuugcgacagcccacaccagauccuagauggggagaauuguacccucauagacgcucugcuuggagauccgcagugcgacggcuuucaaaacaaaaagugggaucuguucguggaaagauccaaagccuauucuaauuguuaccccuaugacgucccugauuacgcauauuugaggucgcucguggccucaagcgguacucuggaguuuaacaaugaaaguuucgacuggacagggguuacccagaacggaacguccucugcuugcaagcggcgcagcaauaaguccuuuuucucacgacugaacuggcucacucauuuaaaauacaaguauccagcacugaaugugaccaugcccaacaaugagaaauuugauaaacuuuacaucuggggcguccaccauccuggcacagacagugaucagauuagcuuguacgcccaggcuucugggcguaucacuguguccaccaagagaucacaacagacaguaauuccaaacaucggaagcaggccccggguucgcgacgugaguucuagaauauccauuuauuggaccaucgucaagccuggugacauucugcuaaucaacagcacgggcaaucucaucgccccaaggggguacuucaagauucggucgggaaaaucuuccauaaugcgcucagaugcgccgaucggcaaguguaacagugagugcauuacucccaaugguagcaucccuaacgacaaaccauuucagaaugugaaccgaauaacauauggggcaugucccagauacgugaagcagaauacccugaaacuugccacuggaaugaggaacgucccugaaaagcaaacacggggcauuuucggcgcuaucgccggguuuaucgagaauggaugggaagguaugguugauggcugguauggguuccgucaccagaacuccgagggaaccggccaggcagcugaccugaaaucuacgcaagccgcgauuaaucagaucaacgguaaguugaaucgccucauugggaagaccaacgagaaauuucaccagauagaaaaggaguucagcgaaguggagggcagaauccaggaucuggaaaaauacguagaggacacaaagauugauuuauggucauauaaugccgagcugcucguggcacuugaaaaccaacauacuaucgaccugaccgauagugagaugaacaaauuguucgaaaggacaaagcggcagcuacgagagaaugcugaagacaugggaaacggcugcuuuaagaucuaccacaaaugugauaaugccugcauuggguccauacgcaacggaacuuacgaccaugacgucuauagagaugaggcucugaauaacagguuccagaucaaggguguggagcucaaaagcggcuacaaggacuggauucuguggaucucuuuugccauuucaugcuuccuucuguguguugcauugcucggguuuaucaugugggccugccagaaaggaaauauacgguguaacaucugcauuuga

SEQ ID NO: 129366 - RNA, 1701 nt, Artificial Sequence
  derived and/or modified CDS sequence (opt3) from hemagglutinin__InfluenzaA__ABI92764
augaagaccaucauugcccugagcuacauacucugccuuguguucgcucagaaacugcccggcaacgacaauuccacagcaacuuuguguuuagggcaccaugccgucccuaacggaacgaucguuaagaccauuacaaaugaucaaaucgaggugacuaacgcgaccgaacugguacagucuucaaguacaggugagauuugcgacagcccacaccagauccuagauggcgaaaauuguacccucauagacgcucugcuuggggauccgcagugcgacggauuucaaaacaaaaagugggaucuguucguggagagauccaaagccuauucuaauuguuaccccuaugacgucccugauuacgcaucguugaggucacucguggccagcaguggcacucuggaauuuaacaaugaguccuucgacuggacagguguuacccagaacgggacgucuagcgcuugcaagcggggauccaauaagucauuuuucagucgccugaacuggcucacucauuuaaaauauaaguacccagcacugaaugugaccaugcccaacaaugagaaauuugauaaacuuuauaucuggggcguccaccauccuggcacagacagcgaucagauuucuuuguacgcccaggcuuccgggcgaaucacugugucaaccaagcguagccaacagacaguaauuccaaacaucggaaguagacccaggguucgggacgugucuucccgcauaagcauuuacuggaccaucgucaagccuggugacauucugcuaaucaacucgacgggcaaucucaucgccccaagaggguauuucaagauuaggucuggaaaauccucaauaaugcggagugaugcgccgaucggcaaguguaacagcgaaugcauuacucccaaugguuccaucccuaacgacaaaccauuucagaaugugaaccgcauaacauacggggcauguccccgauaugugaagcagaauacccugaaacuugccacuggaaugagaaacgucccugagaagcaaacaaggggcauuuucggcgcuaucgccggguuuaucgaaaauggaugggaggguaugguugauggcugguacggguuccggcaccagaacucugagggaaccggccaggcagcugaccugaaaagcacgcaagccgcgauuaaucagaucaacgguaaguugaaucgucucauugggaagaccaacgaaaaauuucaccagauagagaaggaguucucagaaguggaaggccgcauccaggaucuggagaaauauguagaggacacaaagauugauuuauggaguuacaaugccgaacugcucguggcacuugagaaccaacauacuaucgaccugaccgauuccgaaaugaacaaauuguucgagagaacaaagaggcagcuacgggaaaaugcugaggacaugggaaacggcugcuuuaagaucuaucacaaaugugauaaugccugcauugggagcauacgaaacggaacuuacgaccaugacgucuaccgcgaugaggcucugaauaacagauuccagaucaaggguguggaacucaaaucuggcuauaaggacuggauucuguggaucucauuugccauuaguugcuuccuucuguguguugcauugcucggguuuaucaugugggccugccagaaaggaaauauaagguguaacaucugcauuuga

SEQ ID NO: 129367 - RNA, 1701 nt, Artificial Sequence; identical to SEQ ID NO: 129359
  derived and/or modified CDS sequence (opt3) from hemagglutinin__InfluenzaA__ABI92775

SEQ ID NO: 129368 - RNA, 1701 nt, Artificial Sequence; identical to SEQ ID NO: 128291
  derived and/or modified CDS sequence (opt3) from hemagglutinin__InfluenzaA__ABI92786

SEQ ID NO: 129369 - RNA, 1701 nt, Artificial Sequence
  derived and/or modified CDS sequence (opt3) from hemagglutinin__InfluenzaA__ABI92797
augaagaccaucauugcccugagcuacauacucugccuuguguucgcucagaaacugcccggcaacgacaauuccacagcaacuuuguguuuagggcaccaugccgucccuaacggaacgaucguuaagaccauuacaaaugaucaaaucgaggugacuaacgcgaccgaacugguacagucuucaaguacagguggcauuugcgacagcccacaccagauccuagauggggagaauuguacccucauagacgcucugcuuggagauccgcagugcgacggcuuucaaaacaaaaagugggaucuguucguggaaagauccaaagccuauucuaauuguuaccccuaugacgucccugauuacgcaucguugaggucacucguggccagcagugguacucuggaguuuaacaaugaauccuucaacuggacagggguuacccagaauggaacgucuagcgcuugcaagcggcgcuccaacaauucauuuuucagucgacugaacuggcucacucauuuaaaguuuaaauauccagcacugaaugugaccaugcccaacaacgagaaguucgacaaacuuuacaucuggggcguccaccauccuggcacagauaaugaccagauuagcuuguaugcccaggcuucugggcguaucacuguguccaccaagagaucacaacagacaguaauuagcaacaucggaaguaggccacggguucgcgauauacccucuagaauuuccaucuacuggaccauugugaaaccuggugacauccugcuaaucaauagcacgggcaaccucauugccccaaggggguacuuuaagauacggucgggaaagucuuccaucaugcgcucagacgcgccgauuggcaaauguaauagugagugcaucacucccaacgguagcauaccuaaugauaagccauuccagaacgucaaucgaauuacauauggggcaugucccagauacgugaaacagaacacccugaaacuugccacuggaaugaggaaugugccugaaaagcaaacacggggcaucuuuggcgcuaucgccggguucauugagaacggaugggaagguauggucgacggcugguauggguuucgucaccaaaauuccgagggaaucggccaggcagcugaucugaagucuacccaggccgcgauuaaccagauaaaugguaaauugaaccgccucaucgggaagacgaacgagaaguuccaccagauugaaaaagaguucagcgaaguugagggcagaauccaggaccuggaaaaguacguggaggauaccaaaaucgacuuauggucauauaaugccgagcugcucguagcacuugaaaaccaacauacaauugaucugacugacagugagaugaauaaguuguuugaaaggaccaaaaagcagcuacgggagaacgcugaagauaugggaaauggcugcuucaagauauaccacaaaugugacaacgccugcaucggguccauucgaaauggaacauaugaucaugacguguaccgcgacgaggcucugaacaauagauuucagaucaagggugucgagcucaaaagcggcuacaaggauuggauucuguggaucucuuucgccauaucaugcuuucuucuguguguggcauugcucggguucaucaugugggccugccagaaaggaaacauuagguguaauaucugcauuuga

SEQ ID NO: 129370 - RNA, 1701 nt, Artificial Sequence; identical to SEQ ID NO: 128291
  derived and/or modified CDS sequence (opt3) from hemagglutinin__InfluenzaA__ABI92808

SEQ ID NO: 129371 - RNA, 1701 nt, Artificial Sequence; identical to SEQ ID NO: 128291
  derived and/or modified CDS sequence (opt3) from hemagglutinin__InfluenzaA__ABI92819

SEQ ID NO: 129372 - RNA, 1701 nt, Artificial Sequence; identical to SEQ ID NO: 128291
  derived and/or modified CDS sequence (opt3) from hemagglutinin__InfluenzaA__ABI92841

SEQ ID NO: 129373 - RNA, 1701 nt, Artificial Sequence
  derived and/or modified CDS sequence (opt3) from hemagglutinin__InfluenzaA__ABI92852
augaagaccaucauugcccugagcuacauacucugccuuguguucgcucagaaacugcccggcaacgacaauuccacagcaacuuuguguuuagggcaccaugccgucccuaacggaacgaucguuaagaccauuacaaaugaucaaaucgaggugacuaacgcgaccgaacugguacagucuucaaguacagguggcauuugcgacagcccacaccagauccuagauggggagaauuguacccucauagacgcucugcuuggagauccgcagugcgacggcuuucaaaacaaaaagugggaucuguucguggaaagauccaaagccuauucuaauuguuaccccuaugacgucccugauuacgcaucguugaggucacucguggccagcagugguacucuggaguuuaacaaugaauccuucaacuggacagggguuacccagaauggaacgucuagcgcuugcaagcggcgcuccaacaauucauuuuucagucgacugaacuggcucacucauuuaaaguuuaaauauccagcacugaaugugaccaugcccaacaacgagaaguucgacaaacuuuacaucuggggcguccaccauccuggcacagauaaugaccagauuagcuuguaugcccaggcuucugggcguaucacuguguccaccaagagaucacaacagacaguaauuccaaacaucggauacaggccccggguucgcgauauaccuagcagaauuaguaucuacuggaccauugugaaaccaggugacauccugcuaaucaauucuacgggcaaccucauugccccgaggggguauuuuaagauacgguccggaaagagcucgaucaugcgcucugacgcgcccauuggcaaauguaauuccgagugcaucacuccuaacgguucaauaccaaaugauaagcccuuccagaacgucaaucgaauuacauacggggcauguccuagauaugugaaacagaacacccugaagcuggccacuggaaugaggaaugugccagaaaaacaaacacggggcaucuuuggcgcuaucgccggguucauugagaacggaugggaagguauggucgacggcugguacggguuucgucaccagaauagugagggaaucggccaggcagcugaucuuaagagcacccaagccgcgauuaaccagauaaaugguaaauugaaccgccucaucgggaagacgaacgagaaguuccaccagauugaaaaagaguucuccgaaguugagggcagaauccaggaccuggaaaaguauguggaggauaccaaaaucgacuuauggucuuacaaugccgagcugcucguagcacuugaaaaccaacauacaauugaucugacugacagcgagaugaauaaguuguuugaaaggaccaaaaagcagcuacgggagaacgcugaagauaugggaaauggcugcuucaagauauaucacaaaugugacaacgccugcaucgggucaauucgaaauggaacauacgaucaugacguguaccgcgacgaggcucugaacaauagauuucagaucaagggugucgagcucaaaaguggcuauaaggauuggauucuguggaucuccuucgccauaagcugcuuucuucuguguguggcauugcucggguucaucaugugggccugccagaaaggaaacauuagguguaauaucugcauuuga

SEQ ID NO: 129374 - RNA, 1701 nt, Artificial Sequence
  derived and/or modified CDS sequence (opt3) from hemagglutinin__InfluenzaA__ABI92863
augaagaccaucauugcccugagcuacauacucugccuuguguucgcucagaaacugcccggcaacgacaauuccacagcaacuuuguguuuagggcaccaugccgucccuaacggaacgaucguuaagaccauuacaaaugaucaaaucgaggugacuaacgcgaccgaacugguacagucuucaaguacagguggcauuugcgacagcccacaccagauccuagauggggagaauuguacccucauagacgcucugcuuggagauccgcagugcgacggcuuucaaaacaaaaagugggaucuguucguggaaagauccaaagcccauucuaauuguuaucccuacgacgucccugauuaugcaucguugaggucacucaucgccagcagugguacucuggaguuuaacaaugaauccuucaacuggacaggggugacccagaauggaacgucuagcgcuugcaagcggcgcuccaaccagucauuuuucagucgacugaauuggcucacucacuuaaaguuuaaauacccagcacugaacguuaccaugcccaauaacgagaaguucgacaaacuuuauauuuggggcgugcaucacccuggcacagauagcgaccagaucucuuuguacgcccaagcuccagggcguauuacugucuccaccaagagaucacagcagacagugauccccaacauaggaagcaggccucggguacgcgauauuaguucuagaaucuccauuuauuggaccaucguuaaaccaggugacauccugcuaauuaauagcacgggcaaccucauagccccgaggggguacuuuaagauccggucgggaaagucuuccauuaugaaaucagacgcgcccaucggccgcuguaauagugagugcauaacuccuaacgguagcauuccaaaugauaagcccuuccagaacgugaaucgaaucacauacggggcauguccuagauaugucaaacaaaacacccugaaacuugccacuggaaugaggaaugugccagaaaaacagacacggggcaucuuuggcgcuauugccggguucaucgagaacggaugggaagguaugguggacggcugguacggguuucgucaccaaaauuccgagggaaccggccaggcagcugaucugaagucuacgcaggccgcgauuaaccagauaaaugguaaauugaaccgccucaucgggaagaccaaugagaaguuccaucagauugaaaaagaguucagcgaagucgagggcagaauccaagaccuggaaaaguauguugaggauacaaaaaucgacuuauggucauacaacgccgagcugcucguggcacuugaaaaccagcacacuauugaucugaccgacagugagaugaauaaguuguuugaaaggacaaagaagcagcuacgggagaacgcugaagauaugggaaauggcugcuucaagauauaucauaaaugugacaacgccugcaucggguccauucgaaauggaacuuacgaucacgacguauaucgcgacgaggcucugaacaauagauuucagaucaaggguguggagcucaaaagcggcuacaaggauuggauucuguggaucucuuucgccauaucaugccuucuguugugugucgcacuccugggguuuaucaugugggccugccaaaaaggaaacauuagguguaauaucugcauuuga

SEQ ID NO: 129375 - RNA, 1701 nt, Artificial Sequence; identical to SEQ ID NO: 128291
  derived and/or modified CDS sequence (opt3) from hemagglutinin__InfluenzaA__ABI92874

SEQ ID NO: 129376 - RNA, 1701 nt, Artificial Sequence; identical to SEQ ID NO: 128291
  derived and/or modified CDS sequence (opt3) from hemagglutinin__InfluenzaA__ABI92885

SEQ ID NO: 129377 - RNA, 1701 nt, Artificial Sequence
  derived and/or modified CDS sequence (opt3) from hemagglutinin__InfluenzaA__ABI92907
augaagaccaucauugcccugagcuacauacucugccuuguguucgcucagaaacugcccggcaacgacaauuccacagcaacuuuguguuuagggcaccaugccgucccuaacggaacgaucguuaagaccauuacaaaugaucaaaucgaggugacuaacgcgaccgaacugguacagucuucaaguacagguggcauuugcgacagcccauaucagauccuagauggggagaauuguacccucauagacgcucugcuuggagauccgcagugcgacggcuuucaaaacaaaaagugggaucuguucguggaaagauccaaagccuacucuaauuguuaucccuacgacgucccugauuaugugucguugaggucacucguugcaagcagugguacucuggaguuuaacaaugaauccuucaacuggacaggggugacccagaauggaacgucuagcgccugcaagcggcgcuccaacaauucauuuuucagucgacugaacuggcucacucacuuaaaguuuaaauacccagcucugaaugucaccaugcccaacaacgagaaguucgacaaacuuuauaucuggggcgugcaucacccuggcacagauaaugaccagauuagcuuguacgcacaggccucugggcguaucacuguauccaccaagagaucacaacagacaguuauuccaaacaucggaagcaggccccgggugcgcgauauaccuaguagaauuucuaucuacuggaccauugucaaaccaggugacauccugcuaaucaauuccacgggcaaccucauugcuccgaggggguauuuuaagauacggagcggaaagucgucuaucaugcgcuccgacgcccccauuggcaaauguaauucagagugcaucacuccuaacgguaguauaccaaaugauaagcccuuccagaacgugaaucgaauuacauacggggcguguccuagauaugugaaacagaacacccugaaacuugcaacuggaaugaggaaugucccagaaaagcaaacacggggcaucuuuggcgccaucgcuggguucauugagaacggaugggaagguaugguugacggcugguacggguuucgucaucagaauagcgagggaaucggccaggccgcagaucugaaguccacccaagcugccauuaaccagauaaaugguaaauugaaccgccucaucgggaagacgaacgagaaguuccaccagauugaaaaagaguucucugaaguggagggcagaauccaggaccuggaaaaguauguagaggauaccaaaaucgacuuauggagcuacaaugcggagcugcucguggcccuugaaaaccaacacacaauugaucugacugacucagagaugaauaaguuguuugaaaggaccaaaaagcagcuacgggagaacgcagaagauaugggaaauggcugcuucaagauauaucauaaaugugacaacgcuugcaucgggaguauucgaaauggaacauacgaucacgacgucuaccgcgacgaggcccugaacaauagauuucagaucaaggguguggagcucaaauccggcuauaaggauuggauucuguggaucagcuucgcuauaucuugcuuucuucuguguguugccuugcucggguucaucaugugggcaugccagaaaggaaacauuagguguaauaucugcauuuga

SEQ ID NO: 129378 - RNA, 1701 nt, Artificial Sequence; identical to SEQ ID NO: 128291
  derived and/or modified CDS sequence (opt3) from hemagglutinin__InfluenzaA__ABI92918

SEQ ID NO: 129379 - RNA, 1701 nt, Artificial Sequence; identical to SEQ ID NO: 129377
  derived and/or modified CDS sequence (opt3) from hemagglutinin__InfluenzaA__ABI92929

SEQ ID NO: 129380 - RNA, 1701 nt, Artificial Sequence
  derived and/or modified CDS sequence (opt3) from hemagglutinin__InfluenzaA__ABI92940
augaagaccaucauugccuucaacuacauacugugccucguguuugcucagaaacuucccggcaaugacaacagcacagcaacucuguguuuggggcaccaugccgucccuaauggaacgaucguuaagaccauuacaaacgaucaaaucgaggugacuaaugcgaccgaauuaguacaguccucuucaacagguggcauuugcgacaguccacaccagauccuggauggggagaacuguacccuaauagacgcucuccugggagauccgcagugcgacggcuuccaaaauaaaaagugggaucuuuuuguggaaagaagcaaagccuauuccaacuguuaccccuaugacgucccugauuacgcaucucugaggucguugguggccucaagcgguacucucgaguucaauaacgaaaucuuuaauuggacagggguuacccagaacggaacgaguuccgcuugcaagcggcgcucuaauaacagcuucuuuucccgacugaauuggcugacucaucucaaguucaaauauccagcauuaaacgugaccaugcccaacaaugagaaguuugacaaacuguacauuuggggcguccaccauccuggcacagauaacgaccagaucucacuuuaugcccaggcuagugggcguauuacugugagcaccaagagaucucaacagacaguaaucccaaauauaggauccaggccccggguucgcgauauuccuucaagaaucagcauuuacuggaccaucgugaaaccaggugacaucuugcugauuaacaguacgggcaaucuaauagccccgaggggguacuucaagauccggucuggaaaguccagcauuaugcgcucggacgcgcccaucggcaaauguaacucugagugcauaacuccuaaugguuccauuccaaacgauaagcccuuucagaaugucaaccgaaucacauauggggcauguccuagauacgugaaacagaauacccucaagcuggccacuggaaugaggaacgugccagaaaaacaaacacggggcaucuucggcgcuauugccggguuuaucgagaauggaugggaagguauggucgacggcugguauggguuccgucaccagaacucagagggaaccggccaggcagcugaucuuaagaguacgcaagccgcgauuaaucagauaaacgguaaacugaaccgcuugaucgggaagaccaaugagaaguuccaccagauugaaaaagaguuuagcgaaguugagggcagaauccaggaccucgaaaaguacguggaggauacaaaaaucgaccugugguccuauaacgccgaguuacugguagcacucgaaaaucaacauacuauugaucuuaccgacucugagaugaacaagcuguucgaaaggacuaaaaagcaguugcgggagaaugcugaagauaugggaaacggcugcuuuaagauauaccacaaaugugacaaugccugcaucgggagcauucgaaacggaacauaugaucaugacguguaccgcgacgaggcucuaaauaacagauuccagaucaagggugucgagcugaaaucaggcuacaaggauuggauucucuggaucaguuuugccauauccugcuuccugcuuuguguggcacuguugggguuuaucaugugggccugccagaaaggaaauauuagguguaacaucugcauuuga

SEQ ID NO: 129381 - RNA, 1701 nt, Artificial Sequence
  derived and/or modified CDS sequence (opt3) from hemagglutinin__InfluenzaA__ABI92951
augaagaccaucauugcccugagcuacauacucugccuuguguucgcucagaaacugcccggcaacgacaauuccacagcaacuuuguguuuagggcaccaugccgucccuaacggaacgaucguuaagaccauuacaaaugaucaaaucgaggugacuaacgcgaccgaacugguacagucuucaaguacagguggcauuugcgacagcccacaccagauccuagauggggagaauuguacccucauagacgcucugcuuggagauccgcagugcgacggcuuucaaaacaaaaagugggaucuguucguggaaagauccaaagccuauucuaauuguuaccccuaugacgucccugauuacgcaucguugaggucacucaucgccagcagugguacucuggaguuuaacaaugaauccuucaacuggacaggggugacccagaauggaacgucuagcgcuugcaagcggcgcuccaacucaaguuucuucagccgacugaauuggcucacucauuuaaaguuuaaauauccagcacugaacguuaccaugcccaauaacgaggaguucgacaaacuuuacauuuggggcgugcaccauccuggcacauauaacgaucagaucucuuuguacgcccaggcuuccgggcguauuacugucucaaccaagagaagccaacagacagugaucccaaauauaggaaguaggccccggguacgcgacauuccuucuagaaucuccauuuacuggaccaucguuaagccaggugauauccugcuaauuaacagcacgggcaaucucauagccccgaggggguauuuuaaaauccggucgggaaagucuuccauuaugcgcucagacgcgcccaucggcaaguguaacagugaaugcauaacuccuaaugguagcauuccaaacgacaaacccuuccagaaugugaaccgaaucacauacggggcauguccuagauaugucaagcagaauacccugaaacuugccacuggaaugaggaacgugccagagaagcaaacacggggcaucuuuggcgcuauugccggguucaucgaaaauggaugggaggguaugguggauggcugguacggguuucgucaccagaacuccgagggaauuggccaggcagcugaccugaaaucuacccaagccgcgauagaucagaucaaugguaaguugaaccgccucauugggaaaacgaaugaaaaguuccaccagaucgagaaggaauuuagcgaggucgaaggcagaauccaggaccuggagaaauauguugaggauaccaagauugacuuauggucauacaacgccgaacugcucguggcacuugagaaccaacauacaauagaucugacugacagugaaaugaauaaauuguuugagaggaccaagaaacagcuacgggaaaacgcugaggauaugggaaauggcugcuucaagaucuaucacaagugugacaacuccugcauugggagcauccgaaauggaacauacgaucaugacguauaccgcgacgaggcccugaacaauagauuucagauuaaagguguggaacucaagucuggcuauaaagauuggauccuguggauaucauucgcuaucaguugcuuucuucugugugucgccuugcucggguucauuaugugggcaugccagaagggaaacaucagguguaauauuugcaucuga

SEQ ID NO: 129382 - RNA, 1701 nt, Artificial Sequence
  derived and/or modified CDS sequence (opt3) from hemagglutinin__InfluenzaA__ABI92962
augaagaccaucauugcccugagcuacauacucugccuuguguucgcucagaaacugcccggcaacgacaauuccacagcaacuuuguguuuagggcaccaugccgucccuaacggaacgaucguuaagaccauuacaaaugaucaaaucgaggugacuaacgcgaccgaacugguacagucuucaaguacagguggcauuugcgacagcccacaccagauccuagauggggagaauuguacccucauagacgcucugcuuggagauccgcagugcgacggcuuucaaaacaaaaagugggaucuguucguggaaagaaauaaagccuauuccaacuguuaccccuaugacgucccugauuacgcaucuuugaggucgcucaucgccucaagcgguacucuggaguuuaauaacgaaaguuucaauuggacaggggugacccagaacggaacguccucugcuugcaagcggcgcagcaauuccucauuuuucagucgacugaacuggcucacucauuuaaaguuuaaauauccagcacugaauguuaccaugcccaacaacgaggaguucgacaaacuuuacauuuggggcgugcaccauccuggcacauauaaugaucagaucagcuuguacgcccaggcuucugggcguauuacugucuccaccaagagaucacaacagacagugaucccaaacauaggaagcaggccccggguacgcgacauuccuaguagaaucucuauuuacuggaccaucguuaagccaggugauauccugcuaauuaauuccacgggcaaccucauagccccgaggggguauuuuaaaauccggagcggaaagucgucuauuaugcgcuccgacgcgcccaucggcaaguguaauucagaaugcauaacuccuaacgguaguauuccaaaugacaaacccuuccagaacgugaaucgaaucacauacggggcauguccuagauaugucaagcagaacacccugaaacuugccacuggaaugaggaaugugccagagaagcaaacacggggcaucuuuggcgcuauugccggguucaucgaaaacggaugggaggguaugguggauggcugguacggguuucgucaccagaauagcgagggaauuggccaggcagcugaccugaaauccacccaagccgcgauagaucagaucaacgguaaguugaaucgccucauugggaaaacgaacgaaaaguuccaccagaucgagaaggaguucucugaagucgaaggcagaauccaggaccuggagaaauauguugaggauaccaagauugacuuauggagcuacaacgccgaacugcucguggcacuugagaaucaacauacaauagaucugacugacucagaaaugaacaaauuguuugagaggaccaagaaacagcuacgggaaaaugcugaggauaugggaaacggcugcuucaagaucuaucacaagugugacaaugccugcauugggaguauccgaaacggaacauacgaucaugacguauaccgcgacgaggcucugaauaacagauuucagauuaaagguguggaacucaaguccggcuauaaagauuggauccuguggaucagcuucgccauaucuugcuuucuucugugugucgcauugcucggguucauuaugugggccugccagaagggaaauaucagguguaacauuugcaucuga

SEQ ID NO: 129383 - RNA, 1701 nt, Artificial Sequence; identical to SEQ ID NO: 128681
  derived and/or modified CDS sequence (opt3) from hemagglutinin__InfluenzaA__ABI92973

SEQ ID NO: 129384 - RNA, 1701 nt, Artificial Sequence; identical to SEQ ID NO: 128681
  derived and/or modified CDS sequence (opt3) from hemagglutinin__InfluenzaA__ABI92984

SEQ ID NO: 129385 - RNA, 1701 nt, Artificial Sequence
  derived and/or modified CDS sequence (opt3) from hemagglutinin__InfluenzaA__ABI92995
augaagaccaucauugcccugagcuacauacucugccuuguguucgcucagaaacugcccggcaacgacaauuccacagcaacuuuguguuuagggcaccaugccgucccuaacggaacgaucguuaagaccauuacaaaugaucaaaucgaggugacuaacgcgaccgaacugguacagucuucaaguacagguggcauuugcgacagcccacaccagauccuagauggggagaauuguacccucauagacgcucugcuuggagauccgcagugcgacggcuuucaaaacaaaaagugggaucuguucguggaaagauccaaagccuauucuaauuguuaccccuaugacgucccugauuacgcaucguugaggucacucaucgccagcagugguacucuggaguuuaacaaugaauccuucaacuggacaggggugacccagaauggaacgucuagcgcuugcaagcggcgcuccaacucaaguuucuucagccgacugaauuggcucacucauuuaaaguuuaaauauccagcacugaacguuaccaugcccaauaacgaggaguucgacaaacuuuacauuuggggcgugcaccauccuggcacauauaacgaucagaucucuuuguacgcccaggcuuccgggcguauuacugucucaaccaagagaagccaacagacagugaucccaaauauaggaaguaggccccggauucgcgacaucccuucuagaauuuccaucuacuggaccaucguaaagccaggugauauucugcuaauaaacagcacgggcaaucucaucgccccgaggggguauuuuaaaauucggucgggaaagucuuccaucaugcgcucagacgcgcccauaggcaaguguaacagugaaugcauuacuccuaaugguagcaucccaaacgacaaacccuuccagaauguuaaccgaaucacauacggggcauguccuaaguaugugaaacagaauacccugaaacuugccacuggaaugagaaacgucccagagaagcaaacaaggggcauuuuuggcgcuaucgccggguucauugaaaauggaugggaggguaugguggauggcugguacggguuucggcaccagaacuccgagggaauaggccaggcagcugaccugaagucuacccaagccgcgaucgaucagauuaaugguaaauugaaccgucucaucgggaagacgaaugaaaaguuccaccagaucgagaaagaauuuagcgagguggaaggccgcauucaggaccuggagaaguaugucgaggauaccaaaauagacuuauggucauacaacgccgaacugcucguugcacuugagaaccaacauacaaucgaucugacugacagugaaaugaauaaguuguuugagagaaccaaaaagcagcuaagggaaaacgcugaggauaugggaaauggcugcuucaagauuuaucacaaaugugacaacgccugcaucggguccauucggaauggaacauacgaucaugacguguaccgagacgaggcucugaacaaucgcuuucagaucaaggguguagaacucaaaagcggcuauaaggauuggauacuguggaucucuuucgccauuucaugcuuucuucuguguguggcauugcucggguucaucaugugggccugccagaaaggaaacauuagauguaauaucugcauauga

SEQ ID NO: 129386 - RNA, 1701 nt, Artificial Sequence; identical to SEQ ID NO: 128681
  derived and/or modified CDS sequence (opt3) from hemagglutinin__InfluenzaA__ABI93006

SEQ ID NO: 129387 - RNA, 1701 nt, Artificial Sequence; identical to SEQ ID NO: 128681
  derived and/or modified CDS sequence (opt3) from hemagglutinin__InfluenzaA__ABI93017

SEQ ID NO: 129388 - RNA, 1698 nt, Artificial Sequence; identical to SEQ ID NO: 129280
  derived and/or modified CDS sequence (opt3) from hemagglutinin__InfluenzaA__ABI93028

SEQ ID NO: 129389 - RNA, 1701 nt, Artificial Sequence; identical to SEQ ID NO: 129014
  derived and/or modified CDS sequence (opt3) from hemagglutinin__InfluenzaA__ABI93039

SEQ ID NO: 129390 - RNA, 1701 nt, Artificial Sequence
  derived and/or modified CDS sequence (opt3) from hemagglutinin__InfluenzaA__ABI93061
augaagaccaucauugcccugagcuacauacucugccuuguguucgcucagaaacugcccggcaacgacaauuccacagcaacuuuguguuuagggcaccaugccgucccuaacggaacgcugguuaagaccaucacaaaugaucaaauugaggugacuaacgcgaccgaacuuguacagucuucaaguacagguagaaucugcgacagcccacaccagauucucgauggcgagaauuguacccugaucgacgcucuacugggggauccgcauugcgacggauuucagaacaaagaaugggauuuguucguggagagguccaaggccuauucuaauuguuaccccuaugacgucccugauuacgcaucgcuccggucacugguggccagcaguggcacucuggaauuuaacaaugaguccuucaacuggacagguguugcucaaaaugggaccucuagcgcaugcaaacgccgauccaacaagucauuuuucagucgucucaauugguuacaccagcugaaguauaaauacccagcccuuaacgugacgaugcccaauaacgagaaguuugacaaauuguauauauggggaguccaucacccuagcacugauucugaccagaucucccuguacgcucaggccucaggcagagugaccguaagcacaaagaggagucaacagacuguuauuccaaacaucggcucucggcccugggugcgcggggucuccagcagaauuucgaucuacuggaccauagugaaaccuggagauauucuacucaucaauucuacagguaaccugauugcgccaaggggcuauuucaagauccgguccgggaagucaaguaucaugcgcagcgacgcauccauuggaaaauguaauucugaaugcauaaccccgaacggcagcauccccaaugacaagccuuuucagaacgugaaucgaauuacguacggugccuguccaagauaugucaaacagaacacucuuaagcuggcuacagggaugaggaauguucccgagaaacaaacccggggaaucuucggcgccauagcaggcuuuauugaaaacgggugggagggaaugguggaugguugguacggcuuccgucaccaaaauucagaggggacuggacaggcugccgacuugaagaguacacaggcggccaucaaccagaucaauggcaaacucaaccgccugauugaaaagaccaaugagaaguuucaucagaucgaaaaagaguucuccgaaguagaggguaggauucaggauuuagagaaguauguggaagacacgaaaauagaucuguggagcuacaacgcagagcuccuugucgcucuggaaaaccaacacaccaucgacuugacagauucugagaugaauaagcuauucgaaagaacuaaaaagcagcugcgggagaacgccgaggacauggggaauggcugcuuuaagauuuaucauaaaugugauaacgcuugcaucggaucaauccgaaauggcaccuacgaccacgauguguaccgcgacgaagcccucaacaauagauuccagauuaaggggguugagcugaaaaguggauauaaggacuggauacuuuggaucagcuuugcaauuuccugcuuccuguugugugugguccuccuggguuuuaucaugugggccugccagaaaggcaacauuagguguaauaucugcauauga

SEQ ID NO: 129391 - RNA, 1701 nt, Artificial Sequence; identical to SEQ ID NO: 128698
  derived and/or modified CDS sequence (opt3) from hemagglutinin__InfluenzaA__ABI93072

SEQ ID NO: 129392 - RNA, 1701 nt, Artificial Sequence; identical to SEQ ID NO: 128698
  derived and/or modified CDS sequence (opt3) from hemagglutinin__InfluenzaA__ABI93083

SEQ ID NO: 129393 - RNA, 1701 nt, Artificial Sequence; identical to SEQ ID NO: 128698
  derived and/or modified CDS sequence (opt3) from hemagglutinin__InfluenzaA__ABI93094

SEQ ID NO: 129394 - RNA, 1701 nt, Artificial Sequence; identical to SEQ ID NO: 128698
  derived and/or modified CDS sequence (opt3) from hemagglutinin__InfluenzaA__ABI93105

SEQ ID NO: 129395 - RNA, 1701 nt, Artificial Sequence
  derived and/or modified CDS sequence (opt3) from hemagglutinin__InfluenzaA__ABI93116
augaagaccaucauugcccugagcuacauacucugccuuguguucgcucagaaacugcccggcaacgacaauuccacagcaacuuuguguuuagggcaccaugccgucccuaacggaacgcugguuaagaccaucacaaaugaucaaauugaggugacuaacgcgaccgaacuuguacagucuucaaguacagguggcaucugcgacagcccacaccagauucucgauggggagaauuguacccugaucgacgcucuacugggagauccgcauugcgacggcuuucagaacaaagaaugggauuuguucguggagagauccaaggccuauucuaauuguuaccccuaugacgucccugauuacgcaucgcucaggucacugguggccagcagugguacucuggaauuuaacaaugaguccuucaacuggacagggguugcucaaaauggaaccucuagcgcaugcaaacggcgcuccaacaagucauuuuucagucgacucaauugguuacaccagcugaaguauaaauacccagcccuuaacgugacgaugcccaauaacgagaaguuugacaaauuguauauauggggcguccaucacccuagcacugauucugaccagaucucccuguacgcucaggccccaggccgugugaccguaucaacaaagagaagccaacagacuguuauucccaacaucgggaguaggccuugggugcggggagucucuucccgcauuagcaucuacuggaccauagugaaaccaggugauauucuacucaucaauuguacaggcaaccugauugcgccgagaggguauuucaagaugaggucgggaaagucuuccaucaugcggucagacgcaaguaucggcaaaugcaauagcgaauguauuacccccaacgguuccauaccuaaugacaagccauuucagaacgugaaucgcaucacguacggggccugcccccgauaugucaaacagaacacucuuaagcuggcuacaggaaugagaaauguuccugagaaacaaaccaggggcauuuucggcgccaucgcaggguuuauagaaaacggaugggaggguaugguggauggcugguacggguuccggcaccagaauagcgagggaacuggccaggcugccgacuugaagucuacacaagcggccauuaaccagaucaaugguaaacucaaccgucugaucgaaaagaccaaugagaaguuucaucagauugaaaaagaguucucagaaguagaggggcgcauccaggauuuagagaaguauguggaagacacgaaaauugaucuguggaguuacaacgcagagcuccuugucgcucuggaaaaccaacacaccauagacuugacagauuccgagaugaauaagcuauucgaaagaacuaaaaagcagcugagggagaacgccgaggacaugggcaauggauguuuuaagaucuaucauaaaugcgauaacgcuugcauuggcagcauccggaaugggaccuacgaccacggaguguaccgagaugaagcccucaacaaucgcuuccagaucaaggguguugagcugaaaucuggcuauaaggacuggauucuuuggauaucauuugcaaucaguuguuuccuguugugcgugguccuccugggguuuauuaugugggccugucagaaaggaaacaucagaugcaauauuuguaucuga

SEQ ID NO: 129396 - RNA, 1689 nt, Artificial Sequence
  derived and/or modified CDS sequence (opt3) from hemagglutinin__InfluenzaA__ABI94581
augaacacccagauccugguguucgcccucgucgcuagcauucccacaaaugcagacaagauaugccuuggccaccaugccguuuccaacgggacuaaagugaauacgcugaccgagagaggaguagaaguggucaacgcgacagagacuguggaaaggaccaauguuccucggaucuguucuaaggguaaacgcacaguggauuugggccaaugcggguuacugggaaccauuacuggcccaccgcagugugaccaguuucuagaguucucagcugaucucaucauugaacgacgugaggguagugacgucugcuaccccgggaaguuugugaacgaggaagcccugagacagauccuuagggagagcggaggcauagauaaagaaacaaugggcuucaccuauuccgggauccggacgaauggaacuaccucugcaugucgcagaucggguagcagcuuuuacgccgagaugaaguggcuguugaguaacacagacaaugcugcauucccucaaaugacuaaguccuauaaaaacaccaggaaggauccagcccucauuaucuggggcauucaccauucugggagcacaaccgagcagacgaaacuguacggauccggcaauaagcugaucacuguagguucaaguaacuaucagcagagcuuuguucccucuccuggggcucggccacaagugaauggacaguccggccgcauagacuuccacuggcucauuuuaaaccccaaugauacagucaccuuuucauucaacggcgccuuuaucgcgccugaccgagcaucauuccugagagggaaaaguauggguauucagucugaaguccagguggaugccaacugcgagggagacuguuaccauuccggcgggacuaucaucagcaaucuuccauuucaaaacauuaauucgagggcugugggaaagugcccgcgguauguuaagcaggaaucuuugcugcuagccacaggcaugaaaaacgugcccgagauaccuaagcgucgcagaaggggucucuucggggcaaucgcuggcuucauugaaaauggaugggagggccugaucgaugggugguacggauuucggcaccagaacgcccaaggugagggcaccgcggccgacuacaaauccacgcagucagcaauagaccagauuaccgggaaacuuaaucgacugaucgaaaagacaaaccagcaauucgaguugaucgauaaugaauuuacugagguagaaaagcagauuggaaacgugaucaauuggacccgcgacaguaugacagaggucuggagcuauaacgcugagcuccugguggccauggaaaaucagcacacuauugauuuagcugacuccgagaugaacaaacuguacgaaagaguuaagaggcagcuccgggagaaugccgaagaggauggcaccgguuguuucgagauauuucauaagugcgacgaugacuguauggcaucuauccgcaacaacacauaugaucacagcaaauacagagaagaggccauucaaaauaggauccagaucgacccagugaaacuuucaaguggguauaaggaugucauucugugguucuccuuuggcgcuagcugcuucauauugcuagcgaucgcaaugggacugguguuuauuugcguaaagaacggcaauaugcguuguaccaucugcauuuga

SEQ ID NO: 129397 - RNA, 1701 nt, Artificial Sequence; identical to SEQ ID NO: 128814
  derived and/or modified CDS sequence (opt3) from hemagglutinin__InfluenzaA__ABI95228

SEQ ID NO: 129398 - RNA, 1701 nt, Artificial Sequence
  derived and/or modified CDS sequence (opt3) from hemagglutinin__InfluenzaA__ABI95239
augaagaccaucauugcccugagcuacauacucugccuuguguucgcucagaaacugcccggcaacgacaauuccacagcaacuuuguguuuagggcaccaugccgucccuaacggaacgaucguuaagaccauuacaaaugaucaaaucgaggugacuaacgcgaccgaacugguacagucuucaaguacagguggcauuugcgacagcccacaccagauccuagauggggagaauuguacccucauagacgcucugcuuggagauccgcagugcgacggcuuucaaaacaaaaagugggaucuguucguggaaagauccaaagccuauucuaauuguuaccccuaugacgucccugauuacgcaucguugaggucacucguggccagcagugguacucuggaguuuaacaaugaauccuucaacuggacagggguuacccagaauggaacgucuagcgcuugcaagcggcgcuccaacaauucauuuuucagucgacugaacuggcucacucauuuaaaguuuaaauauccagcacugaaugugaccaugcccaacaacgagaaguucgacaaacuuuacaucuggggcguccaccauccuggcacagauaaugaccagauuagcuuguaugcccaggcuucugggcguaucacuguguccaccaagagaucacaacagacaguaauuccaaacaucggaagcaggccccggguucgcgauauaccuaguagaauuucuaucuacuggaccauugugaaaccaggugacauccugcuaaucaauuccacgggcaaccucauugccccgaggggguacuuuaagauacggagcggaaagucgucuaucaugcgcuccgacgcgcccauuggcaaauguaauucagagugcaucacuccuaacgguaguauaccaaaugauaagcccuuccagaacgucaaucgaauuacauauggggcauguccuagauacgugaaacagaacacccugaaacuugccacuggaaugaggaaugugccagaaaagcaaacacggggcaucuuuggcgcuaucgccggguucauugagaacggaugggaagguauggucaauggcugguauggguuucgucaccagaacagcgagggaaucggccaggcagcugaccugaaguccacccaagccgcgauuaaucagauaaacgguaaauugaaccgccucaucgggaagacgaaugagaaguuccaccagauugaaaaagaguucucugaaguugagggcagaauccaggaucuggaaaaguacguggaggacaccaaaaucgauuuauggagcuauaacgccgagcugcucguagcacuugaaaaucaacauacaauugaccugacugauucagagaugaacaaguuguuugaaaggaccaaaaagcagcuacgggagaaugcugaagacaugggaaacggcugcuucaagauauaccacaaaugugauaaugccugcaucgggaguauucgaaacggaacauaugaccaugauguguaccgcgacgaggcucugaauaacagauuucagaucaagggugucgagcucaaauccggcuacaaggacuggauucuguggaucagcuucgccauaucuugcuuucuucuguguguggcauugcucggguucaucaugugggccugccagaaaggaaauauuagguguaacaucugcauuuga

SEQ ID NO: 129399 - RNA, 1698 nt, Artificial Sequence
  derived and/or modified CDS sequence (opt3) from hemagglutinin__InfluenzaA__ABI95250
augaaggccaaacugcucgugcuucugugcaccuucacagcuacuuacgcagacacgaucugugucggcuaucacgccaacaauagcaccgauacaguugacacuguguuggagaagaacguaaccgugacacauuccgucaauuuacuggaagauucucacaacgggaaacuaugccuccugaagggaauugcgccccuucagcuggguaauuguucaguggcuggcuggauauuggggaacccugagugcgaaagucucaucagcaaagaguccuggucuuacauuguugaaaccccaaauccggagaacggaacuuguuaucccggcuacuuugccgacuaugaggaacugagagagcaacugucgucagugagcaguuucgaaagguuugagaucuucccuaaggaguccucuuggccaaaucauacagucaccggugugagcgcauccugcucacacaacgggaagaguagcuuuuaccggaaucucuuauggcugacggagaaaaacggacuuuaucccaauuugucuaaguccuacguaaacaauaaagaaaaggaaguucuggugcuauggggcguccaucacccuucaaacauuggcgaucagcgcgccaucuaccacacugagaacgcuuaugugagcguggucaguucucauuacucccgacguuucaccccagaaauagcaaaaagacccaagguuagggggcaggagggacggaucaauuauuacuggacacuccuggagccuggugacacuauuaucuuugaagccaacggcaaucuuauugcuccaugguaugccuucgcgcugagccgcggguuuggaucgggcaucauaaccucuaacgcaccgaugaaugagugugaugccaagugccagacaccccaaggugcuauuaacuccucauugccuuuccagaaugugcacccaguaaccaucggggaaugucccaaauacgugagaagugccaagcucaggauggucacgggacugcggaacauuccuagcauccagucccgcggcuuauuuggcgcaaucgcuggguucauugagggagguuggacuggcaugauagacgggugguauggauaccaucaccagaaugaacaaggcucugguuacgccgcggaucagaaaagcacacagaacgccaucaaugggauuaccaacaagguaaauucaguuaucgagaaaaugaacacucaguuuacagcagugggcaaggaguucaauaaacuggaacgaagaauggagaaccucaacaagaaggucgacgauggauuccuugacauauggaccuauaaugcugaacuguuggugcuacuggagaacgaaaggacgcucgauuuucacgacaguaaugugaaaaaccuguacgagaagguuaaaucccaacuuaagaauaacgccaaagagauuggcaaugggugcuucgaauuuuaucauaaguguaacaaugagugcauggaaagcgugaagaacggaaccuacgacuauccaaaauacucugaggagucaaagcugaaucgggagaaaaucgauggugucaaguuggaaaguaugggcguguaucagauccucgcuauuuacagcacagucgccuccucucugguguuacugguuucgcuaggggcaaucagcuucuggaugugcuccaacggaucacuccagugucguauuugcauauga

SEQ ID NO: 129400 - RNA, 1698 nt, Artificial Sequence
  derived and/or modified CDS sequence (opt3) from hemagglutinin__InfluenzaA__ABI95261
augaaggccaaacugcucgugcuucugugcaccuucacagcuacuuacgcagacacgaucuguauuggcuaucacgccaacaauagcaccgauacagucgacacuguuuuggagaagaacgugaccguaacacauuccgugaauuuacuggaagauucucacaacgggaaacuaugccuccugaagggaauagcgccccuucagcuggguaauuguucagucgcuggcuggaucuuggggaacccugagugcgaaagucucauuagcaaagaguccuggucuuacaucguggaaaccccaaauccggagaacggaacuuguuaucccggcuacuuugccgacuaugaggaacugagagagcaacugucgucaguuagcaguuucgaaagguuugagauuuucccuaaggaguccucuuggccaaaucauacagugaccggugucagcgcauccugcucacacaacgggaagaguagcuuuuaccggaaucucuuauggcugacggagaaaaacggacuuuaucccaauuugucuaaguccuacgugaacaauaaagaaaaggaaguacugguucuauggggcgugcaucacccuucaaacaucggcguccagcgcgccauauaccacacugagaacgcuuaugugagcguggucaguucucauuacucccgacguuucaccccagaaaucgcaaaaagacccaagguuagggaucaggaggggcggauuaauuauuacuggacacuccuggagccuggagacacuaucauuuuugaagccaacgguaaucuuaucgcuccaugguaugccuucgcgcugagccgcggcuuugagucggggauaauuaccucuaacgcaccgaugaaugaaugugaugccaagugccagacaccccaaggagcuaucaacuccucauugccuuuccagaaugugcacccaguaaccauuggcgagugucccaaauacgugagaagugccaagcucaggauggucacgggucugcggaacaucccuagcauccagucccgcggguuauuuggagcaauugcuggcuucauagaaggcggguggacuggaaugaucgacgguugguauggcuaccaucaccagaaugagcaagggucuggauacgccgcggaucagaaaagcacacagaacgccauuaauggcaucaccaacaagguaaauucaguuauagagaaaaugaacacucaguuuacagcaguggguaaggaguucaauaaacuggaacgaagaauggaaaaccucaacaagaaggucgacgauggguuccuugacauuuggaccuauaaugcugagcuguuggugcuacuggaaaacgagaggacgcucgauuuucacgacaguaaugugaaaaaccuguacgagaagguuaaaucccaacuuaagaauaacgccaaagaaaucggcaauggaugcuucgaguuuuaucauaaguguaacaaugaaugcauggagagcgugaagaacggcaccuacgacuauccaaaauacucugaggaaucaaagcugaaucgggagaaaaucgauggggucaaguuggaaaguaugggaguguaucagauucucgcuaucuacagcacagucgccuccucucugguguuacugguuucgcuaggugcaauuagcuucuggaugugcuccaacggcucacuccagugucguauaugcaucuga

SEQ ID NO: 129401 - RNA, 1698 nt, Artificial Sequence; identical to SEQ ID NO: 129280
  derived and/or modified CDS sequence (opt3) from hemagglutinin__InfluenzaA__ABI95272

SEQ ID NO: 129402 - RNA, 1698 nt, Artificial Sequence; identical to SEQ ID NO: 129280
  derived and/or modified CDS sequence (opt3) from hemagglutinin__InfluenzaA__ABI95283

SEQ ID NO: 129403 - RNA, 1698 nt, Artificial Sequence; identical to SEQ ID NO: 128344
  derived and/or modified CDS sequence (opt3) from hemagglutinin__InfluenzaA__ABI95294

SEQ ID NO: 129404 - RNA, 1698 nt, Artificial Sequence
  derived and/or modified CDS sequence (opt3) from hemagglutinin__InfluenzaA__ABI96104
augaaggugaaacugcucauccuucugugcaccuucacagccacuuacgcugacacgauuuguauaggcuaucacgcaaacaauagcaccgauacagucgacacuguuuuggagaagaacgugaccguaacacauuccgugaauuuacuggaagauucucacaacgggaaacuaugccuccugaagggaaucgcgccccuucagcuggguaauuguucagucgccggcuggauuuuggggaacccugagugcgaacuccugaucaguaaagagagcugguccuacauuguggaaaccccaaauccggagaacggagcuuguuaucccggcuacuuugccgacuaugaggaacugagagagcaacucucuucgguuagcucauucgaaagguuugagaucuucccuaaggagaguuccuggccaaaucauacugugacaggugucucugcaagcugcucccacaacgggaagucaaguuuuuaccggaauuuacuguggcuuaccggcaaaaacggauuguaucccaaucugauaaagagcuacgccaacaauaaagaaaaggaggugcuaauccucuggggcguacaucacccuccaaacauuggggaucagcgcacgcuguaccacacugaaaacgcuuauguuucuguggucuccucacauuacagccgacguuucacccccgagaucacaaaaagaccuaaggugagggaccaggaaggacggauuaauuauuacuggacucuucuggagccaggugauaccaucauauuugaggcaaacggcaauuugauugccccgugguaugcuuucgcccucagucgcggguuuggaucuggcaucauuacauccaacgcgcccauggacgaaugugaugcaaagugccagaccccucaaggugccaucaauagcucgcugccauuccagaacgugcaccccgucacgaucggggaguguccuaaauacguuagaucugcuaaguuaaggauggugacuggacugcggaauauuccauccauacagucacgcggccucuuuggcgccaucgcaggguucauugaaggagguuggacaggcaugguagacgggugguauggauaccaucaccagaacgagcaaggcagugguuacgcugccgaucagaaaagcacccagaaugcgaucaacgggauaacuaauaaggugaacuccgucauugaaaagaugaauacacaguuuaccgccgugggcaaagaguucaacaaacuugagcgaagaauggaaaaucugaacaagaagguugacgauggauucuuggacaucuggacguauaacgcagagcuacuggugcuccuggaaaaugagaggacccuugacuuucacgauucuaacgucaaaaaucuguacgaaaaggugaaaagccaauugaagaacaaugcuaaagagaucggcaacgggugcuucgaguuuuaucauaaguguaauaacgaaugcauggagucaguaaagaauggaacauacgacuaucccaaauacagugaagaguccaagcucaaccgggagaaaauugaugguguuaagcuggacagcaugggcguguaucagaucuuagccauuuacucuacugucgcuucaagucuggugcuacucgucagccugggggccauauccuucuggaugugcucuaauggaucgcuucagugucguaucugcauuuga

SEQ ID NO: 129405 - RNA, 1701 nt, Artificial Sequence; identical to SEQ ID NO: 128698
  derived and/or modified CDS sequence (opt3) from hemagglutinin__InfluenzaA__ABJ09107

SEQ ID NO: 129406 - RNA, 1701 nt, Artificial Sequence
  derived and/or modified CDS sequence (opt3) from hemagglutinin__InfluenzaA__ABJ09140
augaagaccaucauugcccugagcuacauacucugccuuguguucgcucagaaacugcccggcaacgacaauuccacagcaacuuuguguuuagggcaccaugccgucccuaacggaacgcugguuaagaccaucacaaaugaucaaauugaggugacuaacgcgaccgaacuuguacagucuucaaguacagguagaaucugcgacagcccacacaggauucucgauggcaaaaauuguacccugaucgacgcucuacugggggauccgcauugcgacggauuucagaacaaggagugggauuuguucguggaacgguccaaagccuauucuaauuguuaccccuaugacgucccugauuacgcaucgcuccgcucacugguggccagcaguggcacucuggaguuuauaaacgaagacuucaauuggacagguguugcucaggaugggaaguccuauucuugcaagcgaggaagcgugaacuccuuuuucucacgucucaauugguuacacaaacuggaguacaaguauccagcacuuaacgucaccaugcccaauaacggcaaauuugacaaguuguacaucuggggcgugcaucacccuaguacggauagcgaccaaacuucucuguacguaagagccuccgggaggguuaccgugucaacaaaacggagccagcagacugucauuccaaauaucggauuccgccccugggugagaggucuaaguucuaggauuuccaucuauuggaccauagugaagccuggcgacauucuccugaucaacagcacagggaaccuuauugcuccacggggauacuuuaagauccgcaauggcaaaucgucuaucaugcgauccgaugccccgauugguaacuguucaagugagugcauaacccccaaugggagcaucccuaacgacaagccauuccagaaugucaacagaauuacguauggagcgugucccagguacguuaaacaaaauacucugaaguuggcaacaggcaugcggaacgugccugaaaaacagacccguggcaucuuuggggccauagcuggauucauugagaaugguugggaaggcaugguagaugggugguauggauuucgccaccagaacuccgagggcacuggucaggccgcagaccucaagucuacacaagcugccaucgaucagaucaaugggaaacugaacagauuaauugagaagaccaaugaaaaguuccaucagaucgagaaagaguucagcgaaguggaaggcaggauucaagaccuggagaaguacgucgaggauacgaaaauagaccucuggucauauaacgcgggacuucugguggccuuggaaaaucagcacaccaucgaucuaacagacagugagaugaacaagcuguuugaacggacucgaaaacagcuccgcgagaacgcagaagauaugggcaaugggugcuucaagauuuaccauaagugugacaacgcuugcaucggauccaucagaaaugguaccuacgaccacgauguuuauagggacgaggcccugaacaaucgguuucagauuaaaggcguggagcuuaagagcggguacaaagauuggauacuguggaucucuuucgcuauuucaugcuuuuugcucugugucgugcuguuaggauucaucaugugggccugccaaaagggcaacauucgcuguaauaucugcauauga

SEQ ID NO: 129407 - RNA, 1698 nt, Artificial Sequence
  derived and/or modified CDS sequence (opt3) from hemagglutinin__InfluenzaA__ABJ09151
augaaggccaaacugcucgugcuucugugcaccuucacagcuacuuacgcagacacgaucuguauuggcuaucacgccaacaauagcaccgauacagucgacacuguuuuggagaagaacgugaccguaacacauuccgugaauuuacuggaagauucucacaacgggaaacuaugccuccugaagggaauagcgccccuucagcuggguaauuguucagucgcuggcuggaucuuggggaacccugagugcgaacuccugauuaguaaagagagcugguccuacaucguggaaaccccaaauccggagaacggaacuuguuaucccggcuacuuugccgacuaugaggaacugagagagcaacucucuucgguuagcucauucgaaagguuugagauuuucccuaaggguaguuccuggccaaaucauacagugaccggggucucugcaagcugcucccacaacggaaagucaaguuuuuaccggaauuuacuguggcuuacgggcaaaaacggcuuguaucccaaucugagcaugucuuacgugaacaauaaggggaaagagguacuuguucucuggggagugcaucacccuccaaacaucggugaucagcgcgcccuguaccacacugaaaacgcuuaugucuccguggugucaagccauuacagucgacguuucacccccgagauagcaaagagaccuaaagucagggaccaggaaggccggaucaauuauuacuggacacuucuggagccaggggauacuauuaucuuugaagccaacggaaauuugauugcuccgugguaugccuucgcgcucucucgcggcuuugguuccgggaucauaaccagcaacgcacccaugggagagugugacgccaagugccagacaccucaaggcgcuauuaauucgucucugccauuccagaacguucaccccgugaccaucggcgaguguccuaaguacguaagauccgccaaauuaaggauggugacggggcugcggaauauuccaucaauccagagucgcggacucuuuggugcaaucgcuggcuucauugaagggggauggacuggcauggucgaugguugguauggguaccaucaccagaacgagcaaggcagcggauacgccgcggaccagaaguccacacagaaugccauaaacggcaucaccaauaaagugaacucuguuauugaaaagaugaauacucaguuuacagcaguggggaaagaguucaacaagcuagaacgaagaauggagaaucugaacaaaaaggucgaugacggauucuuggauaucuggaccuauaacgcugagcuacuggugcuccuggaaaaugagaggacgcuugacuuucacgacagcaacguaaagaaucuguacgaaaaaguuaagucacaauugaaaaacaaugccaaggagauagguaacggcugcuucgaauuuuaucauaaauguaauaacgagugcauggagagugugaagaaugggaccuacgauuaucccaaguacuccaaagaaagcaagcucaaccgggagaaaauugacggagucaagcuggaaucuaugggcguguaucagaucuuagcuaucuacucaacagucgccaguagccuggugcuacucguuucccugggugcaauuucuuucuggaugugcucgaaugggagccuucagugucguaucugcauuuga

SEQ ID NO: 129408 - RNA, 1701 nt, Artificial Sequence
  derived and/or modified CDS sequence (opt3) from hemagglutinin__InfluenzaA__ABJ09162
augaagaccaucauugcccugagcuacauacucugccuuguguucgcucagaaacugcccggcaacgacaauuccacagcaacuuuguguuuagggcaccaugccgucccuaacggaacgaucguuaagaccauuacaaaugaucaaaucgaggugacuaacgcgaccgaacugguacagucuucaaguacagguggcauuugcgacagcccacaccagauccuagauggggagaauuguacccucauagacgcucugcuuggagauccgcagugcgacggcuuucaaaacaaaaagugggaucuguucguggaaagauccaaagccuauucuaauuguuaccccuaugacgucccugauuacgcaucguugaggucacucguggccagcagugguacucuggaguuuaacaaugaauccuucaacuggacagggguuacccagaauggaacgucuagcgcuugcaagcggcgcuccaacaauucauuuuucagucgacugaacuggcucacucauuuaaaguuuaaauauccagcacugaaugugaccaugcccaacaacgagaaguucgacaaacuuuacaucuggggcguccaccauccuggcacaaauaacgaucagauuagcuuguaugcccaggcuucugggcguaucacuguguccaccaagagaucacaacagacaguaauuccaaauaucggaagcaggccccggguucgcgacauaccuaguagaauuucuaucuacuggaccauugugaaaccaggugauauccugcuaaucaacuccacgggcaaucucauugccccgaggggguacuuuaagauacggagcggaaagucgucuaucaugcgcuccgacgcgcccauuggcaaauguaacucagagugcaucacuccuaaugguaguauaccaaacgacaagcccuuccagaaugucaaccgaauuacauauggggcauguccuagauacgugaaacagaauacccugaaacuugccacuggaaugaggaacgugccagaaaagcaaacacggggcaucuuuggcgcuaucgccggguucauugagaauggaugggaagguauggucgauggcugguauggguuucgucaccagaacagcgagggaaucggccaggcagcugaccugaaguccacccaagccgcgauuaaucagauaaacgguaaauugaaccgccucaucgggaagacgaaugagaaguuccaccagauugaaaaagaguucucugaaguugagggcagaauccaggaucuggaaaaguacguggaggacaccaaaaucgauuuauggagcuauaacgccgagauucugguagcacucgaaaaucaacauacaauagaccuuacugauucagagaugaacaagcuguuugaaaggaccaaaaagcaguugcgggagaaugcugaagacaugggaaacggcugcuucaagaucuaccacaaaugugauaaugccugcauugggaguauccgaaacggaacauaugaccaugauguguaccgcgacgaggcucuaaauaacagauuucagauuaagggugucgagcugaaauccggcuacaaggacuggauccucuggaucagcuucgccauaucuugcuuucugcuuuguguggcacuguugggguucauuaugugggccugccagaaaggaaauaucagguguaacauuugcaucuga

SEQ ID NO: 129409 - RNA, 1701 nt, Artificial Sequence; identical to SEQ ID NO: 128291
  derived and/or modified CDS sequence (opt3) from hemagglutinin__InfluenzaA__ABJ09173

SEQ ID NO: 129410 - RNA, 1698 nt, Artificial Sequence
  derived and/or modified CDS sequence (opt3) from hemagglutinin__InfluenzaA__ABJ09184
augaaggugaaacugcucguccuucugugcaccuucacagccacuuacgcugacacgaucuguauuggcuaucacgcaaacaauagcaccgauacaguugacacuguguuggagaagaacguaaccgugacacauuccgucaauuuacuggaagauucucacaacgggaaacuaugccuccugaagggaauagcgccccuucagcuggguaauuguucaguggccggcuggaucuuggggaacccugagugcgaacuccugauuaguaaagagagcugguccuacaucguugaaaccccaaauccggagaacggaacuuguuaucccggcuacuuugcugacuaugaggaacugagagagcaacucucuucggugagcucauucgaaagguuugagauuuucccuaaggagaguuccuggccaaaucauacagucaccggugugucugccagcugcucccacaacgggaagucaaguuuuuaccggaauuuacuguggcuuacgggcaaaaacggauuguaucccaaucugagcaagucuuacgcaaacaauaaagaaaaggagguucuaguacucuggggcgugcaucacccuccaaacaucggggaucagcgcgcccuguaccacacugaaaacgcuuaugucuccguggugucaagccauuacagucgacguuucacccccgagauagcaaaaagaccuaaggucagggaccaggaaggacggaucaauuauuacuggacacuucuggaggccggugauacuauuaucuuugaggcuaacggcaauuugauugccccacgcuucgcguuugcacucucuagaggguucggauccggcaucauaaccagcaacgccccgauggacgaaugugaugcuaagugccagacaccccaaggugccauuaauucgucucugccuuuucagaacguucacccagugaccaucggggagugucccaaauauguaagguccgcaaaguuacggauggcuacgggacugcgcaauauuccuucaauccagagucgaggccucuucggcgccaucgcgggguuuauugaaggagguuggacuggcaugguggacgggugguacggauaucaucaccagaacgagcaaggcagcgguuacgccgcagaucagaaauccacacagaaugcuauaaacgggaucaccaauaaggucaacucugugauugaaaagaugaauacucaguucacagccguuggcaaagaguucagcaaacuugagagaaggauggaaaaccugaauaagaagguggacgauggauuuuuggacaucuggaccuacaacgcugagcuacugguccuccuggaaaacgagcggacgcuugacuuccacgauucaaaugugaaaaaccuguaugaaaagguaaaaagucaauugaagaauaacgccaaagagauaggcaaugggugcuuugaguucuaccauaaguguaacgacgaaugcauggaguccguuaagaauggaaccuaugauuacccaaaauauagcgaagagucuaagcucaaccgugagaaaauugacggugugaagcuggaaucaaugggcgucuaccagaucuuagcaaucuauaguacaguggccagcucccugguccuacucgugucucugggggcuauuucguuuuggaugugcagcaauggaucccuucagugucgcaucugcauuuga

SEQ ID NO: 129411 - RNA, 1701 nt, Artificial Sequence; identical to SEQ ID NO: 128681
  derived and/or modified CDS sequence (opt3) from hemagglutinin__InfluenzaA__ABJ09195

SEQ ID NO: 129412 - RNA, 1701 nt, Artificial Sequence; identical to SEQ ID NO: 128681
  derived and/or modified CDS sequence (opt3) from hemagglutinin__InfluenzaA__ABJ09206

SEQ ID NO: 129413 - RNA, 1701 nt, Artificial Sequence; identical to SEQ ID NO: 129261
  derived and/or modified CDS sequence (opt3) from hemagglutinin__InfluenzaA__ABJ09217

SEQ ID NO: 129414 - RNA, 1701 nt, Artificial Sequence; identical to SEQ ID NO: 128698
  derived and/or modified CDS sequence (opt3) from hemagglutinin__InfluenzaA__ABJ09228

SEQ ID NO: 129415 - RNA, 1701 nt, Artificial Sequence
  derived and/or modified CDS sequence (opt3) from hemagglutinin__InfluenzaA__ABJ09239
augaagaccaucauugcccugagcuacauacucugccuuguguucgcucagaaacugcccggcaacgacaauuccacagcaacuuuguguuuagggcaccaugccgucccuaacggaacgcugguuaagaccaucacaaaugaucaaauugaggugacuaacgcgaccgaacuuguacagucuucaaguacagguggcaucugcgacagcccacaccagauucucgauggggagaauuguacccugaucgacgcccuucugggagauccgcauugcgacggcuuucagaacaaagaaugggauuuguucguggagagauccaaggcuuauucuaauuguuaccccuaugacgucccugauuacgcaucgcucaggucacugguggccagcagugguacuauggaauuuaacaaugaguccuucaacuggacagggguugcucaaaauggaaccucuagcgcaugcaaacggcgcuccaacaagucauuuuucagucgacugaauuggcuccaccaguuaaaguauaaauacccagcccugaacgugacgaugcccaauaacgagaaguuugacaaacuuuauauauggggcguccaucacccuagcacugauucugaccagaucuccuuguacgcucaggccccaggccgugugaccguaucaacaaagagaagccaacagacuguuauucccaacaucgggaguaggccuugggugcggggagucucuucccgcauuagcaucuacuggaccauagugaaaccaggugauauucugcuaaucaauuguacaggcaaccucauugcgccgagaggguauuucaagaucaggucgggaaagucuuccaucaugcggucagacgcaaguauuggcaaaugcaauagcgaauguauaacccccaacgguuccaucccuaaugacaagccauuucagaacgugaaucgcauuacguacggggccugcccccgauaugucaaacagaacacucugaagcuagcuacaggaaugagaaauguuccugagaaacaaaccaggggcaucuucggcgccauagcaggguuuauugaaaacggaugggaggguaugguggauggcugguacggguuccggcaccagaauagcgagggaacuggccaggcugccgaccugaagucuacacaagcggccaucaaccagaucaaugguaaauugaaccgucucauugaaaagaccaaugagaaguuucaucagaucgaaaaagaguucucagaaguagaggggcgcauucaggaucuggagaaguauguggaagacacgaaaauagauuuauggaguuacaacgcagagcugcucgucgcucuugaaaaccaacacaccaucgaccugacagauuccgagaugaauaaguuguucgaaagaacuaaaaagcagcuaagggagaacgccgaggacaugggcaauggauguuuuaagauuuaucauaaaugcgauaacgcuugcaucggcagcauccggaaugggaccuacgaccacgauguguaccgagacgaagcccugaacaaucgcuuccagauuaagggaguugagcucaaaucugguuauaaggacuggauacuguggaucucauuugcaauuaguuguuuccuucugugcguggucuugcucggcuuuaucaugugggccugucagaaagggaacauuagaugcaauaucuguauauga

SEQ ID NO: 129416 - RNA, 1701 nt, Artificial Sequence
  derived and/or modified CDS sequence (opt3) from hemagglutinin__InfluenzaA__ABJ09250
augaagaccaucauugcccugagcuacauacucugccuuguguucgcucagaaacugcccggcaacgacaauuccacagcaacuuuguguuuagggcaccaugccgucccuaacggaacgcugguuaagaccaucacaaaugaucaaauugaggugacuaacgcgaccgaacuuguacagucuucaaguacagguagaaucugcgacagcccacaccagauucucgauggcgagaauuguacccugaucgacgcucuacugggggauccgcauugcgacggauuucagaacaaagaaugggauuuguucguggagagguccaaggccuauucuaauuguuaccccuaugacgucccugauuacgcaucgcuccggucacugguggccagcaguggcacucuggaauuuaacaaugaguccuucaacuggacagguguugcucaaaaugggaccucuagcgcaugcaaacgccgauccaacaagucauuuuucagucgucucaauugguuacaccagcugaaguauaaauacccagcccuuaacgugacgaugcccaauaacgagaaguuugacaaauuguauauauggggaauccaucacccuagcacugauucugaccagauuucccuguacgcucaggccucaggcagagucaccgugagcacaaagaggagucaacagacuguaaucccaaacauuggcucucggcccuggguucgcgggguguccagcagaaucucgauauacuggaccauugucaaaccuggagauauccuacucauuaauucuacagguaaccugaucgcgccaaggggcuauuucaagauccgguccgggaagucaaguauuaugcgcagcgacgcaccgauaggaaaauguaauuccgaaugcaucacccccaacggcucuauuccuaaugacaagccauuucagaacgugaaucgaaucacguacggugccugucccagauaugugaaacagaacacucuuaagcuggcuacagggaugaggaaugucccugagaaacaaacccggggaauauucggcgccauugcaggcuuuaucgaaaacgggugggagggaaugguugaugguugguacggcuuccgucaccagaauagcgaggggacuggacaggcugccgacuugaagucaacacaagcggccaucaaccagauuaauggcaaacucaaccgccugaucgaaaagaccaaugagaaguuucaucagauugaaaaagaguucagugaaguggaggguagaauacaggauuuagagaaguauguagaagacacgaaaaucgaucugugguccuacaacgcagagcuccuuguggcucuggaaaaccaacacaccauugacuugacagauagcgagaugaauaagcuauucgaaaggacuaaaaagcagcugcgggagaacgccgaggacauggggaauggcugcuuuaagaucuaucauaaaugugauaacgcuugcaucggaucuauucgaaaugaaaccuacgaccacgaugucuaccgcgacgaggcccucaacaauagauuccagauaaagggcguggaacugaaaucaggguauaaggacuggauccuuuggauuaguuuugcaaucagcugcuuccuguuguguguugugcuccugggauuuauuaugugggccugccagaaagguaacaucagguguaauauaugcaucuga

SEQ ID NO: 129417 - RNA, 1701 nt, Artificial Sequence
  derived and/or modified CDS sequence (opt3) from hemagglutinin__InfluenzaA__ABJ09261
augaagaccaucauugcccugagcuacauacucugccuuguguucgcucagaaacugcccggcaacgacaauuccacagcaacuuuguguuuagggcaccaugccgucccuaacggaacgcugguuaagaccaucacaaaugaucaaauugaggugacuaacgcgaccgaacuuguacagucuucaaguacagguaaaaucugcgacagcccacaccagauucucgauggcgagaauuguacccugaucgacgcucuacugggggauccgcauugcgacggauuucagaacaaggaaugggauuuguucguggagagauccaaagccuauucuaauuguuaccccuaugacgucccugauuacgcaucgcucaggucacugguggccagcaguggcacucuggaauuuaacaaugaguccuucaacuggacagguguugcucaaaaugggaccucuagcgcaugcaagcggcgcuccauaaagucauuuuucagucgacucaacugguuacaccagcugaaauauaaguacccagcccuuaaugugacgaugcccaacaaugagaaauuugacaaguuguauaucuggggaguccaucacccuagcacugauucugaccagaccucccuguacgcucaggccucaggccgugugacaguaagcacuaaaagaagucaacagaccguuauuccaaacaucggcucuaggcccugggugcgcggggucuccagccggauuucgaucuacuggacaauagugaagccuggagauauucuacucaucaacucuaccgguaaucugauugcgccaagaggcuauuucaagaucagguccgggaaaucaaguaucaugcggagcgacgcaccgauuggaaaguguaacuccgaaugcauaacgcccaauggcucuaucccuaacgacaaaccauuucagaaugugaaccgcauuacuuacggugccuguccccgauaugucaagcagaauacacuuaaacuggcuaccgggaugagaaacguuccugagaagcaaacuaggggaaucuucggcgccauagcaggcuuuauugaaaaugggugggagggaaugguggaugguugguacggcuuccggcaccagaacagcgaggggacaggacaggcugccgacuugaaaucaacccaagcggccaucaaucagaucaacggcaagcucaaucgucugauugaaaagacgaacgagaaauaucaucagaucgaaaaggaguuuagugaaguagagggucgcauucaggauuuagagaaauacguggaagacaccaagauagaucugugguccuauaaugcagagcuccuugucgcucuggaaaaccaacacacaaucgacuugacugauagcgagaugaacaaacuauucgaaagaaccaggaagcagcugcgggagaaugccgaggacauggggaacggcugcuucaagauuuaccauaaaugugauaaugcuugcaucggaucuauccgaaacggcacauacgaccacgauguguaucgcgacgaagcccucaauaacagauuucagauuaaggggguugagcugaaaucaggauacaaggacuggauacuuuggaucaguuucgcaauuagcugcuuucuguugugugugguccuccuggguuucaucaugugggccugccagaaaggcaauauuagguguaacaucugcauauga

SEQ ID NO: 129418 - RNA, 1701 nt, Artificial Sequence
  derived and/or modified CDS sequence (opt3) from hemagglutinin__InfluenzaA__ABJ09272
augaagaccaucauugcccugagcuacauacucugccuuguguucgcucagaaacugcccggcaacgacaauuccacagcaacuuuguguuuagggcaccaugccgucccuaacggaacgcugguuaagaccaucacaaaugaucaaauugaggugacuaacgcgaccgaacuuguacagucuucaaguacagguagaaucugcaauagcccacaccagauucucgacggcgagaacuguacccugaucgaugcucuacugggggacccgcauugcgauggauuucagaauaaagaaugggacuuguucguggagaggcggaaggccuauuccaacuguuaccccuaugaugucccugacuacgcaucucuccgcucgcugguggccucaagcggcacucuggaauuuaauaacgagaguuucaauuggacagguguugcucaaaacgggaccuccucugcaugcaaacgacguagcauaaaguccuuuuucucaagacucaauugguuacaccagcugaaguauaaauacccagcccuuaacgugacgaugcccaauaacgagaaguuugauaaauuguauaucuggggaguccaucacccuaguacugacagcgaucagauuucucuguacgcucaggccuccggcagggugaccguaucaacaaagcggagccaacagacuguuaucccaaacauuggcagucgccccugggugagaggggucucuuccaggaucagcauauacuggaccauugugaaaccuggagacauccuacucauuaauucgacagguaaccugaucgcgccacggggcuauuucaagauccgcucugggaaguccucaauuaugcgaagugaugcaccgauaggaaaauguaauagcgaaugcaucacccccaacggcuccauuccuaaugacaagccauuucagaacgugaauagaaucacguacggugccugucccagguaugucaaacagaacacucuuaagcuggcuacagggaugcggaauguuccugagaaacaaacccguggaauauucggcgccauugcaggcuuuaucgaaaacgggugggagggaaugguggacgguugguacggcuuccgccaccagaauagcgaggggacuggacaggcugccgauuugaagucuacacaagcggccaucaaccagauuaauggcaaacucaacagacugaucgaaaagaccaaugagaaguuucaucagauugaaaaagaguucucagaaguagaggguaggauacaggacuuagagaaggauguggaagacacgaaaaucgaucuguggaguuauaacgcagagcuccuugucgcucuggaaaaccaacacaccauugacuugacagauuccgagaugaauaagcuauucgaacggacuaaaaagcagcugcgagagaacgccgaggacauggggaauggcugcuuuaagaucuaccauaaaugugauaacgcuugcaucggaagcauucgcaauggcaccuaugaccacgauguguacagagacgaagcccucaacaauagguuccagauaaaggggguugagcugaaaucuggauacaaggacuggauccuuuggauuucauuugcaaucaguugcuuccuguugugugugguccuccuggguuuuauuaugugggccugccagaaaggcaacauccgguguaauauaugcaucuga

SEQ ID NO: 129419 - RNA, 1701 nt, Artificial Sequence; identical to SEQ ID NO: 128120
  derived and/or modified CDS sequence (opt3) from hemagglutinin__InfluenzaA__ABJ09294

SEQ ID NO: 129420 - RNA, 1701 nt, Artificial Sequence
  derived and/or modified CDS sequence (opt3) from hemagglutinin__InfluenzaA__ABJ09305
augaagaccaucauugcccugagcuacauacucugccuuguguucgcucagaaacugcccggcaacgacaauuccacagcaacuuuguguuuagggcaccaugccgucccuaacggaacgcugguuaagaccaucacaaaugaucaaauugaggugacuaacgcgaccgaacuuguacagucuucaaguacagguagaaucugcgacagcccacaccagauucucgauggcgagaauuguacccugaucgacgcucuacugggggauccgcauugcgacggauuucagaacaaagaaugggauuuguucguggagagguccaaggccuauucuaauuguuaccccuaugacgucccugauuacgcaucgcuccggucacugguggccagcaguggcacucuggaauuuaacaaugaguccuucaacuggacagguguugcucaaaaugggaccucuagcgcaugcaaacgccgauccaacaagucauuuuucagucgucucaauugguuacaccagcugaaguauaaauacccagcccuuaacgugacgaugcccaauaacgagaaguuugacaaauuguauauauggggaguccaucacccuagcacugauucugaccagaucucccuguacgcucaggccucaggcagagugaccguaagcacaaagaggagucaacagacuguuauuccaaacaucggcucucggcccugggugcgcggggucuccagcagaauuucgaucuacuggaccauagugaaaccuggagauauucuacucaucaauucuacagguaaccugauugcgccaaggggcuauuucaagauccgguccgggaagucaaguaucaugcgcagcgacgcaccgauuggaaaauguaauuccgaaugcauaacccccaacggcucuaucccuaaugacaagccauuucagaacgugaaucgaauuacguacggugccugucccagauaugucaaacagaacacucuuaagcuggcuacagggaugaggaauguuccugagaaacaaacccggggaaucuucggcgccauagcaggcuuuauugaaaacgggugggagggaaugguggaugguugguacggcuuccgucaccagaauagcgaggggacuggacaggcugccgacuugaagucaacacaagcggccaucaaccagaucaauggcaaacucaaccgccugauugaaaagaccaaugagaaguuucaucagaucgaaaaagaguucagugaaguagaggguaggauucaggauuuagagaaguauguggaagacacgaaaauagaucugugguccuacaacgcagagcuccuugucgcucuggaaaaccaacacaccaucgacuugacagauagcgagaugaauaagcuauucgaaagaacuaaaaagcagcugcgggagaacgccgaggacauggggaauggcugcuuuaagauuuaucauaaaugugauaacgcuugcaucggaucuauccgaaaugaaaccuacgaccacgauguguaccgcgacgaggcccucaacaauagauuccagauuaagggcguugaacugaaaucaggguauaaggacuggauacuuuggaucaguuuugcaauuagcugcuuccuguugugugugguccuccugggauuuaucaugugggccugccagaaagguaacauuagguguaauaucugcauauga

SEQ ID NO: 129421 - RNA, 1701 nt, Artificial Sequence
  derived and/or modified CDS sequence (opt3) from hemagglutinin__InfluenzaA__ABJ09316
augaagaccaucauugcccugagcuacauacucugccuuguguucgcucagaaacugcccggcaacgacaauuccacagcaacuuuguguuuagggcaccaugccgucccuaacggaacgcugguuaagaccaucacaaaugaucaaauugaggugacuaacgcgaccgaacuuguacagucuucaaguacagguagaaucugcgacagcccacaccagauucucgauggcgagaauuguacccugaucgacgcucuacugggggauccgcauugcgacggauuucagaacaaagaaugggauuuguucguggagagguccaaggccuauucuaauuguuaccccuaugacgucccugauuacgcaucgcuccggucacugguggccagcaguggcacucuggaauuuaacaaugaguccuucaacuggacagguguugcucaaaaugggaccucuagcgcaugcaaacgccgauccaacaagucauuuuucagucgucucaauugguuacaccagcugaaguauaaauacccagcccuuaacgugacgaugcccaauaacgagaaguuugacaaauuguauauauggggaguccaucacccuagcacugauucugaccagaucucccuguacgcucaggccucaggcagagugaccguaagcacaaagaggagucaacagacuguuauuccaaacaucggcucucggcacugggugcgcggggucuccagcagaauuucgaucuacuggaccauagugaaacccggagauauucuacucaucaauucuacagguaaccugauugcgccuaggggcuauuucaagauccgguccgggaagucaaguaucaugcgcagcgacgcauccauuggaaaauguaauucugaaugcauaaccccaaacggcagcaucccgaaugacaagcccuuucagaacgugaaucgaauuacguacggugccuguccuagauaugucaaacagaacacucuuaagcuggcuacagggaugaggaauguuccagagaaacaaacccggggaaucuucggcgccauagcaggcuuuauugaaaacgggugggagggaaugguggaugguugguacggcuuccgucaucaaaauucagaggggacuggacaggcugccgacuugaagaguacacaggcggccaucaaccagaucaauggcaaacucaaccgccugauugaaaagaccaaugagaaguuucaccagaucgaaaaagaguucuccgaaguagaggguaggauucaggauuuagagaaguauguggaagacacgaaaauagaucuguggagcuacaacgcagagcuccuugucgcucuggaaaaccaacauaccaucgacuugacagauucugagaugaauaagcuauucgaaagaacuaaaaagcagcugcgggagaacgccgaggacauggggaauggcugcuuuaagauuuaucacaaaugugauaacgcuugcaucggaucaauccgaaauggcaccuacgaccacgauguguaccgcgacgaagcccucaacaauagauuccagauuaaggggguugagcugaaaaguggauauaaggacuggauacuuuggaucagcuuugcaauuuccugcuuccuguugugugugguccuccuggguuuuaucaugugggccugccagaaaggcaacauuagguguaauaucugcauauga

SEQ ID NO: 129422 - RNA, 1701 nt, Artificial Sequence; identical to SEQ ID NO: 128698
  derived and/or modified CDS sequence (opt3) from hemagglutinin__InfluenzaA__ABJ09338

SEQ ID NO: 129423 - RNA, 1701 nt, Artificial Sequence
  derived and/or modified CDS sequence (opt3) from hemagglutinin__InfluenzaA__ABJ09349
augaagaccaucauugcccugagcuacauacucugccuuguguucgcucagaaacugcccggcaacgacaauuccacagcaacuuuguguuuagggcaccaugccgucccuaacggaacgcugguuaagaccaucacaaaugaucaaauugaggugacuaacgcgaccgaacuaauccagucuucaaguacagguggcauuugcgacagcccacaccagauccucgauggggagaauuguacccugauagacgcuuugcugggagauccgcauugcgacggcuuucagaacaaagaaugggauuuguucguagagagauccaaggccuauucuaauuguuaccccuaugacgugccugauuacgcaucgcucaggucacuggucgccagcagugguacucuggaauuuaacaaugaguccuucaacuggacagggguggcucaaaauggaaccucuagcgcaugcaaacggcgcuccaacaagucauuuuucagucgacucaauugguuacaccagcugaaguauaaauacccagcccuuaacguuacgaugcccaauaacgagaaguuugacaaauuguauaucuggggcgugcaucacccuagcacugauucugaccagauuucccuguacgcucaggccccaggccgugucaccgugucaacaaagagaagccaacagacuguaauccccaacauugggaguaggccuuggguucggggagugucuucccgcaucagcauauacuggaccauugucaaaccaggugauauccuacucauuaauuguacaggcaaccugaucgcgccgagaggguauuucaagaucaggucgggaaagucuuccauuaugcggucagacgcaaguauaggcaaaugcaauagcgaauguaucacccccaacgguuccauuccuaaugacaagccauuucagaacgugaaucgcaucacguacggggccugcccccgauaugugaaacagaacacucuuaagcuggcuacaggaaugagaaaugucccugagaaacaaaccaggggcauauucggcgccauugcaggguuuaucgaaaacggaugggaggguaugguugauggcugguacggguuccggcaccaaaauucugagggaacuggccaggcugccgaccuuaagagcacacaggcggccaucaaccagauuaaugguaaacucaaccgucugaucgaaaagaccaaugagaaguuucaucagauugaaaaagaguucucagaaguggaggggcgcauacaggauuuagagaaguauguagaagacacgaaaaucgaucuguggaguuacaacgcagagcuccuuguggcucuggaaaaccaacacaccauugacuugacagauuccgagaugaauaagcuauucgaaagaacuaaaaagcagcugagggagaacgccgaggacaugggcaauggauguuuuaagaucuaucauaaaugcgauaacgcuugcaucggcagcauucggaaugggaccuacgaccacgaugucuaccgagacgaagcccucaacaaucgcuuccagauaaagggaguggagcugaaaucugguuauaaggacuggauccuuuggauuucauuugcaaucaguuguuuccuguugugcguugugcuccugggcuuuauuaugugggccugucagaaagggaacaucagaugcaauauauguaucuga

SEQ ID NO: 129424 - RNA, 1701 nt, Artificial Sequence; identical to SEQ ID NO: 128698
  derived and/or modified CDS sequence (opt3) from hemagglutinin__InfluenzaA__ABJ09360

SEQ ID NO: 129425 - RNA, 1701 nt, Artificial Sequence
  derived and/or modified CDS sequence (opt3) from hemagglutinin__InfluenzaA__ABJ09371
augaagaccaucauugcccugagcuacauacucugccuuguguucgcucagaaacugcccggcaacgacaauuccacagcaacuuuguguuuagggcaccaugccgucccuaacggaacgaucguuaagaccauuacaaaugaucaaaucgaggugacuaacgcgaccgaacugguacagucuucaaguacagguggcauuugcgacagcccacaccagauccuagauggggagaauuguacccucauagacgcucugcuuggagauccgcagugcgacggcuuucaaaacaaaaagugggaucuguucguggaaagauccaaagccuauucuaauuguuaccccuaugacgucccugauuacgcaucguugaggucacucaucgccagcagugguacucuggaguuuaacaaugaauccuucaacuggacaggggugacccagaauggaacgucuagcgcuugcaagcggcgcuccaacucaaguuucuucagccgacugaauuggcucacucauuuaaaguuuaaauauccagcacugaacguuaccaugcccaauaacgaggaguucgacaagcuguacauuuggggcgugcaccauccuggcacauauaacgaucagaucucuuuguacgcccaggcuuccgggcguauuacugucucaaccaaaagaagccaacagacagugaucccaaauauaggaaguaggcugcggguacgcgacauucccucuagaaucuccauuuacuggaccaucguuaagccuggugauauccuacucauuaacagcacgggcaaucugauagccccaaggggguauuuuaaaauccggucgggaaagucuuccauuaugcgcucagacgcgccgaucggcaaguguaacagugaaugcauaacucccaaugguagcauuccuaacgacaaaccauuccagaaugugaaccgaaucacauacggggcaugucccagauaugucaagcagaauacccuuaaacuggccacuggaaugaggaacgugccugagaagcaaacacggggcaucuuuggcgcuauugccggguucaucgaaaauggaugggaggguaugguggauggcugguacggguuucgucaccagaacuccgagggaauuggccaggcagcugacuugaaaucuacccaagccgcgauagaucagaucaaugguaagcucaaccgccugauugggaaaacgaaugaaaaguuccaccagaucgagaaggaauuuagcgaggucgaaggcagaauccaggacuuagagaaauauguugaggauaccaagauugaccuguggucauacaacgccgaacuccuuguggcacuggagaaccaacauacaauagauuugacugacagugaaaugaauaaacuauuugagaggaccaagaaacagcugcgggaaaacgcugaggauaugggaaauggcugcuucaagaucuaucacaagugugacaacgccugcauuggguccauccgaaauggaacauacgaucaugacguauaccgcgacgaggcucucaacaauagauuucagauuaaagguguggaacuuaagagcggcuauaaagauuggauccuuuggauaucuuucgccaucucaugcuuucuguugugugucgcacuccugggguucauuaugugggccugccagaagggaaacaucagguguaauauuugcaucuga

SEQ ID NO: 129426 - RNA, 1701 nt, Artificial Sequence; identical to SEQ ID NO: 128681
  derived and/or modified CDS sequence (opt3) from hemagglutinin__InfluenzaA__ABJ09382

SEQ ID NO: 129427 - RNA, 1701 nt, Artificial Sequence
  derived and/or modified CDS sequence (opt3) from hemagglutinin__InfluenzaA__ABJ16587
augaagaccaucauugcccugagcuacauauccugccucguguucgcucagaaacuucccggcaacgacaauucuacagcaacucuguguuuggggcaccaugccgucccuaacggaacguuaguuaagaccaucacaaaugaucaaauugaggugacuaacgcgaccgaacugguacagucaaguagcacagguagaaucugcgacuccccacaccagauucuagauggcgagaauuguacccucaucgacgcucugcuuggggauccgcauugcgacggauuucagaacaaagaaugggaucuguucguggagaggucuaaggccuauucgaauuguuaccccuaugacgucccugauuacgcaucauugcggagccucguggccaguuccggcacucuggaauuuaacaaugagucuuucaacuggacagguguugcucaaaaugggaccagcuccgcaugcaaacgccgaucaauaaagaguuucuucagccgucugaacuggcuccaccaguuaaaguauagauacccagcccugaaugugacgaugcccaacaaugacaaauuugauaaacuuuauaucuggggaguccaucacccuucuacugacuccgaucagaccucauuguacgcucaggccagcggcagggugacaguaaguacuaagcggucucaacagaccguuauuccaaacaucggcucccgccccugggugagaggggucagcucgaggauuucuaucuacuggacaauagugaagccuggagacauucugcuaaucaacuccaccgguaaucucauugcgccacggggcuauuucaaaauccgcucagggaagaguagcaucaugcgauccgacgcaccgauuggaaaguguaacucugagugcauaacgcccaauggcagcaucccuaacgauaaaccauuucagaaugugaacagaauuacuuacggugccugucccagguaugucaagcagaauacacugaaacuugcuaccgggaugcggaacguuccugaaaagcaaacucguggaaucuucggcgccauagcaggcuuuauugagaaugggugggaaggaaugauggacgguugguacggcuuccgccaccagaacucagaggggacaggacaggcugccgaucugaaaaguacccaagcggccaucaaucagaucaacggcaaguugaauagacucauugagaaaacgaacgaaaaguuucaucagaucgagaaggaauuuuccgagguggaagguaggauucaggaccuggagaaauauguagaggauaccaagauagacuuauggagcuacaaugcagaacugcucguggcucuugagaaccaacacacaaucgaucugacugacucugaaaugaacaaauuguucgagcggacccgaaagcagcuacgcgaaaaugccgaggauauggggaacggcugcuuuaaaauuuaucauaagugugacaaugcuugcaucggaucaaucagaaacggcacauacgaucacgacgucuacagggacgaggcccugaauaaccgguuccagauuaaggggguggaacucaaaaguggauauaaggauuggauacuguggaucagcuuugcaauuuccugcuuccuucuguguguuguguugcucgguuuuaucaugugggccugccagaaaggcaauauucgcuguaacaucugcauauga

SEQ ID NO: 129428 - RNA, 1701 nt, Artificial Sequence
  derived and/or modified CDS sequence (opt3) from hemagglutinin__InfluenzaA__ABJ16598
augaagaccaucauugcccugagcuacauacucugccuuguguucgcucagaaacugcccggcaacgacaauuccacagcaacuuuguguuuagggcaccaugccgucccuaacggaacgcugguuaagaccaucacaaaugaucaaauugaggugacuaacgcgaccgaacuuguacagucuucaaguacagguagaaucugcaauagcccacaccagauucucgacggcgagaacuguacccugaucgaugcucuacugggggacccgcauugcgauggauuucagaauaaagaaugggacuuguucguggagagguccaaggccuauucuaacuguuaccccuaugaugucccugacuacgcaucgcuccggucacugguggccagcaguggcacucuggaauuuaauaacgaguccuucaauuggacagguguugcucaaaacgggaccucuagcgcaugcaaacgccgauccauaaagucauuuuucagucgucucaauugguuacaccagcugaaguauaaauacccagcccuuaacgugacgaugcccaauaacgagaaguuugauaaauuguauaucuggggaguccaucacccuagcacugacucugaucagauuucccuguacgcucaggccucaggcagagugaccguaagcacaaagaggagucaacagacuguuaucccaaacauuggcucucggcccugggugcgcggggucuccagcagaaucucgauauacuggaccauugugaaaccuggagacauccuacucauuaauucuacagguaaccugaucgcgccaaggggcuauuucaagauccgguccgggaagucaaguauuaugcgcagcgaugcaccgauaggaaaauguaauuccgaaugcaucacccccaacggcucuauuccuaaugacaagccauuucagaacgugaaucgaaucacguacggugccugucccagauaugucaaacagaacacucuuaagcuggcuacagggaugaggaauguuccugagaaacaaacccggggaauauucggcgccauugcaggcuuuaucgaaaacgggugggagggaaugguggacgguugguacggcuuccgucaccagaauagcgaggggacuggacaggcugccgauuugaagucaacacaagcggccaucaaccagauuaauggcaaacucaaccgccugaucgaaaagaccaaugagaaguuucaucagauugaaaaagaguucagugaaguagaggguagaauacaggacuuagagaaguauguggaagauacgaaaaucgaccugugguccuacaacgcagagcuccuugucgcucuggaaaaccaacacaccauugauuugacagacagcgagaugaauaagcuauucgaaaggacuaaaaagcagcugcgggagaacgccgaggauauggggaauggcugcuuuaagaucuaucauaaaugugacaacgcuugcaucggaucuauucgaaauggcaccuacgaucacgacguguaccgcgaugaagcccucaacaauagauuccagauaaaggggguugagcugaaaucaggauauaaggacuggauccuuuggauuaguuuugcaaucagcugcuuccuguugugugugguccuccuggguuuuauuaugugggccugccagaaaggcaacaucagguguaauauaugcaucuga

SEQ ID NO: 129429 - RNA, 1701 nt, Artificial Sequence
  derived and/or modified CDS sequence (opt3) from hemagglutinin__InfluenzaA__ABJ16620
augaagaccaucauugcccugagcuacauacucugccuuguguucgcucagaaacugcccggcaacgacaauuccacagcaacuuuguguuuagggcaccaugccgucccuaacggaacgcugguuaagaccaucacaaaugaucaaauugaggugacuaacgcgaccgaauugguacagucuucaaguacagguagaaucugcaauagcccacaccagauucucgacggcgagaacuguacccugaucgaugcccuucugggggacccgcauugcgauggauuucagaauaaagaaugggacuuguucguggagaggaacaaggcuuauuccaauuguuaccccuaugaugucccugacuacgcaucucuccggucgcugguggccucaagcggcacucuggaauuuaacaaugagaguuucaacuggacagguguugcucaaaaugggaccuccucugcaugcaaacgccgaagcauaaaguccuuuuucucacgucucaacugguuacaccagcugaaguauaaauacccagcccuuaaugugacgaugcccaacaacgagaaguuugauaaauuguauaucuggggaguccaucacccuaguacugacagcgaucagauuucucuguacgcucaggccuccggcagagugaccguaucaacaaagaggagccaacagacuguuaucccaaauauuggcagucggcccugggugcgcggggucucuuccagaaucagcauauacuggaccauugugaaaccuggagacauccuacucauuaacucgacagguaaucugaucgcgccaaggggcuauuucaagauccggucugggaaguccucaauuaugcgcagugaugcaccgauaggaaaauguaacagcgaaugcaucacccccaauggcuccauuccuaacgacaagccauuucagaaugugaaccgaaucacguacggugccugucccagauaugucaaacagaauacucuuaagcuggcuacagggaugaggaacguuccugagaaacaaacccggggaauauucggcgccauugcaggcuuuaucgaaaaugggugggagggaaugguggacgguugguacggcuuccgucaccagaacucugaggggacuggacaggcugccgaucuaaagagcacacaagcggccaucaaucagauuaacggcaaacucaaucgccugaucgaaaagaccaacaagaaauuucaucagauugagaaggaguucucagaaguagaagguagaauacaggacuuagagaaauauguggaggauacgaagaucgaccuguggaguuacaacgcagaacuccuugucgcucuggagaaucaacacaccauugauuugacagacuccgaaaugaacaaacuauucgagaggacuaagaagcagcugcgggaaaaugccgaggauauggggaacggcugcuuuaaaaucuaucauaagugugacaaugcuugcaucggaagcauucgaaacggcaccuacgaucacgacguguaccgcgaugaggcccucaauaacagauuccagauaaaagggguugaacugaagucuggauauaaagacuggauccuuuggauuucauuugcaaucaguugcuuccuguugugugugguccuccuggguuuuauuaugugggccugccagaagggcaauaucagguguaacauaugcaucuga

SEQ ID NO: 129430 - RNA, 1701 nt, Artificial Sequence
  derived and/or modified CDS sequence (opt3) from hemagglutinin__InfluenzaA__ABJ16631
augaagaccaucauugcccugagcuacauacucugccuuguguucgcucagaaacugcccggcaacgacaauuccacagcaacuuuguguuuagggcaccaugccgucccuaacggaacgaucguuaagaccauuacaaaugaucaaaucgaggugacuaacgcgaccgaacugguacagucuucaaguacagguggcauuugcgacagcccacaccagauccuagauggggagaauuguacccucauagacgcucugcuuggagauccgcagugcgacggcuuucaaaacaaaaagugggaucuguucguggaaagauccaaagccuauucuaauuguuaccccuaugacgucccugauuacgcaucguugaggucacucaucgccagcagugguacucuggaguuuaacaaugaauccuucaacuggacaggggugacccagaauggaacgucuagcgcuugcaagcggcgcuccaacucaaguuucuucagccgacugaauuggcucacucauuuaaaguuuaaauauccagcacugaacguuaccaugcccaauaacgaggaguucgacaaacuuuacauuuggggcgugcaccauccuggcacauauaacgaucagaucucuuuguacgcccaggcuuccgggcguauuacugucucaaccaagagaagccaacagacagugaucccaaauauaggaaguaggccccggguacgcgacauuccuucuagaaucuccauuuacuggaccaucguuaagccaggugauauccugcuaauuaacagcacgggcaaucucauagccccgaggggguauuuuaaaauccggucgggaaagucuuccauuaugcgcucagacgcgcccaucggcaaguguaacagugaaugcauaacuccuaaugguagcauuccaaacgacaaacccuuccagaaugugaaccgaaucacauacggggcauguccuagauaugucaagcagaauacccugaaacuugccacuggaaugaggaacgugccagagaagcaaacacggggcaucuuuggcgcuauugccggguucaucgaaaauggaugggaggguaugguggauggcugguacggguuucgucaccagaacuccgagggaauuggccaggcagcugaccugaaaucuacccaagccgcgauagaucagaucaaugguaaguugaaccgccucauugggaaaacgaaugaaaaguuccaccagaucgagaaggaauuuagcgaggucgaaggcagaauccaggaccuggagaaauauguugaggauaccaagauugacuuauggucauacaacgccgaacugcucguggcacuugagaaccaacauacaauagaucugacugacagugaaaugaauaaauuguuugagaagaccaaaaagcagcuaagggaaaacgcugaggauaugggaaauggcugcuucaagaucuaucacaaaugugacaacgccugcauuggguccauccggaauggaacauacgaucaugacguauaccgagacgaggcucugaacaaucgcuuucagauuaaggguguggaacucaaaagcggcuauaaggauuggauccuguggauaucuuucgccaucucaugcuuucuucugugugucgcauugcucggguucauuaugugggccugccagaaaggaaacaucagauguaauauuugcaucuga

SEQ ID NO: 129431 - RNA, 1698 nt, Artificial Sequence
  derived and/or modified CDS sequence (opt3) from hemagglutinin__InfluenzaA__ABJ16664
augaaggugaaacugcucguccuucugugcaccuucacagccacuuacgcugacacgaucuguauuggcuaucacgcaaacaauagcaccgauacaguugacacuguguuggagaagaacguaaccgugacacauuccgucaauuuacuggaagauucucacaacgggaaacuaugccuccugaagggaauagcgccccuucagcuggguaauuguucaguggccggcuggaucuuggggaacccugagugcgaacuccugauuaguaaagagagcugguccuacaucguugaaaccccaaauccggagaacggaacuuguuaucccggccauuuugcugacuacgaggaacugagagagcaacucucuucggugagcucauucgaaagguuugagauuuucccuaaggagaguuccuggccaaaucacacagucaccggugugucugccagcugcucccauaacgggaagucaaguuuuuaucggaauuuacuguggcuuacgggcaaaaacggauuguaccccaaucugagcaagucuuaugcaaacaauaaagaaaaggagguucuaguacucuggggcgugcaccacccuccaaacaucggggaucagcgcgcccuguaccauacugaaaacgcuuacgucuccguggugucaagccacuauagucgacguuucacccccgagauagcaaaaagaccuaaggucagggaccaggaaggacggaucaauuacuauuggacacuucuggagccaggugauacuauuaucuuugaggccaacggcaauuugauugcuccgcgcuucgccuuugcgcucucuagaggguucggauccggcaucauaaccagcaacgcacccauggacgaaugugaugccaagugccagacaccucaaggugcuauuaauucgucucugccauuucagaacguucaucccgugaccaucggggaguguccuaaauacguaagguccgccaaguuacggauggugacgggacugcgcaauauuccaucaauccagagucgaggccucuucggcgcaaucgcuggguuuauugaaggagguuggacuggcauggucgacgggugguauggauaccaccaccagaacgagcaaggcagcgguuaugccgcggaucagaaauccacacagaaugccauaaacgggaucaccaauaaggugaacucuguuauugaaaagaugaauacucaguucacagcagugggcaaagaguucaacaaacuugagagaaggauggaaaaucugaacaagaaggucgacgauggauuuuuggacaucuggaccuacaacgcugagcuacuggugcuccuggaaaaugagcggacgcuugacuuccaugauagcaacguuaaaaaucuguacgaaaagguaaaaucacaauugaagaacaaugccaaagagauaggcaacgggugcuuugaguucuaucacaaguguaaugacgaaugcauggagagugugaagaacggaaccuacgauuaucccaaauacuccgaagagagcaagcucaaucgugagcgcauugacggugucaaacuggaaucuaugggcguguaucagaucuuagcuaucuacucaacagucgccaguagccuggugcuacucguuucccugggggcaauuucuuuuuggaugugcucgaacggaagccuucaguguagaaucugcauuuga

SEQ ID NO: 129432 - RNA, 1698 nt, Artificial Sequence; identical to SEQ ID NO: 129252
  derived and/or modified CDS sequence (opt3) from hemagglutinin__InfluenzaA__ABJ16675

SEQ ID NO: 129433 - RNA, 1698 nt, Artificial Sequence
  derived and/or modified CDS sequence (opt3) from hemagglutinin__InfluenzaA__ABJ16686
augaaggugaaacugcucguccuucugugcaccuucacagccacuuacgcugacacgaucuguauuggcuaucacgcaaacaauagcaccgauacaguugacacuguguuggagaagaacguaaccgugacacauuccgucaauuuacuggaagauucucacaacgggaaacuaugccuccugaagggaauagcgccccuucagcuggguaauuguucaguggccggcuggaucuuggggaacccugagugcgaacuccugauuaguaaagagagcugguccuacaucguugaaaccccaaauccggagaacggaacuuguuaucccggcuacuuugcugacuaugaggaacugagagagcaacucucuucggugagcucauucgaaagguuugagauuuucccuaaggagaguuccuggccaaaucauacagucaccggugugucugccagcugcucccacaacgggaagucaaguuuuuaccggaauuuacuguggcuuacgggcaaaaacggauuguaucccaaucugagcaagucuuacgcaaacaauaaagaaaaggagguucuaguacucuggggcgugcaucacccuccaaacaucggggaucagcgcgcccuguaccacacugaaaacgcuuaugucuccguggugucaagccauuacagucgacguuucacccccgagauagcaaaaagaccuaaggucagggaccaggaaggacggaucaauuauuacuggacacuucuggagccaggugauacuauuaucuuugaggccaacggcaauuugauugcuccgcgcuucgccuuugcgcucucuagaggguucggauccggcaucauaaccagcaacgcacccauggacgaaugugaugccaagugccagacaccucaaggugcuauuaauucgucucugccauuucagaacguucaccccgugaccaucggggaguguccuaaauauguaagguccgccaaguuacggauggcaacgggacugcgcaauauuccaucaauccagagucgaggccucuucggcgcuaucgccggguuuauugaaggagguuggacuggcaugguggacgggugguacggauaucaucaccagaacgagcaaggcagcgguuacgcggccgaucagaaauccacacagaaugcaauaaacgggaucaccaauaaggucaacucugugauugaaaagaugaauacucaguucacagcuguuggcaaagaguucagcaaacuugagagaaggauggaaaaccugaauaagaagguggacgauggauuuuuggacaucuggaccuacaacgccgagcuacugguccuccuggaaaacgagcggacgcuugacuuccacgauucaaaugugaaaaaccuguaugaaaagguaaaaagucaauugaagaauaacgcuaaagagauaggcaaugggugcuuugaguucuaccauaaguguaacgacgaaugcauggaguccguuaagaauggaaccuaugauuaccccaaauauagcgaagagucuaagcucaaccgugagaaaauugacggugugaagcuggaaucaaugggcgucuaccagaucuuagccaucuauaguacaguggcaagcucccugguccuacucgugucucugggggccauuucguuuuggaugugcagcaauggaucccuucagugucgcaucugcauuuga

SEQ ID NO: 129434 - RNA, 1701 nt, Artificial Sequence
  derived and/or modified CDS sequence (opt3) from hemagglutinin__InfluenzaA__ABJ16697
augaagaccaucauugcccugagcuacauacucugccuuguguucgcucagaaacugcccggcaacgacaauuccacagcaacuuuguguuuagggcaccaugccgucccuaacggaacgcugguuaagaccaucacaaaugaucaaauugaggugacuaacgcgaccgaacuuguacagucuucaaguacagguggcaucugcgacagcccacaccagauucucgauggggagaauuguacccugaucgacgcucuacugggagauccgcauugcgacggcuuucagaacaaagaaugggauuuguucguggagagauccaaggccuauucuaauuguuaccccuaugacgucccugauuacgcaucgcucaggucacugguggccagcagugguacucuggaauuuaacaaugaguccuucaacuggacagggguugcucaaaauggaaccucuagcgcaugcaaacggcgcuccaacaagucauuuuucagucgacucaauugguuacaccagcugaaguauaaauacccagcccuuaacgugacgaugcccaauaacgagaaguuugacaaauuguauauauggggcguccaucacccuagcacugauucugaccagaucucccuguacgcucaggccccaggccgugugaccguaucaacaaagagaagccaacagacuguuauucccaacaucgggaguaggccuugggugcggggagucucuucccgcauuagcaucuacuggaccauagugaaaccaggugauauucuacucaucaauuguacaggcaaccugauugcgccgagaggguauuucaagaucaggucgggaaagucuuccaucaugcggucagacgcaaguauuggcaaaugcaauagcgaauguauaacccccaacgguuccaucccuaaugacaagccauuucagaacgugaaucgcauuacguacggggccugcccccgauaugucaaacagaacacucuuaagcuggcuacaggaaugagaaauguuccugagaaacaaaccaggggcaucuucggcgccauagcaggguuuauugaaaacggaugggaggguaugguggauggcugguacggguuccggcaccagaauagcgagggaacuggccaggcugccgacuugaagucuacacaagcggccaucaaccagaucaaugguaaacucaaccgucugauugaaaagaccaaugagaaguuucaucagaucgaaaaagaguucucagaaguagaggggcgcauucaggauuuagagaaguauguggaagacacgaaaauagaucuguggaguuacaacgcagagcuccuugucgcucuggaaaaccaacacaccaucgacuugacagauuccgagaugaauaagcuauucgaaagaacuaaaaagcagcugagggagaacgccgaggacaugggcaauggauguuuuaagauuuaucauaaaugcgauaacgcuugcaucggcagcauccggaaugggaccuacgaccacgauguguaccgagacgaagcccucaacaaucgcuuccagauuaagggaguugagcugaaaucugguuauaaggacuggauacuuuggaucucauuugcaauuaguuguuuccuguugugcgccgugcuccugggcuuuaucaugugggcuugucagaaagggaacauuagaugcaauaucuguauauga

SEQ ID NO: 129435 - RNA, 1701 nt, Artificial Sequence
  derived and/or modified CDS sequence (opt3) from hemagglutinin__InfluenzaA__ABJ16730
augaaggccaaacugcucgugcuucugugcgcuuucaccgcaacauacgccgacacuaucuguauuggcuaucacgcgaacaauagcacggauaccgucgacacaguuuuggagaagaacgugacuguaacccauuccgugaauuuacuggaagauucucacaacgggaaacuaugcagacucaagggaacagcuccccugcagcuugguaauuguucaauagccggcuggauccuggggaacccugagugcgaaaguuuguuuagcaaagaguccuggucuuacauugcagaaaccccaaauccgaagaacggaacuuguuaucccggcuacuucgccgacuaugaggagcucagggaacaacugucgucagucagcaguuuugagcgguucgaaaucuuuccuaaggauuccucuuggccaaaucauacagugaccaaagguguuacggcuagcugcucccacaacgggaagucaaguuucuacaaaaaucugcucugguuaacugagaagaacggacuguaucccaaucuuagcaaaucuuacgugaacaagaagggcaaagaggucuuggugcuguggggcguacaucacccuuccaauaugggggaccagcgcgcaauuuaccacaaggaaaacgccuauguuucagugcuaagcagucauuacucucgacguuuuaccccagagaucgcuagaaggcccaaaguccgggaucaggaaggacgcauaaacuauuacuggacacuccuggagccuggugacacuaucauuuucgaagccaauggcaaccuuaucgcgccaugguaugcauuugcccuguccagaggguucggaagcggcauuaucauaucgaaugcuucuaugggugagugugaugccaagugccagaccccgcaaggggcaauuaacuccucauugcccuuucagaaugugcacccugugacaaucggagaguguccaaaauacgucaggaguaccaagcuccggaugguuacgggccugcgcaacgugcccagcauucagucccgaggcuuauucggggcuaucgccggauuuaucgaagguggcuggacugggaugauugacggaugguauggcuaccaucaccagaaugagcaagguucuggguacgcggccgaucagaaaagcacacagaacgcaauaaauggcaucaccaacaagguaaauucaauuaucgaaaagaugaacacucaguucacagcugugggaaaagaguucaauaagcuggaaagaaggauggagaaccucaauaaaaaggucgacgauggcuuucuugacauauggaccuauaacgccgagcuguuggugcuacuggaaaacgagcggacgcucgacuuccacgauaguaauguuaaaaaccuguacgaaaaggugaagaaucaacuuaaaaacaaugcuaaggagauugggaacggaugcuuugaguucuaucauaaauguaauaacgaaugcauggaguccgucaagaaugguaccuacgacuauccuaaauacagcaaggaaucuaagcugaaccgugagaaaaucgauggcgugaaguuggaaucaauggggguauaucagauccucgccauuuacaguacaguugcaagcucccugguguuacuggucucucuaggagccaucucguuuuggaugugcagcaauggcucccuccagugucgcauuugcauauga

SEQ ID NO: 129436 - RNA, 1701 nt, Artificial Sequence
  derived and/or modified CDS sequence (opt3) from hemagglutinin__InfluenzaA__ABJ16741
augaagaccaucauugcccugagcuacauacucugccuuguguucgcucagaaacugcccggcaacgacaauuccacagcaacuuuguguuuagggcaccaugccgucccuaacggaacgcugguuaagaccaucacaaaugaucaaauugaggugacuaacgcgaccgaacuuguacagucuucaaguacagguggcaucugcgacagcccacaccagauucucgauggggagaauuguacccugaucgacgcucuacugggagauccgcauugcgacggcuuucagaacaaagaaugggauuuguucguggagagauccaaggccuauucuaauuguuaccccuaugacgucccugauuacgcaucgcucaggucacugguggccagcagugguacucuggaauuuaacaaugaguccuucaacuggacagggguugcucaaaauggaaccucuagcgcaugcaaacggcgcuccaacaagggcuuuuucucacgacucaauugguuacaccagcugaaguauaaauacccagcccuuaacgugacgaugcccaauaacgagaaguuugacaaauuguauauauggggcguccaucacccuaguacugauagcgaccagaucucucuguacgcucaggccccagggcgugugaccguauccacaaagagaucacaacagacuguuauucccaacaucggaagcaggccuugggugcggggugucaguucuauuaucuccauauacuggaccauugugaaaccaggcgauauccuacucauuaauuguacagggaaccugaucgcgccgcgcggauauuucaagaucagaagcggcaagucgucuauuaugagguccgacgcaucaauagguaaaugcaauagugaauguaucacccccaacgggagcauuccuaaugacaagccauuucagaacgugaaucggaucacguacggagccugcccccgcuaugucaaacagaacacucuuaagcuggcuacaggcaugcgaaauguuccugagaaacaaaccagaggcauauucggggccauugcaggauuuaucgaaaacgguugggagggcaugguggaugggugguacggauucaggcaccaaaauuccgagggcacuggucaggcugccgacuugaagucuacacaggcggccaucaaccagauuaaugggaaacucaaccggcugaucggcaagaccaaugaaaaguuucaucagauugagaaagaguucagcgaaguagaaggacguauacaggauuuagagaaguauguggaggacacgaaaaucgaucuguggucauacaacgcagaacuccuugucgcucuggagaaccaacacaccauugacuugacagauagugaaaugaauaagcuauucgagcgcacuaaaaagcagcugagagaaaacgccgaggacaugggcaauggguguuuuaagaucuaucauaaaugcgauaacgcuugcaucggauccauuaggaaugguaccuacgaccacgauguguaccgggacgaggcccucaacaaucgauuccagauaaagggcguugaacugaaaagcggguauaaggacuggauccuuuggauuucuuuugcaaucucauguuuccuguugugcgugguccuccugggauuuauuaugugggccugucagaaaggcaacauccgcugcaauauauguaucuga

SEQ ID NO: 129437 - RNA, 1701 nt, Artificial Sequence
  derived and/or modified CDS sequence (opt3) from hemagglutinin__InfluenzaA__ABJ16752
augaagaccaucauugcccugagcuacauacucugccuuguguucgcucagaaacugcccggcaacgacaauuccacagcaacuuuguguuuagggcaccaugccgucccuaacggaacgcugguuaagaccaucacaaaugaucaaauugaggugacuaacgcgaccgaacuuguacagucuucaaguacagguggcaucugcgacagcccacaccagauucucgauggggagaauuguacccugaucgacgcucuacugggagauccgcauugcgacggcuuucagaacaaagaaugggauuuguucguggagagauccaaggccuauucuaauuguuaccccuaugacgucccugauuacgcaucgcucaggucacugguggccagcagugguacucuggaauuuaacaaugaguccuucaacuggacagggguugcucaaaauggaaccucuagcgcaugcaaacggcgcuccaacaagucauuuuucagucgacucaauugguuacaccagcugaaguauaaauacccagcccuuaacgugacgaugcccaauaacgagaaguuugacaaauuguauauauggggcguccaucacccuagcacugauucugaccagaucucccuguacgcucaggccccaggccgugugaccguaucaacaaagagaagccaacagacuguuauucccaacaucgggaguaggccuugggugcggggagucucuuccgguauuagcaucuacuggaccauagugaaaccaggcgauauucuacucaucaauuguacagggaaccugauugcgccgcgcggauauuucaagaucagaucgggcaagucuuccaucaugaggucagacgcaaguauugguaaaugcaauagcgaauguauaacccccaacggguccaucccuaaugacaagccauuucagaacgugaaucggauuacguacggagccugcccccgcuaugucaaacagaacacucuuaagcuggcuacaggcaugcgaaauguuccugagaaacaaaccagaggcaucuucggggccauagcaggauuuauugaaaacgguugggagggcaugguggaugggugguacggauucaggcaccagaauagcgagggcacuggucaggcugccgacuugaagucuacacaagcggccaucaaccagaucaaugggaaacucaaccggcugauugaaaagaccaaugagaaguuucaucagaucgaaaaagaguucucagaaguagagggccguauucaggauuuagagaaguauguggaagacacgaaaauagaucuguggaguuacaacgcagagcuccuugucgcucuggaaaaccaacacaccaucgacuugacagauuccgagaugaauaagcuauucgaacgcacuaaaaagcagcugagagagaacgccgaggacaugggaaauggcuguuuuaagauuuaucauaaaugcgauaacgcuugcaucgggagcaucaggaauggaaccuacgaccacgauguguaccgggacgaagcccucaacaaucgauuccagauuaaggguguugagcugaaaucuggcuauaaggacuggauacuuuggaucucauuugcaauuaguuguuuccuguugugcgugguccuccugggguuuaucaugugggccugucagaaaggaaacauucgcugcaauaucuguauauga

SEQ ID NO: 129438 - RNA, 1701 nt, Artificial Sequence
  derived and/or modified CDS sequence (opt3) from hemagglutinin__InfluenzaA__ABJ16763
augaagaccaucauugcccugagcuacauacucugccuuguguucgcucagaaacugcccggcaacgacaauuccacagcaacuuuguguuuagggcaccaugccgucccuaacggaacgcugguuaagaccaucacaaaugaucaaauugaggugacuaacgcgaccgaacuuguacagucuucaaguacagguggcaucugcgacagcccacaccagauucucgauggggagaauuguacccugaucgacgcucuacugggagauccgcauugcgacggcuuucagaacaaagaaugggauuuguucguggagagauccaaggccuauucuaauuguuaccccuaugacgucccugauuacgcaucgcucaggucacugguggccagcagugguacucuggaauuuaacaaugaguccuucaacuggacagggguugcucaaaauggaaccucuagcgcaugcaaacggcgcuccaacaagucauuuuucagucgacucaauugguuacaccagcugaaguauaaauacccagcccuuaacgugacgaugcccaauaacgagaaguuugacaaauuguauauauggggcguccaucacccuagcacugauucugaccagaucucccuguacgcucaggccccaggccgugugaccguaucaacaaagagaagccaacagacuguuauucccaacaucgggaguaggcacugggugcggggagucucuucccgcauuagcaucuacuggaccauagugaaaccuggugauauucuacucaucaauuguacaggcaaccugauugcgccaagaggguauuucaagaucaggucgggaaagucuuccaucaugcggucagacgcaaguauuggcaaaugcaauagcgaauguauaaccccgaacgguuccauccccaaugacaagccuuuucagaacgugaaucgcauuacguacggggccugcccacgauaugucaaacagaacacucuuaagcuggcuacaggaaugagaaauguucccgagaaacaaaccaggggcaucuucggcgccauagcaggguuuauugaaaacggaugggaggguaugguggauggcugguacggguuccggcaucagaauagcgagggaacuggccaggcugccgacuugaagucuacacaagcggccaucaaccagaucaaugguaaacucaaccgucugauugaaaagaccaaugagaaguuucaccagaucgaaaaagaguucucagaaguagaggggcgcauucaggauuuagagaaguauguggaagacacgaaaauagaucuguggaguuacaacgcagagcuccuugucgcucuggaaaaccaacauaccaucgacuugacagauuccgagaugaauaagcuauucgaaagaacuaaaaagcagcugagggagaacgccgaggacaugggcaauggauguuuuaagauuuaucacaaaugcgauaacgcuugcaucggcagcauccggaaugggaccuacgaccacgauguguaccgagacgaagcccucaacaaucgcuuccagauuaagggaguugagcugaaaucugguuauaaggacuggauacuuuggaucucauuugcaauuaguuguuuccuguugugcgugguccuccugggcuuuaucaugugggccugucagaaagggaacauuagaugcaauaucuguauauga

SEQ ID NO: 129439 - RNA, 1701 nt, Artificial Sequence
  derived and/or modified CDS sequence (opt3) from hemagglutinin__InfluenzaA__ABJ16774
augaagaccaucauugcccugagcuacauacucugccuuguguucgcucagaaacugcccgucaacgacaauuccacagcaacuuuguguuuaggccaccaugccguuccuaacgggacgcuggugaagaccaucacaaaugaucacauugagguaacuaacgcgaccgaacuugugcaaucuucaccaacaggaagaaucugcgacaguccgcaucagauucucgauggugagaauuguacccugaucgacgcucuacugggcgauccccacugcgacggguuucagaacaaagaaugggauuuguucgucgagaggagcacugccuauuccaauuguuacccuuaugacgugccagauuacgcaucucuccggucgcugguugccucaagcggaacacuggaauuuaacaaugagaguuucaacuggaccggcguggcucagaaugguacguccucugcaugcaagcgccgaagcauaaaauccuuuuucucacgucucaacugguuacaucaacugaaguauaaguaccccgcccuuaaugucacuaugccuaacaaugagaaauuugacaaguuguauaucuggggagugcaccacccaaguaccgauagcgaccagauuucucuguacgcucaggccuccgggagaguaacaguuucaacuaaaaggagccagcaaaccgugauccccaacauuggcaguggcccuuggguccgcggggugucuucccggaucagcauauacuggacaauugugaagccaggagauauccuacucauuaacucgaccgguaaucugaucgcgccgagaggcuauuucaaaaucaggaacgggaagucuuccauuaugcggucaaauacgcccauaggaaaguguaacagugaaugcaucacuccuaauggcagcauuccaaacgacaaacccuuucagaaugucaaccgcaucacauacggugcauguccucgauauguuaagcagaauacccuuaaacuggccacugggaugagaaacgugccagagaagcagacaaggggaauauucggcgcuauugccggcuuuaucgaaaaugggugggagggaaugguagacgguugguacggcuuccggcaucaaaacuccgaggggaccggacaggcagcugauuugaaaucuacgcaggccgcgaucaaucaaauuaacggcaagcucaaucgucugaucgagaaaaccaacgaaaaguuucaccagauugaaaaggaguucagcgaaguggagggucgcauacaggacuuagagaaauaugucgaagauacaaagaucgaccuguggucauacaacgccgagcuccuuguggcacuggaaaaucagcauacuauugauuugaccgacagugagaugaacaaacuauucgaaagaacaaggaagcaacugcgggagaaugcugaggauauggggaacggcugcuuuaaaaucuaucacaagugugacaaugccugcaucggauccauucgaaacggcacuuacgaucacgacguuuaccgcgaugaagcucucaauaacagauuccagauaaaggggguggagcugaaaagcggauauaaggacuggauccuuuggauuucuuuugccaucucaugcuuccuguugugugucgugcuccuggguuuuauuaugugggcaugccagaaaggcaauaucagguguaacauaugcaucuga

SEQ ID NO: 129440 - RNA, 1701 nt, Artificial Sequence
  derived and/or modified CDS sequence (opt3) from hemagglutinin__InfluenzaA__ABJ16785
augaagaccaucauugcccugagcuacauacucugccuuguguucgcucagaaacugcccggcaacgacaauuccacagcaacuuuguguuuagggcaccaugccgucccuaacggaacgcugguuaagaccaucacaaaugaucaaauugaggugacuaacgcgaccgaacuuguacagucuucaaguacagguggcaucugcgacagcccacaccagauucucgauggggagaauuguacccugaucgacgcucuacugggagauccgcauugcgacggcuuucagaacaaagaaugggauuuguucguggagagauccaaggccuauucuaauuguuaccccuaugacgucccugauuacgcaucgcucaggucacugguggccagcagugguacucuggaauuuaacaaugaguccuucaacuggacagggguugcucaaaauggaaccucuuaugcaugcaaacggcgcagcaacaaguccuuuuucucacgacucaauugguuacaccagcugaaguacaaauauccagcccuuaacgugacgaugcccaauaacgagaaguuugacaaauuguacauauggggcguccaucacccuaguacugauagcgaccagaucucucuguacgcucaggccccaggccgugugaccguauccacaaagagaucacaacagacuguuauucccaacaucgggagcaggccuugggugcggggagucaguucucgcauuuccaucuauuggaccauagugaaaccaggugauauucuacucaucaauuguacaggcaaccugauugcgccgagaggguacuucaagaucaggagcggaaagucgucuaucaugcgguccgacgcaucaauuggcaaaugcaauagugaauguauaacccccaacgguagcaucccuaaugacaagccauuucagaacgugaaucgcauuacguauggggccugcccccgauacgucaaacagaacacucuuaagcuggcuacaggaaugagaaauguuccugagaaacaaaccaggggcaucuucggcgccauagcaggguuuauugaaaacggaugggaggguaugguggauggcugguauggguuccggcaccaaaauuccgagggaacuggccaggcugccgacuugaagucuacacaggcggccaucaaccagaucaaugguaaacucaaccgucugauugaaaagaccaaugagaaguuucaucagaucgaaaaagaguucagcgaaguagaggggcgcauucaggauuuagagaaguacguggaagacacgaaaauagaucuguggucauauaacgcagagcuccuugucgcucuggaaaaccaacacaccaucgacuugacagauagugagaugaauaagcuauucgaaagaacuaaaaagcagcugagggagaacgccgaggacaugggcaauggauguuuuaagauuuaccauaaaugcgauaacgcuugcaucggcuccauccggaaugggaccuacgaccacgauguguaucgagacgaagcccucaacaaucgcuuccagauuaagggaguugagcugaaaagcgguuacaaggacuggauacuuuggaucucuuuugcaauuucauguuuccuguugugcgugguccuccugggcuuuaucaugugggccugucagaaagggaacauuagaugcaauaucuguauauga

SEQ ID NO: 129441 - RNA, 1701 nt, Artificial Sequence; identical to SEQ ID NO: 128958
  derived and/or modified CDS sequence (opt3) from hemagglutinin__InfluenzaA__ABJ53438

SEQ ID NO: 129442 - RNA, 1698 nt, Artificial Sequence; identical to SEQ ID NO: 128790
  derived and/or modified CDS sequence (opt3) from hemagglutinin__InfluenzaA__ABJ53449

SEQ ID NO: 129443 - RNA, 1701 nt, Artificial Sequence
  derived and/or modified CDS sequence (opt3) from hemagglutinin__InfluenzaA__ABJ53471
augaagaccaucauugcccugagcuacauacucugccuuguguucgcucagaaaauccccggcaacgacaauuccacagcaacucuguguuuggggcaccaugccgucccuaacggaacgauuguuaagaccaucacaaaugaucaaauugaggugacuaacgcgaccgaauuaguacagucuucaaguacagguggcaucugcgacagcccacaccagauacuggauggggagaauuguacccuaaucgacgcucuccugggagauccgcagugcgacggcuuucaaaacaaaaagugggaucuuuucguggaaagauccaaagccuauucuaauuguuaccccuaugacgucccugauuacgcaucgcugaggucauugguggccagcagugguacucucgaguuuaacaaugaauccuucaacuggacagggguuacccagaauggaacgucuagcgcuugcaagcggggcuccaacaauucauuuuucagucgccugaacuggcugacucaucucaaguuuaaauauccagcauuaaaugugaccaugcccaacaacgagaaguucgacaaacuguacauuuggggcguccaccauccugggacagauaaugaccagaucuuucuuuaugcccaggcuagcggacgaauuacugugucuaccaagcguucccaacagacaguaaucccaaacauagguucaagacccaggguucggaauauuccuagccgcaucaguauuuacuggaccaucgugaaaccaggcgauaucuugcugauuaacucuacggggaaucuaauagccccgagaggauacuucaagaucagguccggcaagagcucgauuaugcggucugacgcgcccaucgguaaauguaacuccgagugcauaacuccuaaugggucaauuccaaacgacaagcccuuucagaaugucaaccgcaucacauauggagcauguccucgauacgugaaacagaauacccucaagcuggccacuggcaugagaaacgugccagaaaaacaaacaaggggcaucuucggggcuauugccggauuuaucgagaaugguugggaaggcauggucgaugggugguauggauuccggcaccagaacagugagggcauuggucaggcagcugaccuuaagagcacccaagccgcgauaaaucagaucaacgggaaacugaaccguuugauuggcaagacgaaugagaaguuccaccagaucgaaaaagaguuuuccgaaguugagggacgcauccaggaucucgaaaaguacguggaggacaccaaaauugaucuguggucuuauaacgccgaguuacugguagcacucgaaaaucaacauacaauagaccuuacugauagcgagaugaacaagcuguucgaaagaaccaaaaagcaguugagggagaaugcugaagacaugggcaacgggugcuuuaagaucuaccacaaaugugauaaugccugcauuggaucaauccggaacgguacauaugaccaugauguguaccgagacgaggcucuaaauaaccgcuuccagauuaagggcgucgagcugaaaaguggguacaaggacuggauccucuggauauccuuugccaucagcugcuuccugcuuuguguggcacuguugggauuuauuaugugggccugccagaaaggcaauaucagauguaacauuugcaucuga

SEQ ID NO: 129444 - RNA, 1701 nt, Artificial Sequence
  derived and/or modified CDS sequence (opt3) from hemagglutinin__InfluenzaA__ABJ53482
augaagaccaucauugcccugagcuacauacucugccuuguguucgcucagaaacugcccggcaacgacaauuccacagcaacuuuguguuuagggcaccaugccgucccuaacggaacgaucguuagaaccauuacaaaugaucaaaucgaggugacuaacgcgaccgaacugguacagucuucaaguacaggugagauuugcgacagcccacaccagauccuagauggcgaaaauuguacccucauagacgcucugcuuggggauccgcagugcgacggauuucaaaacaagaaaugggaucuguucguggagagguccaaggccuauucuaauuguuaccccuaugacgucccugauuacgcaucguugcggucacucguggccagcaguggcacucuggaauuuaacaaugaguccuucaacuggacagguguuacccagaaugggacgucuagcgcuugcaaacgccgauccaacaauucauuuuucagucgucugaacuggcucacucauuuaaaguuuaaguauccagcacugaaugugaccaugcccaacaacgagaaauucgacaaguuguacaucuggggaguccaccauccuggcacagauaaugaccagauuuuucuuuaugcccaggcuagcggcagaaucacugugucuaccaaaaggucccaacagacaguaauuccaaacaucgggucacggccccgcguuagaaauauaccuagcaggauuaguaucuacuggaccauugugaagccaggagauauccugcuaaucaacucuacggguaaucucauugccccgcggggcuacuucaaaauacgcuccggaaagagcucgaucaugcgaucugacgcgcccauugggaaguguaacuccgaaugcaucacuccuaauggcucaauaccaaacgacaaacccuuucagaaugucaacagaauuacauauggugcauguccuagguacgugaagcagaauacccugaaacuugccacugggaugcggaacgugccagagaagcaaacacguggaaucuucggcgcuaucgccggcuuuauugaaaaugggugggagggaauggucgaugguugguauggcuuccgccaccagaacagugaggggaucggacaggcagcugaccugaaaagcacccaagccgcgauuaaucagauaaacggcaaguugaacagacucaucgguaaaacgaaugaaaaguuccaccagauugagaaggaauuuuccgagguugaagggaggauccaggaucuggagaaauacguggaggacaccaagaucgauuuauggucuuauaacgccgaacugcucguagcacuugagaaucaacauacaauugaccugacugauagcgaaaugaacaaauuguucgagcggaccaagaaacagcuacgagaaaaugcugaggacaugggcaacggaugcuuuaagauauaccacaagugugauaaugccugcaucggcucaauucgcaacgggacauaugaccaugauguguacagagacgaggcucugaauaacagguuccagaucaaaggagucgaacucaagagugguuacaaagacuggauucuguggaucuccuuugccauaagcugcuuccuucuguguguggcauugcucggcuuuaucaugugggccugccagaaggggaauauucgguguaacaucugcauuuga

SEQ ID NO: 129445 - RNA, 1698 nt, Artificial Sequence; identical to SEQ ID NO: 129280
  derived and/or modified CDS sequence (opt3) from hemagglutinin__InfluenzaA__ABJ53493

SEQ ID NO: 129446 - RNA, 1698 nt, Artificial Sequence
  derived and/or modified CDS sequence (opt3) from hemagglutinin__InfluenzaA__ABJ53504
augaaggccaaacugcucgugcuucugugcaccuucacagcuacuuacgcagacacgaucuguauuggcuaucacgccaacaauagcaccgauacagucgacacuguuuuggagaagaacgugaccguaacacauuccgugaauuuacuggaagauucucacaacgggaaacuaugccuccugaagggaauagcgccccuucagcuggguaauuguucagucgcuggcuggaucuuggggaacccugagugcgaaagucucauuagcaaagaguccuggucuuacaucguggaaaccccaaauccggagaacggaacuuguuaucccggcuacuuugccgacuaugaggaacugagagagcaacugucgucaguuagcaguuucgaaagguuugagauuuucccuaaggaguccucuuggccaaaucauacagugaccggugucagcgcauccugcucacacaacgggaagaguagcuuuuaccggaaucucuuauggcugacggagaaaaacggacuuuaucccaauuugucuaaguccuacgugaacaauaaagaaaaggaaguacugguucuauggggcgugcaucacccuucaaacaucggcguccagcgcgccauauaccacacugagaacgcuuaugugagcguggucaguucucauuacucccgacguuucaccccagaaaucgcaaaaagacccaagguuagggaucaggaggggcggauuaauuauuacuggacacuccuggagccuggagacacuaucauuuuugaagccaacgguaaucuuaucgcuccaugguaugccuucgcgcugagccgcggcuuugagucggggauaauuaccucuaacgcaccgaugaaugaaugugaugccaagugccagacacccuugggagcuaucaacuccucacucccuuuccaaaaugugcacccaguaaccauuggcgagugucccaaauacgugagaagugccaagcugaggauggucacggguuuacggaacaucccuagcauccagucccgcgggcuguuuggagcaauugcuggcuucauagaaggcggguggacuggaaugaucgacgguugguauggcuaccaucaccagaaugagcaggggucuggauacgccgcggaucagaaaagcacacaaaacgccauuaauggcaucaccaacaagguaaauucaguuauagagaaaaugaacacucaguuuacagcaguggguaaggaguucaauaaacucgaacgaagaauggaaaaccuuaacaagaaggucgacgauggguuccuggacauuuggaccuauaaugcugaguugcuagugcugcucgaaaacgagaggacgcuggauuuucacgacaguaaugugaaaaaccuuuacgagaagguuaaaucccagcugaagaauaacgccaaagaaaucggcaauggaugcuucgaguuuuaucauaaguguaacaaugaaugcauggagagcgugaagaacggcaccuacgacuauccaaaauacucugaggaaucaaaguugaaucgggagaaaaucgauggggucaagcucgaaaguaugggaguguaucaaauucuggcuaucuacagcacagucgccuccucuuuagugcugcuaguuucgcucggugcaauuagcuucuggaugugcuccaacggcucacugcagugucguauaugcaucuga

SEQ ID NO: 129447 - RNA, 1701 nt, Artificial Sequence; identical to SEQ ID NO: 129435
  derived and/or modified CDS sequence (opt3) from hemagglutinin__InfluenzaA__ABJ53515

SEQ ID NO: 129448 - RNA, 1701 nt, Artificial Sequence
  derived and/or modified CDS sequence (opt3) from hemagglutinin__InfluenzaA__ABK39962
augaagaccaucauugcccugagcuacauacucugccuuguguucgcucagaaacugcccggcaacgacaauuccacagcaacuuuguguuuagggcaccaugccgucccuaacggaacgcugguuaagaccaucacaaaugaucaaauugaggugacuaacgcgaccgaacuuguacagucuucaaguacagguagaaucugcgacagcccacaccagauucucgauggcgagaauuguacccugaucgacgcucuacugggggauccgcauugcgacggauuucagaacaaagaaugggauuuguucguggagagguccaaggccuauucuaauuguuaccccuaugacgucccugauuacgugucgcuccggucacugguugcaagcaguggcacucuggaauuuaacaaugaguccuucaacuggacagguguggcccaaaaugggaccucuagcgcuugcaaacgccgauccgacaagucauuuuucagucgucucaacugguuacaccagcugaaguauaaauacccagcacuuaaugucacgaugcccaacaaugagaaguuugauaaauuguauauauggggagugcaucacccuggcacugacagcgaucagaucucucuguacgcccaggcuuccggcagaguaaccguuucaacaaagaggagccaacagacugugauuccaaacaucgggagucggcccuggguccgcggagugucuuccagaauuagcaucuacuggaccauagugaaaccuggugacauucuacucaucaacucgacaggcaaucugauugccccaaggggguauuucaagauccggucuggaaaguccucaaucaugcgcagugacgcgccgauuggcaaauguaacagcgaaugcauaacccccaaugguuccaucccuaacgauaagccauuucagaaugucaaccgaauuacguacggggcaugucccagauauguuaaacagaagacucuuaaacuggccacaggaaugaggaaugugccugagaagcaaacccggggcaucuucggcgcuauagccggguuuauugaaaacggaugggaggguaugauggacggcugguacggguuccgucaccaaaauucugagggaacuggccaggcagcugauuugaaaagcacacaggccgcgaucaaccagaucaaugguaagcucaaccgccugauugaaaagaccaaugagaaauuucaucagaucgaaaaggaguucucagaaguagaggggaggauucaggacuuagagaaauauguggaagauacgaagauagaccuguggaguuacaacgccgagcuccuugucgcacuggaaaaucaacacaccaucgauuugacagacuccgagaugaacaaacuauucgaaagaacuaagaagcagcugcgggagaacgcugaggauaugggcaauggaugcuuuaaaauuuaucauaagugugacaacgccugcaucggcagcauccgaaaugggaccuacgaucacgacguguaccgcgacgaagcucucaacaauagauuccagauuaaaggaguugagcugaagucugguuauaaagauuggauacuuuggaucucauuugccauuaguugcuuccuguuguguaucgugcuccugggcuuuauuaugugggcaugccagaaggggaacaucagguguaauauaugcaucuga

SEQ ID NO: 129449 - RNA, 1701 nt, Artificial Sequence; identical to SEQ ID NO: 128678
  derived and/or modified CDS sequence (opt3) from hemagglutinin__InfluenzaA__ABK39973

SEQ ID NO: 129450 - RNA, 1701 nt, Artificial Sequence
  derived and/or modified CDS sequence (opt3) from hemagglutinin__InfluenzaA__ABK39984
augaagaccaucauugcccugagcuacauacucugccuuguguucgcucagaaacugcccggcaacgacaauuccagagcaacauuguguuuagggcaccaugccgucccuaacggaacuaucguuaagacgauuaccaaugaucaaaucgaggugacaaacgcgacugaacugguacagucuucaaguaccgguggcauuugcgacagcccacaccagauccuagauggggagaauuguacacucauagacgcucugcuuggagauccgcagugcgacggcuuucaaaacaaaaagugggaucuguucguggaaagguccaaagccuauucuaauuguuaccccuaugacgucccugauuacgcaucguugcggucacucguggccagcagugguacccuggaguuuaacaaugaauccuucaacuggacugggguuacacagaauggaaccucuagcgcuugcaagcgccgauccaacaauucauuuuucagucgucugaacuggcucacgcauuuaaaguuuaaauauccagcacugaaugugacuaugcccaacaacgagaaguucgacaaacuuuacaucuggggcguccaccauccuggcaccgauaaugaccagaucuuuuuguaugcccaggcuagcgggagaauuacagugucuacuaagaggucccaacagaccguaauuccaaacaucggaucacggccccgcguuagaaauauaccuagcaggauuaguaucuacuggacaauugugaaaccaggugauauccugcuaaucaacucuaccggcaaucucauugccccgcggggguacuucaagauacgcuccggaaagagcucgaucaugcgaucugacgcgcccauuggcaaauguaacuccgagugcaucacgccuaaugguucaauaccaaacgacaagcccuuucagaaugucaacagaauuacuuauggggcauguccuagguacgugaaacagaauacacugaagcuggccaccggaaugcggaacgugccagaaaaacaaacucguggcaucuucggcgcuaucgccggguuuauugagaauggaugggaagguauggucgauggcugguauggguuccgccaccagaacagugagggaaucggccaggcagcugaccuuaagagcacacaagccgcgauugaucagauaaaugguaaauugaacagacucaucgggaagaccaacgagaaguuccaccagauugaaaaagaguuuuccgaaguugagggcaggauccaggaccuggaaaaguacguggaggauacgaaaaucgacuuauggucuuauaaugccgagcugcucguagcacuugaaaaccaacauaccauugaucugacagacagcgagaugaauaaguuguucgaacggacuaaaaagcagcuacgagagaacgcugaagauaugggaaauggcugcuuuaagauauaccacaaaugugacaacgccugcaucgggucaauucgcaauggaaccuaugaucaugacguguacagagacgaggcucugaacaauagguuccagaucaagggugucgagcucaaaaguggcuacaaggauuggauucuguggaucuccuuugccauaagcugcuuccuucuguguguggcauugcucggguuuaucaugugggccugccagaaaggaaacauucgguguaauaucugcauuuga

SEQ ID NO: 129451 - RNA, 1698 nt, Artificial Sequence
  derived and/or modified CDS sequence (opt3) from hemagglutinin__InfluenzaA__ABK39995
augaaggugaaacugcucauccuucugugcaccuucacagccacuuacgcugacacgauuuguauaggcuaucacgcaaacaauagcaccgauacagucgacacuguuuuggagaagaacgugaccguaacacauuccgugaauuuacuggaagauucucacaacgggaaacuaugccuccugaagggaaucgcgccccuucagcuggguaauuguucagucgccggcuggauuuuggggaacccugagugcgaacuccugaucaguaaagagagcugguccuacauuguggaaaccccaaauccggagaacggagcuuguuaucccggcuacuuugccgacuaugaggaacugagagagcaacucucuucgguuuacucauucgaaagguuugagaucuucccuaaggagagcaguuggccaaaucauacugugacaggugucuccgcaucuugcagccacaacgggaaguccucauuuuaucggaauuuacuguggcuuaccggcaaaaacggauuguaccccaaucugaguaagagcuacgccaacaauaaagaaaaggaggugcuaauacucuggggcguacaucacccuccaaacaucgggaaccagcgcacgcuguaucacacugaaaaugcuuacguuucuguggucuccucacauuauagccgacguuucacccccgagauuacaaaaagaccuaaggugagggaucaggaaggacggaucaacuacuauuggacucuucuggagccaggugacaccauuaucuuugaggcaaauggcaacuugauagccccgugguacgcuuucgcccucagucgcggguuuggaucuggcauuaucacauccaaugcgcccauggaugaaugugacgcaaagugccagaccccucaaggugccauuaacagcucgcugccauuccagaaugugcaccccgucacgaucggggaguguccuaaauauguuagaucugcuaaguuaaggauggugacuggacugcggaacaucccauccauucagucacgcggccucuuuggcgccauagcaggguucaucgaaggagguuggacaggcaugguagaugggugguacggauaccaucaccagaaugagcaaggcagugguuaugcugccgaccagaaaagcacccagaacgcgauuaaugggaucacuaacaaggucaauuccgugauagaaaagaugaacacacaguuuaccgccgugggcaaagaguucaauaaacuugagcgaagaauggaaaaccugaacaagaagguugaugacggauucuuggauauuuggacguacaaugcagagcuacuggugcuccuggaaaacgagaggacccuugacuuucacgacucuaaugucaaaaaccuguaugaaaaggugaaaagccaauugaagaauaacgcuaaagagaucggcaaugggugcuucgaguuuuaccauaaguguaacaaugaaugcauggagucaguaaagaacggaacauaugauuaccccaaauauagugaagaguccaagcucaaucgggagaaaaucgacgguguuaagcuggauagcaugggcguguaccagauuuuagccaucuacucuacugucgcuucaagucuggugcuacucgucagccugggggccauuuccuucuggaugugcucuaacggaucgcuucagugucguauaugcaucuga

SEQ ID NO: 129452 - RNA, 1701 nt, Artificial Sequence
  derived and/or modified CDS sequence (opt3) from hemagglutinin__InfluenzaA__ABK40017
augaagaccaucauugcccugagcuacauacucugccuuguguucgcucagaaacugcccggcaacgacaauuccacagcaacuuuguguuuagggcaccaugccgucccuaacggaacgaucguuaagaccauuacaaaugaucaaaucgaggugacuaacgcgaccgaacugguacagucuucaaguacagguggcauuugcgacagcccacaccagauccuagauggggagaauuguacccucauagacgcucugcuuggagauccgcagugcgacggcuuucaaaacaaaaagugggaucuguucguggaaagauccaaagccuauucuaauuguuaccccuaugacgucccugauuacgcaucguugaggucacucguggccagcagugguacucuggaguuuaacaaugaauccuucaacuggacagggguuacccagaauggaacgucuagcgcuugcaagcggcgcuccaacaauucauuuuucagucgacugaacuggcucacucauuuaaaguuuaaauauccagcacugaaugugaccaugcccaacaacaagaaauucgacaaacuuuacaucuggggcguccaccauccuggcacagauaaugaccagauuagcuuguaugcccaggcuucugggcguaucacuguguccaccaagagaucacaacagacaguaauuccaaacaucggaagcaggccccggguucgcgauauaccuaguagaauuucuaucuacuggaccauugugaagccaggugacauccugcuaaucaauuccacgggcaaccucauugccccgaggggguacuuuaagauacggagcggaaaaucgucuaucaugcgcuccgacgcgcccauuggcaaguguaauucagagugcaucacuccuaacgguaguauaccaaaugauaaacccuuccagaacgucaaucgaauuacauauggggcauguccuagauacgugaagcagaacacccugaaacuugccacuggaaugaggaaugugccagagaagcaaacacggggcaucuuuggcgcuaucgccggguucauugaaaacggaugggaggguauggucgacggcugguauggguuucgucaccagaauagcgaaggaaucggccaggcagcugaucugaaauccacccaagccgcgauuaaccagauaaaugguaaguugaaccgccucaucgggaagacgaacgagaaauuccaccagauugagaaggaguucucugaaguugaaggcagaauccaggaccuggagaaauacguggaagauaccaagaucgacuuauggagcuauaaugccgagcugcucguagcacuugagaaccaacauacaauugaucugacugacucagaaaugaauaaauuguuugagaggaccaagaagcagcuacgggaaaacgcugaggauaugggaaauggcugcuucaaaauauaccacaagugugacaacgccugcaucgggaguauucgaaauggaacauaugaucaugacguguaccgcgacgaagcucugaacaauagauuucagaucaaaggugucgagcucaaguccggcuacaaagauuggauucuguggaucagcuucgccauaucuugcuuucuucuguguguggcauugcucggguucaucaugugggccugccagaagggaaacauuagguguaauaucugcauuuga

SEQ ID NO: 129453 - RNA, 1701 nt, Artificial Sequence
  derived and/or modified CDS sequence (opt3) from hemagglutinin__InfluenzaA__ABK40028
augaaggccaaacugcucgugcuucugugcgcuuucaccgcaacauacgccgacacuaucuguauuggcuaucacgcgaacaauagcacggauaccgucgacacaguuuuggagaagaacgugacuguaacccauuccgugaauuuacuggaagauucucacaacgggaaacuaugcagacucaagggaacagcuccccugcagcuugguaauuguucaauagccggcuggauccuggggaacccugagugcgaaaguuuguuuagcaaagaguccuggucuuacauugcagaaaccccaaauccgaagaacggaacuuguuaucccggcuacuucgccgacuaugaggagcucagggaacaacugucgucagucagcaguuuugagcgguucgaaaucuuuccuaaggauuccucuuggccaaaucauacagugaccaaagguguuacggcuagcugcucccacaacgggaagucaaguuucuacaaaaaucugcucugguuaacugagaagaacggacuguaucccaaucuuagcaaaucuuacgugaacaagaagggcaaagaggucuuggugcuguggggcguacaucacccuuccaauaugggggaccagcgcgcaauuuaccacaaggaaaacgccuauguuaccgugcuaucaagccauuacagucgacguuuuacaccagagaucgcuagaaggcccaaaguccgggaucaggaaggacgcauaaacuauuacuggacucuccuggagccuggugacaccaucauuuucgaagccaauggcaaccuuaucgcgccaugguaugcauuugcccugucuagaggguucggauccggcauuaucauaagcaaugcuucgaugggugagugugaugccaagugccagacaccgcaaggggcaauuaacucuuccuugcccuuucagaaugugcacccugugaccaucggagaguguccaaaauacgucaggucaacgaagcuccggaugguuacuggccugcgcaacgugcccaguauucagagccgaggcuuauucggggcuaucgccggauuuaucgaagguggcuggacagggaugauugacggaugguauggcuaccaucaccagaaugagcaagguuccggguacgcggccgaucagaaaucuacccagaacgcaauaaauggcaucacuaacaagguaaauagcauuaucgaaaagaugaacacacaguucaccgcugugggaaaagaguucaauaagcuggaaagaaggauggagaaccucaauaaaaaggucgacgauggcuuucuugacauauggacguauaacgccgagcuguuggugcuacuggaaaacgagcggacccucgacuuccacgauucaaauguuaaaaaccuguacgaaaaggugaagaaucaacuuaaaaacaaugcuaaggagauugggaacggaugcuuugaguucuaucauaaauguaauaacgaaugcauggagagugucaagaaugguacauacgacuauccuaaauacuccaaggaaagcaagcugaaccgugagaaaaucgauggcgugaaguuggaaucuauggggguauaucagauccucgccauuuacucaacuguugcaaguagccugguguuacuggucucccuaggagccaucucuuuuuggaugugcucgaauggcagccuccagugucgcauuugcauauga

SEQ ID NO: 129454 - RNA, 1701 nt, Artificial Sequence; identical to SEQ ID NO: 129435
  derived and/or modified CDS sequence (opt3) from hemagglutinin__InfluenzaA__ABK40039

SEQ ID NO: 129455 - RNA, 1701 nt, Artificial Sequence; identical to SEQ ID NO: 129435
  derived and/or modified CDS sequence (opt3) from hemagglutinin__InfluenzaA__ABK40050

SEQ ID NO: 129456 - RNA, 1701 nt, Artificial Sequence; identical to SEQ ID NO: 128698
  derived and/or modified CDS sequence (opt3) from hemagglutinin__InfluenzaA__ABK40061

SEQ ID NO: 129457 - RNA, 1701 nt, Artificial Sequence; identical to SEQ ID NO: 128698
  derived and/or modified CDS sequence (opt3) from hemagglutinin__InfluenzaA__ABK40075

SEQ ID NO: 129458 - RNA, 1701 nt, Artificial Sequence; identical to SEQ ID NO: 128969
  derived and/or modified CDS sequence (opt3) from hemagglutinin__InfluenzaA__ABK40510

SEQ ID NO: 129459 - RNA, 1701 nt, Artificial Sequence; identical to SEQ ID NO: 128969
  derived and/or modified CDS sequence (opt3) from hemagglutinin__InfluenzaA__ABK40534

SEQ ID NO: 129460 - RNA, 1701 nt, Artificial Sequence
  derived and/or modified CDS sequence (opt3) from hemagglutinin__InfluenzaA__ABK40546
augaaggccaaacugcucgugcuucugugcgcuuugagcgcaaccgacgccgauacaaucuguauuggcuaccacgcgaacaauuccacugacacggucgauaccguuuuagagaagaacgugacaguaacucauucugugaaucugcuagaagacaaccacaaugggaaacucugcaagcugaaaggaauagcuccccuucagcuggguaaguguucaaucgccggcuggauuuuggggaacccugagugcgaaagucucuucagcaauaaguccuggucuuauaucgcagagaccccaaacucggaaaauggaacauguuacccgggcuauuuugccgauuacgaggagcugagagaacaacugucaagcgucaguuccuucgagagguuugaaauuuuccccaaagagucuagcuggccuaagcauaacgugaccaaagguguuacugcuuccugcucacacaaggggaaaaguagcuuuuaucggaaucucuuauggcugacagagaagaacggaucuuacccaaaucuuuccaagucauaugugaacaauaaagaaaaggaggucuuggugcuguggggcguacaucaccccagcaacaucgaagaccagaaaaccauauaccgcaaggagaacgcauacguuaguguggucucuucccacuauaaucgacguuucacgccugaaaucgccaaaagaccaaaggugaggaaccaggagggccggauuaauuacuauuggacucuacucgagcccggggauaccaucauuuuugaagcuaacggaaaucugaucgccccuugguacgcguucgcacuuagccgcgguuuuggcucggggauaauuacaucuaacgccuccauggacgagugugaugcuaaaugccagacuccacaaggagccaucaauucaagucugccguuccagaacgugcaucccgucaccauuggcgaauguccuaaguauguuagaagcacaaaguugaggauggugaccggucuccggaauaucccauccauccagucucgcgggcuguuuggagcaauugcuggcuucauagagggcggguggacgggaaugaucgacgguugguacggcuaucaccaucagaacgaacaagggagcggauacgccgcggaucagaaaucaacucagaaugccauuaacggcaucacaaauaagguaaacaguauaauugagaaaaugaauacccaguuuacugcaguggguaaggaguucaacaaauuagaaaagcgaauggagaaccugaauaagaaagucgacgauggguuccucgacaucuggacauacaacgcugaacuucugguguugcuagagaaugaaagaacccuggacuuucacgauuccaacguuaagaaucucuaugagaaagucaagagccaacugaaaaacaaugccaaggagaucggcaacggaugcuucgaauuuuaccacaaguguaauaacgagugcauggaaucugugaaaaauggcacguaugacuaccccaaguauucagaggagaguaaacuuaacagggaaaagauugauggggugaaacuggagagcaugggaguauaccagaucuuggcuauuuauuccaccguugccucuucgcucgugcuguuagucagccugggugcaauauccuucuggaugugcucaaauggcagucuacagugucggaucugcauuuga

SEQ ID NO: 129461 - RNA, 1701 nt, Artificial Sequence; identical to SEQ ID NO: 128969
  derived and/or modified CDS sequence (opt3) from hemagglutinin__InfluenzaA__ABK40557

SEQ ID NO: 129462 - RNA, 1701 nt, Artificial Sequence; identical to SEQ ID NO: 128969
  derived and/or modified CDS sequence (opt3) from hemagglutinin__InfluenzaA__ABK40568

SEQ ID NO: 129463 - RNA, 1701 nt, Artificial Sequence; identical to SEQ ID NO: 128969
  derived and/or modified CDS sequence (opt3) from hemagglutinin__InfluenzaA__ABK40579

SEQ ID NO: 129464 - RNA, 1701 nt, Artificial Sequence
  derived and/or modified CDS sequence (opt3) from hemagglutinin__InfluenzaA__ABK40590
augaaggccaaacugcucgugcuucugugcgcuuugagcgcaaccgacgccgauacaaucuguauuggcuaccacgcgaacaauuccacugacacggucgauaccguuuuagagaagaacgugacaguaacucauucugugaaucugcuagaagacaaccacaaugggaaacucugcaagcugaaaggaauagcuccccuucagcuggguaaguguucaaucgccggcuggauuuuggggaacccugagugcgaaagucucuucagcaagaaauccuggucuuauaucgcagagaccccaaauucggaaaacggaacauguuacccgggcuauuuugccgauuacgaggagcugagagaacaacugucaagcgucaguuccuucgagagguuugaaauuuuccccaaggagucuagcuggccuaaacauaaugugaccaaggguguuacugcuuccugcucacacaaagggaagaguagcuuuuaucggaaccucuuauggcugacagagaagaauggaucuuacccaaaccuuuccaaaucauaugugaauaacaaggaaaaagaggucuuggugcuguggggcguacaucaccccagcaauaucgaagaccagaagaccauauaccgcaaagagaacgcauacguuaguguggucucuucccacuauaaccgacguuucacgccugaaaucgccaagagaccaaaagugaggaaucaggagggccggauuaacuacuauuggacucuacucgagcccggggauaccaucauuuuugaagcuaauggaaaccugaucgccccuugguacgcguucgcacuuagccgcgguuuuggcucggggauaauuacaucuaaugccuccauggacgagugugaugcuaagugccagacuccacaaggagccaucaacucaagucugccguuccagaaugugcaucccgucaccauuggcgaauguccuaaguauguuagaagcacaaaauugaggauggugaccggucuccggaacaucccauccauccagucucgcgggcuguuuggagcaauugcuggcuucauagagggcggguggacgggaaugaucgacgguugguacggcuaucaccaucagaaugaacaagggagcggauacgccgcggaucagaagucaacucagaacgccauuaauggcaucacaaacaaaguaaauaguauaauugagaagaugaacacccaguuuacugcaguggguaaagaguucaauaaguuagaaaagcgaauggagaaccugaacaaaaaggucgacgauggguuccucgacaucuggacauacaaugcugaacuucugguguugcuagagaacgaaagaacccuggacuuucacgauuccaauguuaaaaaccucuaugagaaggugaaaaaucaacugaagaacaaugccaaggagaucggcaacggaugcuucgaauuuuaccacaaauguaauaacgagugcauggaaagcgucaagaauggcacguaugacuaccccaaauauucugaggagucaaaacuuaacagggaaaagauugauggggugaagcuggagaguaugggaguauaccagaucuuggcuauuuauagcaccguugccuccucucucgugcuguuagucucgcugggugcaaucagcuucuggaugugcuccaauggcucacuacagugucggauaugcauuuga

SEQ ID NO: 129465 - RNA, 1701 nt, Artificial Sequence; identical to SEQ ID NO: 128969
  derived and/or modified CDS sequence (opt3) from hemagglutinin__InfluenzaA__ABK40601

SEQ ID NO: 129466 - RNA, 1701 nt, Artificial Sequence; identical to SEQ ID NO: 128698
  derived and/or modified CDS sequence (opt3) from hemagglutinin__InfluenzaA__ABK40612

SEQ ID NO: 129467 - RNA, 1701 nt, Artificial Sequence
  derived and/or modified CDS sequence (opt3) from hemagglutinin__InfluenzaA__ABK40623
augaagaccaucauugcccugagcuacauacucugccuuguguucgcucagaaacugcccgucaacgacaauuccacagcaacuuuguguuuaggccaccaugccguuccuaacgggacgcuggugaagaccaucacaaaugaucacauugagguaacuaacgcgaccgaacuugugcaaucuucaaguacaggaagaaucugcgacagcccacaucagauucucgauggugagaauuguacccugaucgacgcucuacugggcgauccgcacugcgacggguuucagaacaaagaaugggauuuguucgucgagagguccacugccuauucuaauuguuaccccuaugacgugccugauuacgcaucgcuccggucacugguugccagcaguggaacacuggaauuuaacaaugaguccuucaacuggaccggcguggcucagaaugguacgucuagcgcaugcaagcgccgauccauaaaaucauuuuucagucgucucaacugguuacaucaacugaaguauaaguacccagcccuuaaugucacuaugcccaacaaugagaaauuugacaaguuguauaucuggggagugcaccacccuagcaccgauucugaccagauuucccuguacgcucaggccucagggagaguaacaguuagcacuaaaaggagucagcaaaccgugaucccaaacauuggcucucggcccuggguccgcggcguguccagcagaaucucgauauacuggacaauugugaagccuggggauauccuacucauuaacucuaccggaaaucugaucgcgccaagggguuauuucaaaauccgguccggcaagucaaguauuaugcgcagcaacgcaccgauagggaaguguaauuccgaaugcaucacgcccaacggaucuauuccuaaugacaaaccauuucagaacgucaaucgaaucgccuacggcgcuugucccagauauguuaagcagaacacucuuaaacuggccacagguaugaggaaugugccugagaagcagacccgggggauauucggagcaauugcuggcuuuaucgaaaacggcugggaggggaugguagacggaugguacgguuuccgucauuugaauagcgagggcacugggcaagccgcggaucucaaaucaacacaggccgcaaucaaccagauuaauggaaagcugaaccgcuuaaucgagaaaaccaaugaaaaguuucaccaaauugaaaaggaguucagugaaguggagggcagaauacaggaccuggagaaauaugucaaggauacgaaaaucgaccucugguccuacaacgcugaacuucugguggccuuggagaaccagcauaccauugaucuaacagacagcgaaaugaauaagcuguucgagaggacucggaaacagcuccgagaaaacgcugaggauguugguaaugggugcuuuaagaucuaucacaagugugacaacgccugcaucggcucuauucgcaauggaaccuacgaucacgacguguacagagaugaggcacugaacaauagguuccaaauaaaaggcgucgaacuuaagucaggguauaaagacuggauccuguggauuaguuuugccaucagcugcuucuugcucugugugguacuguuaggauuuauuaugugggcuugccagaaggguaacauccgguguaauauaugcaucuga

SEQ ID NO: 129468 - RNA, 1701 nt, Artificial Sequence; identical to SEQ ID NO: 129032
  derived and/or modified CDS sequence (opt3) from hemagglutinin__InfluenzaA__ABK40645

SEQ ID NO: 129469 - RNA, 1701 nt, Artificial Sequence
  derived and/or modified CDS sequence (opt3) from hemagglutinin__InfluenzaA__ABK40656
augaagaccaucauugcccugagcuacauacucugccuuguguucgcucagaaacugcccggcaacgacaauuccacagcaacuuuguguuuagggcaccaugccgucccuaacggaacgcugguuaagaccaucacaaaugaucaaauugaggugacuaacgcgaccgaacuuguacagucuucaccaacagguagaaucugcgacaguccgcacaggauucucgauggcaaaaauuguacccugaucgacgcucuacugggggauccccauugcgacggauuucagaacaaggagugggauuuguucguggaacggagcaaagccuauuccaauuguuacccuuaugacgucccagauuacgcaucucuccgcucgcugguggccucaagcggcacucuggaguuuacaaacgaaaauuucaacuggaccgguguugcucaggacgggaagaguuauuccugcaagcgaggaucugugaauagcuuuuucucccgucucaacugguuacacaaacuggaguacaaguaucccgcacuuaaugucacgaugccuaacaauggcaaauuugauaaguuguacauauggggcgugcaucacccaucaacugacagugaucaaaccagccuguacguaagagccucugggaaaguuacaguguccacuaagaggucacagcagaccgucauccccgacauuggauaucggccuugggugcgcggucuaagcaguagaaucucuauuuacuggacaaucgugaagccaggcgacauacuccugauuaacuccaccgggaaccuuaucgcuccgaggggauauuucaaaauucggaauggcaagagcucgaucaugcgcucugaugcccccaucgguaacuguuccucagagugcauuacgccuaaugggaguauaccaaacgacaaacccuuucagaaugucaaccgaaucacuuacggaacauguccuagauauguuaagcaaaauacccugaaauuggcgacuggcaugaggaacgugccagaaaagcagacacggggcauuuucggggcaaucgccggauuuauagagaaugguugggaaggcaugguagaugggugguacggauuccgucaccagaacagcgagggcaccggucaggcugccgaccucaaauccacgcaagcagcuauugaucagaucaaugggaagcugaaccgcuuaguggagaagaccaaugaaaaauuucaucagaucgagaaggaguucucugaagucgaaggcaggauucaagaccuggagaaauauguggaggauacaaagaucgaccucuggagcuacaacgccgaacuucugguugcguuggagaaucagcacacuauugaucuaaccgacucagaaaugaacaaacuguucgagagaacacggaagcagcuccgagaaaacgccgaggauaugggaaauggcugcuuuaagauauaccauaaaugugacaacgcaugcaucgggaguauucgcaauggaacuuaugaccacgauguguacagagacgaggcucugaacaauagguuccagaucaagggugucgaacuuaaauccggcuauaaggauuggauccuguggauuagcuuugccauaucuugcuucuugcucugugugguacuguuaggguuuaucaugugggcuugccaaaaaggaaacauucgguguaauaucugcauuuga

SEQ ID NO: 129470 - RNA, 1701 nt, Artificial Sequence
  derived and/or modified CDS sequence (opt3) from hemagglutinin__InfluenzaA__ABK40667
augaagaccaucauugcccugagcuacauacucugccuuguguucgcucagaaacugcccggcaacgacaauuccacagcaacuuuguguuuagggcaccaugccgucccuaacggaacgcugguuaagaccaucacaaaugaucaaauugaggugacuaacgcgaccgaacuuguacagucuucaaguacagguagaaucugcgacagcccacacaggauucucgauggcaaaaauuguacccugaucgacgcucuacugggggauccgcauugcgacggauuucagaacaaggagugggauuuguucguggaacgguccaaagccuauucuaauuguuaccccuaugacgucccugauuacgcaucgcuccgcucacugguggccagcaguggcacucuggaguuuacaaacgaagguuucaauuggaccgggguugcucaggacggaaaguccuaugcaugcaagcgaggcucugugaacagcuuuuucucccgucucaauugguuacacaaacuggaguacaaguauccagcccuuaacgucacgaugcccaauaacgauaaauuugacaaguuguacauauggggcgugcaucacccuucaacugauagugaccaaaccagccuguacguacaggcuucugggagaguuacaguguccacuaaaaggucacagcagaccgucaucccaaauauuggaagccggcccugggugcgcgguaucaguucuagaauuuccaucuauuggacaauagugaagccuggcgacauucuacucaucaacagcaccgggaaccugauugccccaaggggauacuucaaacuucggaauggcaagucgucuaucaugcgcuccgaugcgccgaucgacaacuguaauucagagugcauuacgcccaacgguaguauaccuaaugauaagccauuucaaaacgucaaucgaaucacuuauggggcaugucccagauacguuaaacagaacacacugaaguuggccaccggaaugaggaaugugccugaaaaacagacucggggcauuuucggcgcuaucgccggguuuauagagaacggaugggaagguaugguagacggcugguauggguuccgucaccagaauagcgagggaacaggccaagcagcugaucucaaguccacccaggccgcgauugaccagaucaacgguaaacugaaucgcuuaacggagaagaccaacgaaaaguuucaucaaaucgagaaagaguucucugaaguggaagggaggauucaggaucuggagaaguacgucgaggacacaaaaaucgaucucuggagcuauaaugccgaacuucugguggcauuggagaaccagcacacuauugaccuaaccgauucagaaaugaacaagcuguucgagagaacacggaaacagcuccgagaaaaugcugaggacaugggcaacggaugcuuuaagauauaccauaagugugacaaugccugcaucggcaguauucgcaacgggacuuacaaucacgauguuuauagagacgaggcucugaacaauagguuccaaaucaaaggaguggaacuuaaguccgguuacaaagauuggauccuguggauuagcuuugccauaucuugcuucuugcucugugucgugcuguuaggcuuuaucaugugggcaugccagaaggggaacauucgguguaauaucugcauuuga

SEQ ID NO: 129471 - RNA, 1701 nt, Artificial Sequence; identical to SEQ ID NO: 129114
  derived and/or modified CDS sequence (opt3) from hemagglutinin__InfluenzaA__ABK40678

SEQ ID NO: 129472 - RNA, 1698 nt, Artificial Sequence
  derived and/or modified CDS sequence (opt3) from hemagglutinin__InfluenzaA__ABK40689
augaaggugaaacugcucguccuucugugcaccuucacagccacuuacgcugacacgaucuguauuggcuaucacgcaaacaauagcaccgauacaguugacacuguguuggagaagaacguaaccgugacacauuccgucaauuuacuggaagauucucacaacgggaaacuaugccuccugaagggaauagcgccccuucagcuggguaauuguucaguggccggcuggaucuuggggaacccugagugcgaacuccugauuaguaaagagagcugguccuacaucguugaaaccccaaauccggagaacggaacuuguuaucccggcuacuuugcugacuaugaggaacugagagagcaacucucuucggugagcucauucgaaagguuugagauuuucccuaaggagaguuccuggccaaaucauacagucaccggugugucugccagcugcucccacaacgggaagucaaguuuuuaccggaauuuacuguggcuuacgggcaaaaacggauuguaucccaaucugagcaagucuuacgcaaacaauaaagaaaaggagguucuaguacucuggggcgugcaucacccuccaaacaucgggaaccagcgcgcccuguaccacacugaaaaugcuuaugucuccguggugucaagccauuacagucgacguuucacccccgagauagcaaaaagaccuaaggucagggaucaggaaggacggaucaacuauuacuggacacuucuggagccaggugacacuauuaucuuugaggccaauggcaacuugauugcuccgcgcuucgccuuugcgcucucuagaggguucggauccggcaucauaaccagcaaugcacccauggaugaaugugacgccaagugccagacaccucaaggugcuauuaacucgucucugccauuucagaauguucaccccgugaccaucggggaguguccuaaauauguaagguccgccaaguuacggauggcaacgggacugcgcaacauuccaucaauccagagucgaggccucuucggcgcuaucgccggguuuauugaaggagguuggacuggcaugguggaugggugguacggauaucaucaccagaaugagcaaggcagcgguuacgcggccgaccagaaauccacacagaacgcaauaaaugggaucaccaacaaggucaauucugugauugaaaagaugaacacucaguucacagcuguuggcaaagaguucagcaaacuugagagaaggauggaaaaucugaacaagaagguggaugacggauuuuuggauaucuggaccuacaacgccgagcuacugguccuccuggaaaaugagcggacgcuugacuuccacgacucaaacgugaaaaaucuguaugaaaagguaaaaagucaauugaagaacaaugcuaaagagauaggcaacgggugcuuugaguucuaccauaaguguaaugaugaaugcauggaguccguuaagaacggaaccuaugacuaccccaaauauagcgaagagucuaagcucaaucgugagaaaauugauggugugaagcuggaaucaaugggcgucuaccagaucuuagccaucuauaguacaguggcaagcucccugguccuacucgugucucugggggccauuucguuuuggaugugcagcaacggaucccuucagugucgcaucugcauuuga

SEQ ID NO: 129473 - RNA, 1701 nt, Artificial Sequence; identical to SEQ ID NO: 128698
  derived and/or modified CDS sequence (opt3) from hemagglutinin__InfluenzaA__ABK40700

SEQ ID NO: 129474 - RNA, 1701 nt, Artificial Sequence; identical to SEQ ID NO: 128698
  derived and/or modified CDS sequence (opt3) from hemagglutinin__InfluenzaA__ABK40711

SEQ ID NO: 129475 - RNA, 1701 nt, Artificial Sequence
  derived and/or modified CDS sequence (opt3) from hemagglutinin__InfluenzaA__ABK40722
augaagaccaucauugcccugagcuacauacucugccuuguguucgcucagaaacugcccggcaacgacaauuccacagcaacuuuguguuuagggcaccaugccgucccuaacggaacgcugguuaagaccaucacaaaugaucaaauugaggugacuaacgcgaccgaacuuguacagucuucaaguacagguggcaucugcgacagcccacaccagauucucgauggggagaauuguacccugaucgacgcucuacugggagauccgcauugcgacggcuuucagaacaaagaaugggauuuguucguggagagauccaaggccuauucuaauuguuaccccuaugacgucccugauuacgcaucgcucaggucacugguggccagcagugguacucuggaauuuaacaaugaguccuucaacuggacagggguugcucaaaauggaaccucuagcgcaugcaaacggcgcuccaacaagucauuuuucagucgacucaauugguuacaccagcugaaguauaaauacccagcccuuaacgugacgaugcccaauaacgagaaguuugacaaauuguauauauggggcguccaucacccuagcacugauaacgaccagaucucucuguacgcucaggccccaggccgugugaccguauccacaaagagaucacaacagacuguuauucccaauaucgggagcaggccuugggugcggggagucaguucucgcauuuccaucuacuggaccauagugaaaccaggugauauucuacucaucaacuguacaggcaaucugauugcgccgagaggguauuucaagaucaggagcggaaagucgucuaucaugcgguccgacgcaucaauuggcaaaugcaacagugaauguauaacccccaaugguagcaucccuaacgacaagccauuucagaaugugaaccgcauuacguacggggccugcccccgauaugucaaacagaauacucuuaagcuggcuacaggaaugagaaacguuccugagaaacaaaccaggggcaucuucggcgccauagcaggguuuauugaaaauggaugggaggguaugguggauggcugguacggguuccggcaccagaacuccgagggaacuggccaggcugccgacuugaagucuacacaagcggccaucaaucagaucaacgguaaacucaaucgucugauugaaaagaccaacgagaaguuucaucagaucgaaaaagaguucagcgaaguagaggggcgcauucaggauuuagagaaguauguggaagacacgaaaauagaucuguggucauacaacgcagagcuccuugucgcucuggaaaaucaacacaccaucgacuugacagauagugagaugaacaagcuauucgaaagaacuaaaaagcagcugagggagaaugccgaggacaugggcaacggauguuuuaagauuuaucauaaaugcgauaaugcuugcaucggcuccauccggaacgggaccuacgaccacgauguguaccgagacgaagcccucaauaaccgcuuccagauuaagggaguugagcugaaaagcgguuauaaggacuggauacuuuggaucucuuuugcaauuucauguuuccuguugugcgugguccuccugggcuuuaucaugugggccugucagaaagggaauauuagaugcaacaucuguauauga

SEQ ID NO: 129476 - RNA, 1701 nt, Artificial Sequence; identical to SEQ ID NO: 128698
  derived and/or modified CDS sequence (opt3) from hemagglutinin__InfluenzaA__ABK40733

SEQ ID NO: 129477 - RNA, 1701 nt, Artificial Sequence; identical to SEQ ID NO: 129353
  derived and/or modified CDS sequence (opt3) from hemagglutinin__InfluenzaA__ABK40744

SEQ ID NO: 129478 - RNA, 1701 nt, Artificial Sequence; identical to SEQ ID NO: 128963
  derived and/or modified CDS sequence (opt3) from hemagglutinin__InfluenzaA__ABK79948

SEQ ID NO: 129479 - RNA, 1698 nt, Artificial Sequence; identical to SEQ ID NO: 129252
  derived and/or modified CDS sequence (opt3) from hemagglutinin__InfluenzaA__ABK79959

SEQ ID NO: 129480 - RNA, 1701 nt, Artificial Sequence
  derived and/or modified CDS sequence (opt3) from hemagglutinin__InfluenzaA__ABK79970
augaaggccaaacugcucgugcuucugugcgcuuucaccgcaacauacgccgacacuaucuguauuggcuaucacgcgaacaauagcacggauaccgucgacacaguuuuggagaagaacgugacuguaacccauuccgugaauuuacuggaagauucucacaacgggaaacuaugcagacucaagggaacagcuccccugcagcuugguaauuguucaauagccggcuggauccuggggaacccugagugcgaaaguuuguuuagcaaaaaguccuggucuuacauugcagagaccccaaauccgaagaacggaacuuguuaucccggcuacuucgccgacuaugaagaacucagggagcaacugucgucagucagcaguuuugaacgguucgagaucuuuccuaaagauuccucuuggccaaaucauacagugaccaaggguguuacggcuagcugcucccacaacgggaaaucaaguuucuacaagaaucugcucugguuaacugaaaagaacggacuguaucccaaucuuagcaagucuuacgugaacaagaaaggcaaggaggucuuggugcuguggggcguacaucacccuuccaauaugggggaccagcgcgcaauuuaccacaaagagaacgccuauguuucagugcuaagcagucauuacucucgacguuuuaccccagaaaucgcuagaaggcccaagguccgggaucaggagggacgcauaaacuauuacuggacacuccuggaaccuggugacacuaucauuuucgaggccaauggcaaccuuaucgcgccaugguaugcauuugcccuguccagaggguucggaagcggcauuaucauaucgaaugcuucuaugggugaaugugaugccaaaugccagaccccgcaaggggcaauuaacuccucauugcccuuucagaaugugcacccugugacaaucggagaguguccaaaguacgucaggaguaccaaacuccggaugguuacgggccugcgcaacgugcccagcauucagucccgaggcuuauucggggcuaucgccggauuuaucgaggguggcuggacugggaugauugacggaugguauggcuaccaucaccagaaugaacaagguucuggguacgcggccgaucagaaaagcacacagaacgcaauaaauggcaucaccaacaagguaaauucaauuaucgagaaaaugaacacucaguucacagcugugggaaaggaguucaauaaacuggagagaaggauggaaaaccucaauaagaaagucgacgauggcuuucuugacauauggaccuauaacgccgagcuguuggugcuacuggagaacgaacggacgcucgacuuccacgauaguaauguuaagaaccuguacgagaaggugaaaaaucaacuuaagaacaaugcuaaagaaauugggaacggaugcuuugaguucuaucauaaguguaauaacgaaugcauggaguccgucaaaaaugguaccuacgacuauccuaaguacagcaaggagucuaaacugaaccgugaaaagaucgauggcgugaaauuggagucaauggggguauaucagauccucgccauuuacaguacaguugcaagcucccugguguuacuggucucucuaggagccaucucguuuuggaugugcagcaauggcucccuccagugucgcauuugcauauga

SEQ ID NO: 129481 - RNA, 1701 nt, Artificial Sequence
  derived and/or modified CDS sequence (opt3) from hemagglutinin__InfluenzaA__ABK79981
augaagaccaucauugcccugagcuacauacucugccuuguguucacacagaaacugcccggcaacgacaauuccacugcuacguuguguuuagggcaccaugcagucccuaacggaacccugguuaagacaaucacuaaugaucaaauugaggugaccaacgccacagaauugguacagucuucaaguaccgguggcaucugcgacagcccacaccagauucucgauggggagaauuguacucugaucgacgcgcuucugggagauccgcauugcgacggcuuucagaacaaagaaugggauuuguucguggagagauccaaggcuuauucuaauuguuaccccuaugacgucccugauuacgccucgcucaggucacugguggcaagcagugguacacuggaauuuaacaaugaguccuucaacuggaccgggguugcccaaaauggaacgucuagcgcuugcaaacggcgcuccaacaagucauuuuucagucgacucaauugguuacaccagcugaaguauaaauacccagcacuuaacgugacuaugcccaauaacgagaaguuugacaaauuguauauauggggcguccaucacccuagcaccgauucugaccagaucucccuguacgcccaggcuccaggccgugugacaguaucaacuaagagaagccaacagaccguuauucccaacaucgggaguaggccuugggugcggggagucucuucccgcauuagcaucuacuggacaauagugaaaccaggugauauucuacucaucaauuguaccggcaaccugauugccccgagaggguauuucaagaucaggucgggaaagucuuccaucaugcggucagacgcgaguauuggcaaaugcaauagcgaauguauaacgcccaacgguuccaucccuaaugacaagccauuucagaacgugaaucgcauuacuuacggggcaugcccccgauaugucaaacagaacacacuuaagcuggccaccggaaugagaaauguuccugagaaacaaacuaggggcaucuucggcgcuauagccggguuuauugaaaacggaugggaggguaugguggauggcugguacggguuccggcaccaaaauucugagggaacaggccaggcagcugaccuaaagagcacccaggccgcgaucaaccagaucaaugguaaacucaaccgucugauugaaaagacgaaugagaaguuucaucagaucgaaaaagaguucucagaaguagaggggcgcauucaggauuuagagaaguauguggaagacaccaaaauagaucuguggaguuacaacgccgagcuccuugucgcacuggaaaaccaacacacaaucgacuugacugauuccgagaugaauaagcuauucgaaagaaccaaaaagcagcugagggagaacgcugaggacaugggcaauggauguuuuaagauuuaucauaaaugcgauaacgccugcaucggcagcauccggaaugggacauacgaccacgauguguaccgagacgaagcucucaacaaucgcuuccagauuaagggaguugagcugaaaucugguuauaaggacuggauacuuuggaucucauuugccauuaguuguuuccuguugugcgugguccuccugggcuuuaucaugugggcaugucagaaagggaacauuagaugcaauaucuguauauga

SEQ ID NO: 129482 - RNA, 1701 nt, Artificial Sequence; identical to SEQ ID NO: 128698
  derived and/or modified CDS sequence (opt3) from hemagglutinin__InfluenzaA__ABK79992

SEQ ID NO: 129483 - RNA, 1701 nt, Artificial Sequence; identical to SEQ ID NO: 128969
  derived and/or modified CDS sequence (opt3) from hemagglutinin__InfluenzaA__ABK80025

SEQ ID NO: 129484 - RNA, 1701 nt, Artificial Sequence; identical to SEQ ID NO: 128969
  derived and/or modified CDS sequence (opt3) from hemagglutinin__InfluenzaA__ABK80036

SEQ ID NO: 129485 - RNA, 1701 nt, Artificial Sequence; identical to SEQ ID NO: 128969
  derived and/or modified CDS sequence (opt3) from hemagglutinin__InfluenzaA__ABK80047

SEQ ID NO: 129486 - RNA, 1701 nt, Artificial Sequence; identical to SEQ ID NO: 128814
  derived and/or modified CDS sequence (opt3) from hemagglutinin__InfluenzaA__ABK80058

SEQ ID NO: 129487 - RNA, 1701 nt, Artificial Sequence
  derived and/or modified CDS sequence (opt3) from hemagglutinin__InfluenzaA__ABK80069
augaagaccaucauugcccugagcuacauacucugccuuguguucgcucagaaacugcccgucaacgacaauuccacagcaacuuuguguuuaggccaccaugccguuccuaacgggacgcuggugaagaccaucacaaaugaucacauugagguaacuaacgcgaccgaacuugugcaaucuucaaguacaggaagaaucugcgacagcccacaucagauucucgauggugagaauuguacccugaucgacgcucuacugggcgauccgcacugcgacggguuucagaacaaagaaugggauuuguucgucgagagguccacugccuauucuaauuguuaccccuaugacgugccugauuacgcaucgcuccggucacugguugccagcaguggaacacuggaauuuaacaaugaguccuucaacuggaccggcguggcucagaaugguacgucuagcgcaugcaagcgccgauccauaaaaucauuuuucagucgucucaacugguuacaucaacugaaguauaaguacccagcccuuaaugucacuaugcccaacaaugagaaauuugacaaguuguauaucuggggagugcaccacccuagcaccgauucugaccagauuucccuguacgcucaggccucagggagaguaacaguuagcacuaaaaggagucagcaaaccgugaucccaaacauuggcucucggcccuggauccgcggcgucuccagcagaauaucgauuuacuggacaaucgugaagccuggggauauucuacucaucaacucuaccggaaaucugaucgcgccaagggguuauuucaaaauucgguccggcaagucaaguauaaugcgcagcaacgcaccgaucgggaaguguaauuccgaaugcauuacgcccaacggaucuaucccuaaugacaaaccauuucagaacgugaaucgaauagccuacggcgcuugucccagauaugucaagcagaacacucuuaaacuggccacagguaugaggaauguuccugagaagcagacccgggggauuuucggagcaaucgcuggcuuuaucgaaaacggcugggaggggaugguggacggaugguacgguuuccgucauuugaauagcgagggcacugggcaagccgcggaucucaaaucaacacaggccgcaauuaaccagaucaauggaaagcugaaccgcuuaauugagaaaaccaaugaaaaguuucaccaaauagaaaaggaguucagugaaguagagggcagaauccaggaccuggagaaauauguggaagauacgaagauugaccucugguccuacaacgcugagcuucuggucgccuuggaaaaccagcauaccaucgaucuaacagacagcgagaugaauaaacuguucgaaaggacucggaagcagcuccgagagaacgcugaggauguggguaaugggugcuuuaaaaucuaucacaagugugacaacgccugcauuggcucuauacgcaauggaaccuacgaucacgacguuuacagagaugaagcacugaacaauagguuccaaaucaagggcguggagcuuaaaucaggguauaaggacuggauucuguggaucaguuuugccauuagcugcuucuugcucugugucgugcuguuaggauuuaucaugugggcuugccagaaagguaacauacgguguaauaucugcauuuga

SEQ ID NO: 129488 - RNA, 1701 nt, Artificial Sequence
  derived and/or modified CDS sequence (opt3) from hemagglutinin__InfluenzaA__ABK80080
augaagaccaucauugcccugagcuacauacucugccuuguguucgcucagaaacugcccgucaacgacaauuccacagcaacuuuguguuuaggccaccaugccguuccuaacgggacgcuggugaagaccaucacaaaugaucacauugagguaacuaacgcgaccgaacuugugcaaucuucaaguacaggaagaaucugcgacagcccacaucagauucucgauggugagaauuguacccugaucgacgcucuacugggcgauccgcacugcgacggguuucagaacaaagaaugggauuuguucgucgagagguccacugccuauucuaauuguuaccccuaugacgugccugauuacgcaucgcuccggucacugguugccagcaguggaacacuggaauuuaacaaugaguccuucaacuggaccggcguggcucagaaugguacgucuagcgcaugcaagcgccgauccauaaaaucauuuuucagucgucucaacugguuacaucaacugaaguauaaguacccagcccuuaaugucacuaugcccaacaaugagaaauuugacaaguuguauaucuggggagugcaccacccuagcaccgauucugaccagauuucccuguacgcucaggccucagggagaguaacaguuagcacuaaaaggagucagcaaaccgugaucccaaacauuggcucucggcccuggguccgcggcguguccagcagaaucucgauauacuggacaauugugaagccuggggauauccuacucauuaacucuaccggaaaucugaucgcgccaagggguuauuucaaaauccgguccggcaagucaaguauuaugcgcagcaacgcaccgauagggaaguguaauuccgaaugcaucacgcccaacggaucuauuccuaaugacaaaccauuucagaacgucaaucgaaucacuuacggcgccugucccagauauguuaagcagaacacacuuaaacuggcuaccgguaugaggaaugugccugagaagcagacucgggggauauucggagccauugcaggcuuuaucgaaaacggcugggaggggaugguagacggaugguacgguuuccgucaucaaaauagcgagggcacagggcaggcugccgauuugaaaucaacccaggcggccaucaaccaaauuaauggaaagcucaaccgccugaucgagaaaacgaaugaaaaguuucaccagauugaaaaggaguucagugaaguggagggcagaauacaggacuuagagaaauaugucgaagauaccaagaucgaccugugguccuacaacgcagagcuccuuguggcucuggaaaaccagcauacaauugauuugacugacagcgagaugaauaaacuauucgaaaggacccggaagcaacugcgagagaacgccgaggauauggguaaugggugccucaaaaucuaucacaagugugacaacgcuugcaucggcucuauucgcaauggaacauacgaucacgacguuuacagagaugaagcccugaacaauagguuucagauaaagggcguggagcuuaaaucaggguauaaggacuggauccuguggauuaguuucgcaaucagcugcuuuuugcucugugucgugcuguuaggauucauuaugugggccugccagaaagguaacauccgguguaauauaugcaucuga

SEQ ID NO: 129489 - RNA, 1701 nt, Artificial Sequence; identical to SEQ ID NO: 128698
  derived and/or modified CDS sequence (opt3) from hemagglutinin__InfluenzaA__ABK80091

SEQ ID NO: 129490 - RNA, 1701 nt, Artificial Sequence; identical to SEQ ID NO: 128698
  derived and/or modified CDS sequence (opt3) from hemagglutinin__InfluenzaA__ABK80102

SEQ ID NO: 129491 - RNA, 1701 nt, Artificial Sequence; identical to SEQ ID NO: 128099
  derived and/or modified CDS sequence (opt3) from hemagglutinin__InfluenzaA__ABK80113

SEQ ID NO: 129492 - RNA, 1701 nt, Artificial Sequence
  derived and/or modified CDS sequence (opt3) from hemagglutinin__InfluenzaA__ABK80124
augaagaccaucauugcccugagcuacauacucugccuuguguucgcucagaaacugcccggcaacgacaauuccacagcaacuuuguguuuagggcaccaugccgucccuaacggaacgcugguuaagaccaucacaaaugaucaaauugaggugacuaacgcgaccgaauugguacagucuucaaguacagguagaaucugcgacagcccacaccagauucucgauggcgagaauuguacccugaucgacgcccuucugggggauccgcauugcgacggauuucagaacaaagaaugggauuuguucguggagagguccaaggcuuauucuaauuguuaccccuaugacgucccugauuacgugucgcuccggucacugguugcaagcaguggcacucuggaauuuaacaaugaguccuucaacuggacagguguggcccaaaaugggaccucuagcgcuugcaaacgccgauccgacaagucauuuuucagucgucucaacugguuacaccagcugaaguauaaauacccagcacuuaaugucacgaugcccaacaaugagaaguuugauaaauuguauauauggggagugcaucacccuggcacugacagcgaucagaucucucuguacgcccaggcuuccggcagaguaaccguuucaacaaagaggagccaacagacugugauuccaaacaucgggagucggcccuggguccgcggagugucuuccagaauuagcaucuacuggaccauagugaaaccuggugacauucuacucaucaacucgacaggcaaucugauugccccaaggggguauuucaagauccggucuggaaaguccucaaucaugcgcagugacgcgccgauuggcaaauguaacagcgaaugcauaacccccaaugguuccaucccuaacgauaagccauuucagaaugucaaccgaauuacguacgggcccuguccuagauauguuaaacagaauacucuuaagcuggcaacaggaaugaggaacgugccagagaaacaaacccggggcaucuucggcgccauagcuggguuuauugaaaauggaugggaggguaugauggacggcugguacggguuccgucaccagaacucugagggaacuggccaggccgcagaucuaaagagcacacaagcugccaucaaucagaucaacgguaaacucaaucgccugauugaaaagaccaacgagaaguuucaucagaucgaaaaagaguucucagaaguagaggggaggauucaggacuuagagaaguauguggaagauacgaaaauagaccuguggaguuacaaugcggagcuccuugucgcccuggaaaaccaacacaccaucgauuugacagacuccgagaugaacaagcuauucgaaagaacuaaaaagcagcugcgggagaaugcagaggauaugggcaacggaugcuuuaagauuuaucauaaaugugacaaugcuugcaucggcagcauccgaaacgggaccuacgaucacgacguguaccgcgacgaagcccucaauaacagauuccagauuaagggaguugagcugaaaucugguuauaagaauuggauacuuuggaucucauuugcuauuaguugcuuccuguuguguaucgugcuccugggcuuuauuaugugggccugccagaaagggaacaucagguguaauauaugcaucuga

SEQ ID NO: 129493 - RNA, 1701 nt, Artificial Sequence; identical to SEQ ID NO: 128099
  derived and/or modified CDS sequence (opt3) from hemagglutinin__InfluenzaA__ABK80135

SEQ ID NO: 129494 - RNA, 1701 nt, Artificial Sequence; identical to SEQ ID NO: 128099
  derived and/or modified CDS sequence (opt3) from hemagglutinin__InfluenzaA__ABK80146

SEQ ID NO: 129495 - RNA, 1701 nt, Artificial Sequence; identical to SEQ ID NO: 128099
  derived and/or modified CDS sequence (opt3) from hemagglutinin__InfluenzaA__ABK80157

SEQ ID NO: 129496 - RNA, 1701 nt, Artificial Sequence; identical to SEQ ID NO: 128610
  derived and/or modified CDS sequence (opt3) from hemagglutinin__InfluenzaA__ABK80168

SEQ ID NO: 129497 - RNA, 1701 nt, Artificial Sequence
  derived and/or modified CDS sequence (opt3) from hemagglutinin__InfluenzaA__ABK80179
augaagaccaucauugcccugagcuacauacucugccuuguguucgcucagaaacugcccggcaacgacaauuccacagcaacuuuguguuuagggcaccaugccgucccuaacggaacgcugguuaagaccaucacaaaugaucaaauugaggugacuaacgcgaccgaauugguacagucuucaaguacagguagaaucugcgacagcccacaccagauucucgauggcgagaauuguacccugaucgacgcccuucugggggauccgcauugcgacggauuucagaacaaagaaugggauuuguucguggagagguccaaggcuuauucuaauuguuaccccuaugacgucccugauuacgugucgcuccggucacugguugcaagcaguggcacucuggaauuuaacaaugaguccuucaacuggacagguguggcccaaaaugggaccucuagcgcuugcaaacgccgauccgacaagucauuuuucagucgucucaacugguuacaccagcugaaguauaaauacccagcacuuaaugucacgaugcccaacaaugagaaguuugauaaauuguauauauggggagugcaucacccuggcacugacagcgaucagaucucucuguacgcccaggcuuccggcagaguaaccguuucaacaaagaggagccaacagacugugauuccaaacaucgggagucggcccuggguccgcggagugucuuccagaauuagcaucuacuggaccauagugaaaccuggugacauucuacucaucaacucgacaggcaaucugauugccccaaggggguauuucaagauccggucuggaaaguccucaaucaugcgcagugacgcgccgauuggcaaauguaacagcgaaugcauaacccccaaugguuccgucccuaacgauaagccauuucagaauguuaaccgaaucacguacggggcaugucccagauaugugaaacagaauacucuuaagcuggccacaggaaugaggaacguaccugagaaacaaacccggggcauuuucggcgcuaucgccggguuuauagaaaauggaugggaggguaugauggacggcugguacggguuccgucaccagaacucugagggaacuggccaggcagcugaucuaaagagcacacaagccgcgauuaaucagaucaacgguaaacucaaucgccugaucgaaaagaccaacgagaaguuucaucagauugaaaaagaguucucagaaguggaggggagaauccaggacuuagagaaguaugucgaagauacgaaaauugaccuguggaguuacaaugccgagcuccuuguggcacuggaaaaccaacacaccauagauuugacagacuccgagaugaacaagcuauucgaaaggacuaaaaagcagcugcgggagaaugcugaggauaugggcaacggaugcuuuaagaucuaucauaaaugugacaaugccugcauuggcagcauccgaaacgggaccuacgaucacgacguuuaccgcgacgaagcucucaauaacagacugcagaucaagggaguggagcuuaaaucugguuauaaggauuggauucuguggauaucauucgccaucaguugcuuuuugcucuguauuguccuguuaggcuucaucaugugggcaugccagaaagggaauauuagguguaacaucugcauauga

SEQ ID NO: 129498 - RNA, 1701 nt, Artificial Sequence; identical to SEQ ID NO: 128610
  derived and/or modified CDS sequence (opt3) from hemagglutinin__InfluenzaA__ABK80190

SEQ ID NO: 129499 - RNA, 1701 nt, Artificial Sequence; identical to SEQ ID NO: 129353
  derived and/or modified CDS sequence (opt3) from hemagglutinin__InfluenzaA__ABK80201

SEQ ID NO: 129500 - RNA, 1701 nt, Artificial Sequence
  derived and/or modified CDS sequence (opt3) from hemagglutinin__InfluenzaA__ABK80212
augaagaccaucauugcccugagcuacauacucugccuuguguucgcucagaaacugcccggcaacgacaauuccacagcaacuuuguguuuagggcaccaugccgucccuaacggaacgaucguuaagaccauuacaaaugaucaaaucgaggugacuaacgcgaccgaacugguacagucuucaaguacagguggcauuugcgacagcccacaccagauccuagauggggagaauuguacccucauagacgcucugcuuggagauccgcagugcgacggcuuucaaaacaaaaagugggaucuguucguggaaagauccaaagccuauucuaauuguuaccccuaugacgucccugauuacgcaucguugaggucacucguggccagcagugguacucuggaguuuaacaaugaauccuucgacuggacagggguuacccagaacggaacgucuagcgcuugcaagcggcgcuccaauaagucauuuuucagucgacugaacuggcucacucauuuaaaauauaaguacccagcacugaaugugaccaugcccaacaaugagaaauuugauaaacuuuauaucuggggcguccaccauccuggcacagacagcgaucagauuucuuuguacgcccaggcuuccgggcguaucacugugucaaccaagagaagccaacagacaguaauuccaaacaucggaaguaggccccggguucgcgacgugucuuccagaauaagcauuuacuggaccaucgucaagccuggugacauucugcuaaucaacucgacgggcaaucucaucgccccaaggggguauuucaagauucggucuggaaaauccucaauaaugcgcagugaugcgccgaucggcaaguguaacagcgagugcauuacucccaaugguuccaucccuaacgacaaaccauuucagaaugugaaccgaauaacauacggggcaugucccagauaugugaagcagaauacccugaaacuugccacuggaaugaggaacgucccugaaaagcaaacacggggcauuuucggcgcuaucgccggguuuaucgagaauggaugggaagguaugguugauggcugguacggguuccgucaccagaacucugagggaaccggccaggcagcugaccugaaaagcacgcaagccgcgauuaaucagaucaacgguaaguugaaucgccucauugggaagaccaacgagaaauuucaccagauagaaaaggaguucucagaaguggagggcagaauccaggaucuggaaaaauauguagaggacacaaagauugauuuauggaguuacaaugccgagcugcucguggcacuugaaaaccaacauacuaucgaccugaccgauuccgagaugaacaaauuguucgaaaggacaaagaagcagcuacgggagaaugcugaagacaugggaaacggcugcuuuaaaaucuaucacaagugugauaaugccugcauugggagcauacgaaacggaacuuacgaccaugacgucuaccgcgaugaggcucugaauaacagauuccagaucaaagguguggagcucaagucuggcuauaaaaauuggauucuguggaucucauuugccauuaguugcuuccuucuguguguugcauugcucggguuuaucaugugggccugccagaagggaaacauaagguguaauaucugcauuuga

SEQ ID NO: 129501 - RNA, 1701 nt, Artificial Sequence; identical to SEQ ID NO: 128564
  derived and/or modified CDS sequence (opt3) from hemagglutinin__InfluenzaA__ABK80223

SEQ ID NO: 129502 - RNA, 1701 nt, Artificial Sequence
  derived and/or modified CDS sequence (opt3) from hemagglutinin__InfluenzaA__ABK80234
augagaaccaucauugcccugagcuacauacucugccuuguguucgcucagaagcugcccggcaacgacaauuccacagcaacuuuguguuuagggcaccaugccgucccuaacggaacgaucguuaaaaccauuacaaaugaucaaaucgaggugacuaacgcgaccgaacugguacagucuucaaguacagguggcauuugcgacagcccacaccagauccuagauggggagaauuguacccucauagacgcucugcuuggagauccgcagugcgacggcuuucaaaacaagaaaugggaucuguucguggaaagguccaaggccuauucuaauuguuaccccuaugacgucccugaucaugcaucguugcggucacucguggccagcagugguacucuggaguuuaacaaugaauccuucgacuggacagggguuacccagaacggaacgucuagcgcuugcaaacgccgauccaauaagucauuuuucagucgucugaacuggcucacucacuuaaaguacaaauauccagcacugaaugugaccaugcccaacaaugagaaguuugauaaacuuuacaucuggggcguccaucacccuggcacagacagcgaucagauuucuuuguaugcccaggcuuccgggagaaucacugugucaaccaagaggagccaacagacaguaauuccaaacaucggaagucggccccgcguuagagacgugucuuccaggauaagcauuuacuggaccaucgucaaaccuggugacauucugcuaaucaacucgacgggcaaucucaucgccccacggggguacuucaagauucgcucuggaaaguccucaauaaugcgaagugaugcgccgaucggcaaauguaacagcgagugcauuacucccaaugguuccaucccuaacgacaagccauuucagaaugugaacagaauaacauauggggcaugucccagguacgugaaacagaauacccugaagcuggccacuggaaugcggaacgucccugaaaaacaaacacguggcauuuucggcgcuaucgccggguuuaucgagaauggaugggaagguaugguugauggcugguauggguuccgccaccagaacucugagggaaccggccaggcagcugaccuuaagagcacgcaagccgcgauuaaucagaucaacgguaaauugaauagacucauugggaagaccaacgagaaguuucaucagauagaaaaagaguucucagaaguggagggcaggauccaggaucuggaaaaguacguagaggacacaaaaauugauuuauggaguuauaaugccgagcugcucguggcacuugaaaaccaacacacuaucgaccugaccgauuccgagaugaacaaguuguucgaacggacuaaaaagcagcuacgagagaaugcugaagacaugggaaacggcugcuuuaagaucuaccauaaaugugauaaugccugcauugggagcauacgcaacggaacauaugaccacgacgucuacagagaugaggcucugaauaacagguuccagaucaaggguguggagcucaaaucuggcuacaaggacuggauucuguggaucucauuugccauuaguugcuuccuucuguguguugcauugcucggguuuaucaugugggccugccagaaaggaaauauacgguguaacaucugcauuuga

SEQ ID NO: 129503 - RNA, 1701 nt, Artificial Sequence
  derived and/or modified CDS sequence (opt3) from hemagglutinin__InfluenzaA__ABK80245
augaagaccaucauugcccugagcuacauacucugccuuguguucgcucagaaacugcccggcaacgacaauuccacagcaacuuuguguuuagggcaccaugccgucccuaacggaacgaucguuaagaccauuacaaaugaucaaaucgaggugacuaacgcgaccgaacugguacagucuucaaguacagguggcauuugcgacagcccacaccagauccuagauggggagaauuguacccucauagacgcucugcuuggagauccgcagugcgacggcuuucaaaacaaaaagugggaucuguucguggaaagauccaaagcccauucuaauuguuaucccuacgacgucccugauuaugcaucguugaggucacucaucgccagcagugguacucuggaguuuaacaaugaauccuucaacuggacaggggugacccagaauggaacgucuagcgcuugcaagcggcgcuccaaccagucauuuuucagucgacugaauuggcucacucacuuaaaguuuaaauacccagcacugaacguuaccaugcccaauaacgagaaguucgacaaacuuuauauuuggggcgugcaucacccuggcacagauagcgaccagaucucuuuguacgcccaagcuccagggcguauuacugucuccaccaagagaucacagcagacagugauccccaacauaggaagcaggccucggguacgcgauauuaguucuagaaucuccauuuauuggaccaucguuaaaccaggugacauccugcuaauuaauagcacgggcaaccucauagccccgaggggguacuuuaagauccggucgggaaagucuuccauuaugaaaucagacgcgcccaucggcaaguguaauagugagugcauaacuccuaacgguagcauuccaaaugauaaacccuuccagaacgugaaucgcaucacauacggggcauguccucgauaugucaagcaaaacacccugaaacuugccacuggaaugagaaaugugccagaaaagcagacaaggggcaucuuuggcgcuauugccggguucaucgagaacggaugggaagguaugguggacggcugguacggguuucggcaccaaaauuccgagggaaccggccaggcagcugaucugaaaucuacgcaggccgcgauuaaccagauaaaugguaaguugaaccgucucaucgggaagaccaaugagaaauuccaucagauugaaaaggaguucagcgaagucgagggccgcauccaagaccuggaaaaauauguugaggauacaaagaucgacuuauggucauacaacgccgagcugcucguggcacuugaaaaccagcacacuauugaucugaccgacagugagaugaauaaauuguuugaaagaacaaagaagcagcuaagggagaacgcugaagauaugggaaauggcugcuucaaaauauaucauaagugugacaacgccugcaucggguccauucggaauggaacuuacgaucacgacguauaucgagacgaggcucugaacaaucgcuuucagaucaaagguguggagcucaagagcggcuacaaagauuggauucuguggaucucuuucgccauaucaugccuucuguugugugucgcacuccugggguuuaucaugugggccugccaaaagggaaacauuagauguaauaucugcauuuga

SEQ ID NO: 129504 - RNA, 1701 nt, Artificial Sequence; identical to SEQ ID NO: 129503
  derived and/or modified CDS sequence (opt3) from hemagglutinin__InfluenzaA__ABK80256

SEQ ID NO: 129505 - RNA, 1701 nt, Artificial Sequence; identical to SEQ ID NO: 128660
  derived and/or modified CDS sequence (opt3) from hemagglutinin__InfluenzaA__ABK80267

SEQ ID NO: 129506 - RNA, 1701 nt, Artificial Sequence; identical to SEQ ID NO: 128681
  derived and/or modified CDS sequence (opt3) from hemagglutinin__InfluenzaA__ABK80278

SEQ ID NO: 129507 - RNA, 1701 nt, Artificial Sequence
  derived and/or modified CDS sequence (opt3) from hemagglutinin__InfluenzaA__ABK80289
augaagaccaucauugcccugagcuacauacucugccuuguguucgcucagaaacugcccggcaacgacaauuccacagcaacuuuguguuuagggcaccaugccgucccuaacggaacgaucguuaagaccauuacaaaugaucaaaucgaggugacuaacgcgaccgaacugguacagucuucaaguacagguggcauuugcgacagcccacaccagauccuagauggggagaauuguacccucauagacgcucugcuuggagauccgcagugcgacggcuuucaaaacaaaaagugggaucuguucguggaaagauccaaagccuauucuaauuguuaccccuaugacgucccugauuacgcaucguugaggucacucguggccagcagugguacucuggaguuuaacaaugaauccuucaacuggacagggguuacccagaauggaacgucuagcgcuugcaagcggcgcuccaacaauucauuuuucagucgacugaacuggcucacucauuuaaaguuuaaauauccagcacugaaugugaccaugcccaacaacgagaaguucgacaaacuuuacaucuggggcguccaccauccuggcacagauaaugaccagauuuuucuuuaugcccaggcuagcgggcguaucacugugucuaccaagagaucccaacagacaguaauuccaaacaucggaucaaggccccggguucgcaauauaccuagcagaauuaguaucuacuggaccauugugaaaccaggugauauccugcuaaucaacucuacgggcaaucucauugccccgaggggguacuucaagauacgguccggaaagagcucgaucaugcgcucugacgcgcccauuggcaaauguaacuccgagugcaucacuccuaaugguucaauaccaaacgacaagcccuuucagaaugucaaccgaauuacauauggggcauguccuagauacgugaaacagaauacccugaaguuggccacuggaaugaggaacgugccagaaaaacaaacacggggcaucuucggcgcuaucgccggguuuauugagaauggaugggaagguauggucgauggcugguauggguuccgucaccagaacagugagggaaccggccaggcagcugaccugaaaagcacgcaagccgcgaucaaucagauuaacgguaaauugaaccgccucauagggaagaccaaugagaaguuccaccagaucgaaaaagaguuuuccgaaguugagggcaggauucaggaucuggaaaaguacguggaggacacaaaaaucgauuuauggucuuauaacgccgagcugcucguagcacuugaaaaucaacauacuaucgaccugaccgauagcgagaugaacaaguuguucgaaagaacaaagaagcagcuacgggagaaugcugaagacaugggaaacggcugcuuuaagauuuaccacaaaugugauaaugccugcauagggucaauccgaaacggaacuuaugaccaugauguguaccgcgacgaggcucugaauaacagauuccagauuaagggugucgagcucaaaaguggcuacaaggacuggauccuguggauuuccuuugccaucagcugcuuccuucuguguguggcauugcucggguuuauaaugugggccugccagaaaggaaauaucagguguaacauuugcaucuga

SEQ ID NO: 129508 - RNA, 1701 nt, Artificial Sequence; identical to SEQ ID NO: 128099
  derived and/or modified CDS sequence (opt3) from hemagglutinin__InfluenzaA__ABK80300

SEQ ID NO: 129509 - RNA, 1701 nt, Artificial Sequence; identical to SEQ ID NO: 128099
  derived and/or modified CDS sequence (opt3) from hemagglutinin__InfluenzaA__ABK80311

SEQ ID NO: 129510 - RNA, 1707 nt, Artificial Sequence
  derived and/or modified CDS sequence (opt3) from hemagglutinin__InfluenzaA__ABL07019
auggagaagaucgugcugcuccuuagcauugucucccugguuaaaucugaccagauaugcaucggcuaccacgccaacaauucaaccgaacaaguggauacaauuauggagaagaacguaacugugacgcaugcucaggacaucuuggaaaagacccacaaugggaaauuaugugaucuggacggagucaaaccccuaauucucagagauugcaguguggcagguuggcugcuuggcaacccuaugugugacgaguucaucaauguuccagaauggagcuauauaguggagaaggccaacccgacaaaugaucugugcuaccccggguccuuuaacgacuaugaggaauugaagcaucuccugucuaggaucaaucacuucgagaaaauucagaucauuccuaagucgucauggagcgaucaugaagcgaguuccggagucucuagcgcuuguccauaccugggcucccccucauuuuuccggaacgugguauggcucacuaaaaagaauaguaccuauccuacaaucaaaaagagcuacaacaauaccaaccaggaggacuuacugguucuuugggguauacaccacccaaauaacgaggccgaacaaacucgcuuguaucagaaccccacaaccuacauuucuaucgggacguccacucugaaucagcgucuagugccuaagauugcaacccgaucaaaagucaacggacagagcggcagaauggaguuuuucuggacaauccucaagccaaaugaugccaucaacuuugaaaguaauggcaacuucauugcuccggaguacgcauauaaaauagugaagaaaggggacucugccaucaugaaguccgaacuggaguacagcaauugcaacacuaaaugucaaacccccaugggagcuauuaauucgucuaugccuuuucauaacauccacccacuuacaauaggugagugccccaaguaugugaaguccaauaggcuggucuuggccaccggccuccggaacucaccucagcgcgaaaguagaaggaaaaagcgggggcuguucggagcgauugcaggcuuuaucgaggguggguggcagggaaugguugauggcugguacggcuaucaucacagcaaugaacagggguccggauacgccgcugacaaagagucuacgcaaaaggccaucgacggugugacuaacaaaguaaauagcauuaucgauaagaugaacacacaguucgaagcagugggccgcgaguuuaacaauuuagagcgaagaauugaaaaccugaauaagaaaauggaggacggguuccucgaugucuggaccuauaacgcugaacuucugguguugauggagaaugaaaggacucuagacuuccacgauucaaacguuaagaaucuguacgacaaagugcggcuccagcugcgugauaacgccaaggagcuuggaaauggcuguuuugaguucuaccauaaaugcgacaacgaauguauggagaguauacgcaaugguacauauaacuacccacaauauuccgaagaggcgagacugaagagggaggaaaucagcggggucaaguuggagucuauuggcaccuaccagauccucucaaucuauaguacgguggccagcucccuggcauuagcuauuaugauagccggacugucucuauggaugugcucgaauggcagccuccagugccggaucuguauuuga

SEQ ID NO: 129511 - RNA, 1707 nt, Artificial Sequence
  derived and/or modified CDS sequence (opt3) from hemagglutinin__InfluenzaA__ABL07030
auggagaagaucgugcugcuccuugccauugucagccugguuaaauccgaccagauaugcaucggcuaccacgcuaacaauucuaccgaacaaguggauacaauuauggagaagaacguaacugugacgcaugcacaggacaucuuggaaaagacccacaaugggaaauuaugugaucuggacggagucaaaccccuaauucucagagauugcucaguggccgguuggcugcuuggcaacccuaugugugacgaguucaucaauguuccagaauggaguuauauaguggagaaggcgaacccgacaaaugaucugugcuaccccgggagcuuuaacgacuaugaggaauugaagcaucuccuguccaggaucaaucacuucgagaaaauucagaucauuccuaagucuucguggucagaucaugaagcuagcaguggagucuccucugccuguccauaccugggcagccccuccuuuuuccggaacgugguauggcucaucaaaaagaacucaacuuauccuaccauuaaaaagaguuacaauaauacaaaccaggaggacuuacugguucuuugggguauacaccacccaaaugaugcagccgagcaaacccgcuuguaucagaaccccacuacauacaucagcauugggaccucuacgcugaaccagcggcuagugccuaagaucgcuacucguuccaaagucaauggacagucaggcagaauggaauuuuucugggcaauccucaagccaaacgacgccauuaauuuugagagcaacggcaauuucauagcuccggaauacgccuauaaaaucgugaagaaaggggauagugcgauuaugaagucugagcuggaauacggaaacugcaauaccaaaugucaaacacccaugggugcaaucaacuccagcaugccuuuucauaauauacacccacuuacuauuggcgagugccccaaguaugugaagucgaacaggcuggucuuggccaccgggcuccgaaauucuccucagcgcgaguccagaaggaaaaagcggggacuguucggcgcuaucgccgguuuuaucgaagggggauggcagggcaugguugacggcugguacggguaucaucacucaaacgagcagggaagugguuacgcagcugacaaagaaagcacacaaaaggccauugauggcgugaccaauaaaguaaacuccaucauugacaagaugaauacgcaguucgaggcgguggggcgcgaauuuaacaacuuagagcgaagaauagagaaucugaacaagaaaauggaagauggauuccucgacgucuggacuuauaaugccgagcuucugguguugauggaaaacgagaggacacuagauuuccacgacucuaauguuaagaaccuguacgauaaagugcggcuccagcugcgugacaaugcaaaggaacuuggcaacgguuguuuugaguucuaccauaaaugcgauaaugaguguauggaaagcauccgcaacgggaccuauaauuacccacaauauucagaggaagcuagacugaagagggaggagauuaguggcgucaaguuggaauccaucggaacuuaccagauccucagcauuuauucuacaguggccucaagucuggcuuuagccauaaugaucgcaggccugagccuauggaugugcuccaacgggucucuccagugccggauuuguaucuga

SEQ ID NO: 129512 - RNA, 1707 nt, Artificial Sequence
  derived and/or modified CDS sequence (opt3) from hemagglutinin__InfluenzaA__ABL10088
auggagaagaucgugcuucucuucgccauugucagccuuguuaaauccgaccagauaugcaucggcuaccacgcuaacaauucuaccgaacaaguggauacaauuauggagaagaacguaacugugacgcaugcacaggacauccuggagaaaacccacaaugggaaguugugugauuuagacggagucaaaccccugauucuaagagauugcucaguggccgguuggcuccugggcaacccuaugugugacgaguuuaucaauguuccagaauggaguuauauaguggagaaggcgaacccggucaaugaucuuugcuaccccggggacuucaacgauuaugaggaacugaagcauuugcucagcaggaucaaucacuuugagaaaauucagaucauuccuaaguccucuuggucgucacaugaagcuagccugggagugaguuccgccuguccauaccagggcaaaucuagcuucuuucggaacguaguuuggcugaucaagaaaaauuccacauaucccacuauaaagcgcucauacaacaauaccaaccaagaggaccucuuagugcugugggguauucaccacccuaaugaugcagccgagcagacaaagcuguaucagaacccaaccacuuacaucagugucgggacaagcaccuugaaccagcgacuggugccccguauugcuacgagaucugaagugaauggacaauccggcaggauggaguucuuuuggacuauccuaaaaccuaacgacgcaaucaauuucgaaucaaacggcaauuuugucgccccagaguacgcuuauaagauuguuaaaaagggggauagcaccauaaugaaaagugaacucgaguacggaaacugcaauacaaagugucagacuccgaugggugccaucaacucuuccaugcccuuccauaauauucacccucugaccaucggcgagugcccaaaauauguaaagagcaaccggcuugugcuggcgacaggguugcgcaauucgccccagagagaaaggcggcgcaagaaacgaggacucuuuggcgcaauagccgguuucauugaagggggauggcagggcaugguggacggcugguacggguaucaucacucuaacgaacaaggauccgguuacgcugccaauaaggagucaacccagaaagcaaucgacggcgucacgaacaaggugaauaguaucauugauaaaaugaacacucaguuugaagcuguugggagagaguucaacaaucuggagaggcggaucgaaaacuuaaauaagaagauggaggacggauuccuggauguguggacauauaacgccgaacuccuuguccugauggagaaugaacguaccuuggacuuucacgauagcaacgugaaaaaucuauacgacaagguacgccugcaacucagagauaacgcgaaagagcugggcaaugguuguuucgaguuuuaccauaagugcgacaacgaauguauggaguccguuaggaaugggacuuaugauuacccucaguauucugaagaggcccggcuuaaacgagaggaaauuagcggcgugaagcuggagucaauaggaaucuaccagauuuugaguaucuauuccacagucgcaagcucucucgcucuggccaucaugguggcuggcuuaucacuguggaugugcaguaacgggagccuacagugccgcauuuguauauga

SEQ ID NO: 129513 - RNA, 1707 nt, Artificial Sequence
  derived and/or modified CDS sequence (opt3) from hemagglutinin__InfluenzaA__ABL31766
auggagaagaucgugcugcuccuugccauugucagcuucguuaaauccgaccagauaugcaucggcuaccacgcuaacaauucuaccgaacaaguggauacaauuauggagaagaacguaacugugacgcaugcacaggacauccuggagaaaacccacaaugggaaguugugugauuuagacggagucaaaccccugauucuaagagauugcucaguggccgguuggcuccugggcaacccuaugugugacgaauuuaucaauguuccagaauggaguuauauaguggagaaggcgaacccgacaaaugaucuuugcuaccccgggagcuucaacgacuaugaggaacugaagcauuugcucuccaggaucaaucacuuugagaaaauucagaucauuccuaagucuucguggucagaucaugaagcuagcaguggagucuccucugccuguccauaccugggcagccccuccuucuuucggaacgugguauggcugaucaaaaagaacucaacuuauccuaccauuaaaaagaguuacaauaauacaaaccaggaggaccucuuaguucugugggguauacaccacccaaaugaugcagccgagcaaacccgccuuuaucagaaccccacuacauacaucagcauugggaccucuacguugaaccagcgacuggugccuaagaucgcuacucguuccaaagucaauggacagucaggcagaauggaguucuuuugggcaauccuaaagccaaacgacgccauuaauuucgaaagcaacggcaauuuuauagcuccggaauacgccuauaaaaucgugaagaaaggggauagugcgauuaugaagucugagcucgaauacggaaacugcaauaccaaaugucaaacacccaugggugcaaucaacuccagcaugccuuuccauaauauacacccacugacuauuggcgagugccccaaguaugugaagucgaacaggcuuguccuggccaccggguugcgcaauucuccucagcgggaguccagaaggaaaaagcggggacucuuuggcgcuaucgccgguuucaucgaagggggauggcagggcaugguugacggcugguacggguaucaucacucaaacgagcagggaagugguuacgcagcugacaaagaaagcacacaaaaggccauugauggcgugaccaauaaaguaaacuccaucauugacaagaugaauacgcaguuugaggcgguggggcgcgaguucaacaaccuggaacgaagaauagagaauuuaaacaagaaaauggaagauggauuccuggacgucuggacuuauaaugccgagcuccuugugcugauggaaaacgagaggacauuggauuuucacgacucuaauguuaagaaccuauacgauaaagugcggcugcagcuccgugacaaugcaaaggaacugggcaacgguuguuucgaguuuuaccauaaaugcgauaaugaguguauggaaagcauccgcaacgggaccuauaauuacccacaauauucagaggaagcuagacuuaagagggaggagauuaguggcgucaagcuggaauccaucggaacuuaccagaucuugagcauuuauucuacaguggccucaagucucgcucuggccauaaugaucgcaggcuuaagccuguggaugugcuccaacgggucucuacagugccggauuuguaucuga

SEQ ID NO: 129514 - RNA, 1707 nt, Artificial Sequence
  derived and/or modified CDS sequence (opt3) from hemagglutinin__InfluenzaA__ABL31780
auggagaagaucgugcugcuccuuagcauugucucccugguuaaaucugaccagauaugcaucggcuaccacgccaacaauucaaccgaacaaguggauacaauuauggagaagaacguaacugugacgcaugcucaggacaucuuggagaaaacccacaaugggaaguuaugugaucuggacggagucaaaccccuaauucucagagauugcaguguggcagguuggcugcuuggcaacccuaugugugacgaguucaucaauguuccagaauggagcuauauaguggagaaggccaacccgacaaaugaucugugcuaccccggguccuuuaacgacuaugaggaauugaagcaucuccugucuaggaucaaucacuucgagaaaauucagaucauuccuaagggaucguggucagaucaugaagcgagcaguggcgucuccucugcuuguccauaccugcggagccccuccuuuuuccgcaacgugguauggcucaucaaaaagaacucaacuuauccuaccauuaaaaagaguuacaauaauacaaaccaggaggacuuacugguucuuugggguauacaccacccaaauaacgaggccgaacaaacccgauuguaucagaaccccacuacauacaucagcauugggaccucuacgcugaaucagcgucuagugccuaagaucgcaacuagauccaaagucaacggacagucaggcaggauggaguuuuucuggaccauccucaagccaaaugaugccauuaacuuugaaagcaauggcaacuucauagcuccggaguacgcauauaaaaucgugaagaaaggggacagugccauuaugaagucugaacuggaguacggaaauugcaacacaaaaugucaaacucccaugggugcuaucaauuccagcaugccuuuucauaacauacacccacuuaccauuggcgagugccccaaguaugugaagucgaaucggcuggucuuggccacagggcuccgcaacucuccucagagagaauccaggcggaaaaagcgcggacuguucggcgcgaucgcagguuuuaucgaagggggauggcagggcaugguugauggcugguacggguaucaucacucaaaugaacagggaagugguuacgccgcugacaaagagagcacccaaaaggccauugacggcgugacgaacaaaguaaauuccaucauugauaagaugaacacucaguucgaagcaguggggcgagaguuuaacaauuuagagagaaggauagaaaaccugaauaagaaaauggaggacggauuccucgaugucuggacauauaacgcugaacuucugguguugauggagaaugaacggacccuagacuuccacgauucuaacguuaagaaucuguacgacaaagugcgucuccagcugcgcgauaacgccaaggagcuuggcaaugguuguuuugaguucuaccauaaaugcgacaacgaauguauggagagcaucagaaaugggacuuauaacuacccacaauauucagaagaggcgaggcugaagcgggaggaaauuaguggcgucaaguuggaguccaucggaacauaccagauccucagcauuuauucuaccguggccucaagucuggcauuagcuauaaugaucgccggccugagccuauggaugugcuccaaugggucucuccagugccgaauuuguaucuga

SEQ ID NO: 129515 - RNA, 1701 nt, Artificial Sequence
  derived and/or modified CDS sequence (opt3) from hemagglutinin__InfluenzaA__ABL67165
augaagaccaucauugcccugagcuacauacucugccuuguguucgcucagaaacugcccggcaacgacaauuccacagcaacuuuguguuuagggcaccaugccgucccuaacggaacgaucguuaagaccauuacaaaugaucaaaucgaggugacuaacgcgaccgaacugguacagucuucaaguacaagcgguauuugcgacuccccacaccagauccuagauggcgagaauuguacccucauagacgcucugcuuggggauccgcagugcgacggauuucaaaacaaaaagugggaucuguucguggaaagaucuaaagccuauucgaauuguuaccccuaugacgucccugaucaugcaucauugaggagccucguggccaguuccggcacucuggaguuuaacaaugaaucuuucgacuggacagguguuacccagaacgggacgagcuccgcuugcaagcggcgcucaaauaagagcuuuuucagucgacugaacuggcucacucacuuaaaauacaaguauccagcacugaaugugaccaugcccaacaaugagaaauuugauaaacuuuacaucuggggaguccaucacccuggcacagacucugaucagauuuccuuguaugcccaggcuucaggccguaucacugugagcaccaagagaagucaacagacaguaauuccaaacaucgggucuaggccccggguucgcgacguguccagcagaauaucgauuuacuggaccaucgucaagccuggagacauucugcuaaucaacucuacggguaaucucaucgccccaaggggcuacuucaagauucgguccgggaaaucaaguauaaugcgcagcgaugcgccgaucggaaaguguaacuccgagugcauuacucccaauggcucuaucccuaacgacaaaccauuucagaaugugaaccgaauaacauauggugcaugucccagauacgugaagcagaauacccugaaacuugccacugggaugaggaacgucccugaaaagaaaacacggggaauuuucggcgcuaucgccggcuuuaucgagaaugggugggaaggaaugguugaugguugguauggcuuccgucaccaaaacagcgaggggaccggacaggcagcugaccugaagucaacgcaggccgcgauuaaucaaaucaacggcaaguugaaucgccucauugguaaaaccaacgagaaguuucaucagauagaaaaagaguucagugaaguggaggggagaauccaggaucuggaaaaguacguagaggacacaaaaauugauuuaugguccuauaaugccgagcugcucguggcacuugaaaaccagcacacuaucgaccugaccgauagcgagaugaacaaguuguucgaaaggacaaagaaacaacuacgggagaaugcugaagacaugggcaacggaugcuuuaagaucuaccauaaaugugauaaugccugcauuggcucuauacgaaacgggacuuaugaccacgacgucuaccgcgaugaggcucugaauaacagauuccagaucaagggaguggagcucaaaucagguuacaaggacuggauucuguggaucaguuuugccauuagcugcuuccuucuguguguugcauugcucggcuuuaucaugugggccugccagaaggggaauauaagguguaacaucugcauuuga

SEQ ID NO: 129516 - RNA, 1701 nt, Artificial Sequence
  derived and/or modified CDS sequence (opt3) from hemagglutinin__InfluenzaA__ABL67176
augaagaccaucauugcccugagcuacauacucugccuuguguucacacagaaacugcccggcaacgacaauuccacugcuacguuguguuuagggcaccaugcagucccuaacggaacccugguuaagacaaucacuaaugaucaaauugaggugaccaacgccacagagcuaguacagucuucaaguaccgguggcaucugcgacagcccacaccagauucucgauggggaaaauuguacucugaucgacgcgcuucugggagauccgcauugcgacggcuuucagaacaaagaaugggauuuguucguggagagauccagggcuuauucuaauuguuaccccuaugacgucccugauuacgccucgcuccggucacugguggcaagcagugguacacuggaauuuaacaaugaguccuucaacuggaccgggguugcccaaaauggaacgucuagcgcuugcaagcgccgauccaacaaaucauuuuucagucgucucaauugguuacaccagcugaaguauaaguacccagcacuuaacgugacuaugcccaauaacgagaaauuugacaaguuguauauauggggcguccaucacccuagcaccgauucugaccagaucucccuguacgcccaggcuccaggcagagugacaguaucaacuaaaaggagccaacagaccguuauucccaacaucgggagucggccuugggugcgcggagucucuuccagaauuagcaucuacuggacaauagugaagccaggugauauucuacucaucaauuguaccggcaaccugauugccccgaggggguauuucaaaauccggucgggaaagucuuccaucaugcgcucagacgcgaguauuggcaagugcaauagcgaauguauaacgcccaacgguuccaucccuaaugacaaaccauuucagaacgugaaucgaauuacuuacggggcaugccccagauaugucaagcagaacacacuuaaacuggccaccggaaugaggaauguuccugagaagcaaacucggggcaucuucggcgcuauagccggguuuauugaaaacggaugggaggguaugguggauggcugguacggguuccgucaccaaaauucugagggaacaggccaggcagcugacuugaaaagcacccaggccgcgaucaaccagaucaaugguaagcucaaccgccugauugagaaaacgaaugaaaaguuucaucagaucgaaaaggaguucucagaaguagaggggaggauucaggauuuagagaaauauguggaagacaccaagauagaucuguggaguuacaacgccgagcuccuugucgcacuggaaaaccaacacacaaucgacuugacugauuccgagaugaauaaacuauucgaaagaaccaagaaacagcugcgggagaacgcugaggacaugggcaauggauguuuuaagauuuaucauaagugcgauaacgccugcaucggcagcauccgaaaugggacauacgaccacgauguguaccgcgacgaagcucucaacaauagauuccagauuaaaggaguugagcugaagucugguuauaaagacuggauacuuuggaucucauuugccauuaguuguuuccuguugugcgugguccuccugggcuuuaucaugugggcaugucagaaggggaacauuaggugcaauaucuguauauga

SEQ ID NO: 129517 - RNA, 1701 nt, Artificial Sequence; identical to SEQ ID NO: 129480
  derived and/or modified CDS sequence (opt3) from hemagglutinin__InfluenzaA__ABL67187

SEQ ID NO: 129518 - RNA, 1701 nt, Artificial Sequence; identical to SEQ ID NO: 129435
  derived and/or modified CDS sequence (opt3) from hemagglutinin__InfluenzaA__ABL67209

SEQ ID NO: 129519 - RNA, 1701 nt, Artificial Sequence; identical to SEQ ID NO: 128969
  derived and/or modified CDS sequence (opt3) from hemagglutinin__InfluenzaA__ABL67253

SEQ ID NO: 129520 - RNA, 1701 nt, Artificial Sequence
  derived and/or modified CDS sequence (opt3) from hemagglutinin__InfluenzaA__ABL67264
augaaggccaaacugcucgugcuucugugcgcuuugagcgcaaccgacgccgauacaaucuguauuggcuaccacgcgaacaauuccacugacacggucgauaccguuuuagagaagaacgugacaguaacucauucugugaaucugcuagaagacaaccacaaugggaaacucugcaagcugaaaggaauagcuccccuucagcuggguaaguguucaaucgccggcuggauuuuggggaacccugagugcgaaagucucuucagcaagaaauccuggucuuauaucgcagagaccccaaauucggaaaacggaacauguuacccgggcuauuuugccgauuacgaggagcugagagaacaacugucaagcgucaguuccuucgagagguuugaaauuuuccccaaggagucuagcuggccuaaacauaaugugaccaaggguguuacugcuuccugcucacacaaagggaagaguagcuuuuaucggaaccucuuauggcugacagagaagaauggaucuuacccaaaccuuuccaaaucauaugugaauaacaaggaaaaagaggucuuggugcuguggggcguacaucaccccagcaauaucgaagaccagaagaccauauaccgcaaagagaacgcauacguuaguguggucucuucccacuauaaccgacguuucacgccugaaaucgccaagagaccaaaagugaggaaucaggagggccggauuaacuacuauuggacucuacucgagcccggggauaccaucauuuuugaagcuaauggaaaccugaucgccccuugguacgcguucgcacuuagccgcgguuuuggcucggggauaauuacaucuaaugccuccauggacgagugugaugcuaagugccagacuccacaaggagccaucaacucaaguuucccguuucagaaugugcaucccgucaccauuggcgaauguccuaaguauguuagaagcacaaaacugaggauggugaccgguuugcggaacaucccauccauccagucucgcggacucuucggggcaauugcuggcuuuauagagggcggguggacgggaaugaucgacgguugguacggcuaucaccaucagaaugaacaagggagcggauacgccgcggaucagaagucaacucagaacgccauuaauggcaucacaaacaaaguaaauaguauaauugagaagaugaacacccaguucacugcaguggguaaagaguucaauaagcuggaaaagcgaauggagaacuuaaacaaaaaggucgacgauggguuucuggacaucuggacauacaaugcugaacuccuugugcuguuggagaacgaaagaacccuagacuuccacgauuccaauguuaaaaaccuguaugagaaggugaaaagccaacucaagaauaacgccaaggagaucggcaauggaugcuuugaguucuaccacaaauguaacaaugaaugcauggaaucugucaagaacggcacguaugacuaccccaaauauucagaggagaguaagcugaauagggaaaagauugauggggugaaacuugagagcaugggaguauaccagauccuggcuauuuauuccaccguugccucuucguuggugcuccuggucagcuuaggugcaauauccuuuuggaugugcucaaacggcagucugcagugucggaucugcauuuga

SEQ ID NO: 129521 - RNA, 1701 nt, Artificial Sequence
  derived and/or modified CDS sequence (opt3) from hemagglutinin__InfluenzaA__ABL67275
augaagaccaucauugcccugagcuacauacucugccuuguguucgcucagaaacugcccgucaacgacaauuccacagcaacuuuguguuuaggccaccaugccguuccuaacgggacgcuggugaagaccaucacaaaugaucacauugagguaacuaacgcgaccgaacuugugcaaucuucaaguacaggaagaaucugcgacagcccacaucagauucucgauggugagaauuguacccugaucgacgcucuacugggcgauccgcacugcgacggguuucagaacaaagaaugggauuuguucgucgagagguccacugccuauucuaauuguuaccccuaugacgugccugauuacgcaucgcuccggucacugguugccagcaguggaacacuggaauuuaacaaugaguccuucaacuggaccggcguggcucagaaugguacgucuagcgcaugcaagcgccgauccauaaaaucauuuuucagucgucucaacugguuacaucaacugaaguauaaguacccagcccuuaaugucacuaugcccaacaaugagaaauuugacaaguuguauaucuggggagugcaccacccuagcaccgauucugaccagauuucccuguacgcucaggccucagggagaguaacaguuagcacuaaaaggagucagcaaaccgugaucccaaacauuggcucucggcccuggguccgcggcguguccagcagaaucucgauauacuggacaauugugaagccuggggauauccuacucauuaacucuaccggaaaucugaucgcgccaagggguuauuucaaaauccgguccggcaagucaaguauuaugcgcagcaacgcaccgauagggaaguguaauuccgaaugcaucacgcccaacggaucuauuccuaaugacaaaccauuucagaacgucaaucgaaucacuuacggcgccugucccagauauguuaagcagaacacacuuaaacuggcuaccgguaugaggaaugugccugagaagcagacucgggggauauucggagccauugcaggcuuuaucgaaaacggcugggaggggaugguagacggaugguacgguuuccgucaucaaaauagcgagggcacagggcaggcugccgauuugaaaucaacccaggcggccaucaaccaaauuaauggaaagcucaaccgccugaucgagaaaacgaaugaaaaguuucaccagauugaaaaggaguucagugaaguggagggcagaauacaggacuuagagaaauaugucgaagauaccaagaucgaccugugguccuacaacgcagagcuccuuguggcucuggaaaaccagcauacaauugauuugacugacagcgagaugaauaaacuauucgaaaggacccggaagcaacugcgagagaacgccgaggauguugguaaugggugcuuuaaaaucuaucacaagugugacaacgcuugcaucggcucuauucgcaauggaacauacgaucacgacguguacagagaugaagcccucaacaauagguuccagauaaagggcgucaaacugaagucaggguauaaagacuggauccuuuggauuaguuuugcaaucagcugcuuccuguugugugugguacuccugggauuuauuaugugggccugccagaaggguaacauccgguguaauauaugcaucuga

SEQ ID NO: 129522 - RNA, 1701 nt, Artificial Sequence
  derived and/or modified CDS sequence (opt3) from hemagglutinin__InfluenzaA__ABL67286
augaagaccaucauugcccugagcuacauacucugccuuguguucgcucagaaacugcccggcaacgacaauuccacagcaacuuuguguuuagggcaccaugccgucccuaacggaacgcugguuaagaccaucacaaaugaucaaauugaggugacuaacgcgaccgaacuuguacagucuucaaguacagguagaaucugcgacagcccacaccagauucucgauggcgagaauuguacccugaucgacgcucuacugggggauccgcauugcgacggauuucagaacaaagaaugggauuuguucguggagagguccaaggccuauucuaauuguuaccccuaugacgucccugauuacgugucgcuccggucacugguugcaagcaguggcacucuggaauuuaacaaugaguccuucaacuggacagguguggcccaaaaugggaccucuagcgcuugcaaacgccgauccgacaagucauuuuucagucgucucaacugguuacaccagcugaaguauaaauacccagcacuuaaugucacgaugcccaacaaugagaaguuugauaaauuguauauauggggagugcaucacccuggcacugacagcgaucagaucucucuguacgcccaggcuuccggcagaguaaccguuucaacaaagaggagccaacagacugugauuccaaacaucgggagucggcccuggguccgcggagugucuuccagaauuagcaucuacuggaccauagugaaaucgggugacauucuacucaucaacucuacaggcaaucugauugccccuaggggguauuucaagauccgguccggaaagucaaguaucaugcgcagcgacgcgccaauuggcaaauguaacuccgaaugcauaaccccgaaugguucuauccccaacgauaagccuuuucagaaugucaaccgaauuacguacgggccaugucccagauauguuaaacagaauacucuuaagcuggcaacaggaaugaggaacgugccugagaaacaaacccggggcaucuucggcgccauagcuggguuuauugaaaauggaugggaggguaugauggacggcugguacggguuccgucaccagaacagcgagggaacuggccaggccgcagauuugaagucaacacaagcugccaucaaucagaucaacgguaaacucaaucgccugauugaaaagaccaacgagaaguuucaucagaucgaaaaagaguucagugaaguagaggggaggauucaggacuuagagaaguauguggaagauacgaaaauagaccugugguccuacaaugcggagcuccuugucgcccuggaaaaccaacacaccaucgauuugacagacagcgagaugaacaagcuauucgaaagaacuaaaaagcagcugcgggagaaugcagaggauaugggcaacggaugcuuuaagauuuaucauaaaugugacaaugcuugcaucggcucuauccgaaacgggaccuacgaucacgacguguaccgcgacgaagcccucaauaacagauuccagauuaagggaguugagcugaaaucagguuauaaggauuggauacuuuggaucaguuuugcuauuagcugcuuccuguuguguaucgugcuccugggcuuuauuaugugggccugccagaaagggaauaucagguguaacauaugcaucuga

SEQ ID NO: 129523 - RNA, 1701 nt, Artificial Sequence; identical to SEQ ID NO: 129053
  derived and/or modified CDS sequence (opt3) from hemagglutinin__InfluenzaA__ABL67297

SEQ ID NO: 129524 - RNA, 1701 nt, Artificial Sequence
  derived and/or modified CDS sequence (opt3) from hemagglutinin__InfluenzaA__ABL67308
augaagaccaucauugcccugagcuacauacucugccuuguguucgcucagaaacugcccggcaacgacaauuccauggcaacauuguguuuagggcaccaugccgucccuaacggaacucugguuaagacgaucaccaaugaucaaauugaggugacaaacgcgacugaacuuguacagucuucaaguaccgguagaaucugcgacagcccacaccagauucucgauggcgagaauuguacacugaucgacgcucuacugggggauccgcauugcgacggauuucagaacaaagaaugggauuuguucguggagagguccaaggccuauucuucguguuaccccuaugacgucccugauuacgugucacuccggagccugguugcaaguuccggcacccuggaauuuaauaacgagucuuucaauuggacugguguggcccaaaacgggacaagcuccgcuugcaaacgccgaucagacaagagcuuuuucagucgucucaauugguuacaccagcugaaguauaaauacccagcacuuaacgucaccaugcccaauaacgagaaguuugauaaauuguauauauggggagugcaucacccuggcacggacucugaucagaucucccuguacgcccaggcuucaggcagaguaacuguuagcaccaagaggagucaacagacagugauuccaaauaucgggucucggcccuggguccgcggaguguccagcagaauuucgaucuacuggacuauagugaaaccuggugacauucuacucaucaacucuaccggcaaccugauugccccaaggggguauuucaagauccgguccggaaagucaaguaucaugcgcagcgacgcgccgauugauaaauguaauuccgaaugcauaacacccaacggcucuaucccuaaugacaagccauuucagaacgucaaucgaauuaccuacggucuuugucccagauauguuaaacagaacacgcugaaguuggcaacugggaugaggaaugugccugagaaacaaacacggggaaucuucggcgccauagcuggcuuuauugaaaacgggugggagggaaugauggaugguugguacggcuuccgucaccagaauagcgaggggaccggacaggccgcagaccucaagucaacucaagcugccaucaaccagaucaauggcaaacugaaccgcuuaauugaaaagacaaaugagaaguuucaucagaucgaaaaagaguucagugaaguagaggguaggauucaggaucuggagaaguauguggaagacaccaaaauagaucucugguccuacaacgcggagcuucuggucgccuuggaaaaucaacacacgaucgaccuaaccgauagcgagaugaacaagcuguucgaaagaacuaaaaagcagcuccgggagaacgcagaggacauggggaauggcugcuuuaagauuuaucauaaaugugauaacgcuugcaucggaucuauccgaaauggcacauacgaccacgacguguaccgcgaugaagcccugaacaauagauuccagauuaaggggguugagcuuaaaucaggauauaaggacuggauacuguggaucaguuuugcuauuagcugcuucuugcucuguaucgugcuguuagguuuuauuaugugggccugccagaaaggcaacgucagguguaauaucugcauauga

SEQ ID NO: 129525 - RNA, 1701 nt, Artificial Sequence; identical to SEQ ID NO: 128610
  derived and/or modified CDS sequence (opt3) from hemagglutinin__InfluenzaA__ABL67319

SEQ ID NO: 129526 - RNA, 1701 nt, Artificial Sequence; identical to SEQ ID NO: 129353
  derived and/or modified CDS sequence (opt3) from hemagglutinin__InfluenzaA__ABL67330

SEQ ID NO: 129527 - RNA, 1701 nt, Artificial Sequence; identical to SEQ ID NO: 128564
  derived and/or modified CDS sequence (opt3) from hemagglutinin__InfluenzaA__ABL67341

SEQ ID NO: 129528 - RNA, 1701 nt, Artificial Sequence; identical to SEQ ID NO: 128564
  derived and/or modified CDS sequence (opt3) from hemagglutinin__InfluenzaA__ABL67352

SEQ ID NO: 129529 - RNA, 1701 nt, Artificial Sequence; identical to SEQ ID NO: 128080
  derived and/or modified CDS sequence (opt3) from hemagglutinin__InfluenzaA__ABL67363

SEQ ID NO: 129530 - RNA, 1701 nt, Artificial Sequence
  derived and/or modified CDS sequence (opt3) from hemagglutinin__InfluenzaA__ABL67374
augaagaccaucauugcccugagcuacauacucugccuuguguucgcucagaaacugcccggcaacgacaauuccacagcaacuuuguguuuagggcaccaugccgucccuaacggaacgaucguuaagaccauuacaaaugaucaaaucgaggugacuaacgcgaccgaacugguacagucuucaaguacagguggcauuugcgacagcccacaccagauccuagauggggagaauuguacccucauagacgcucugcuuggagauccgcagugcgacggcuuucaaaacaaaaagugggaucuguucguggaaagauccaaagcccauucuaauuguuaucccuacgacgucccugauuaugcaucguugaggucacucaucgccagcagugguacucuggaguuuaacaaugaauccuucaacuggacaggggugacccagaauggaacgucuagcgcuugcaagcggcgcuccaaccagucauuuuucagucgacugaauuggcucacucacuuaaaguuuaaauacccagcacugaacguuaccaugcccaauaacgagaaguucgacaaacuuuauauuuggggcgugcaucacccuggcacagauagcgaccagaucucuuuguacgcccaagcuccagggcguauuacugucuccaccaagagaucacagcagacagugauccccaacauaggaagcaggccucggguacgcgauauuaguucuagaaucuccauuuauuggaccaucguuaaaccaggugacauccugcuaauuaauagcacgggcaaccucauagccccgaggggguacuuuaagaugcggucgggaaagucuuccaucaugaaaucagacgcgcccauuggcaaguguaauagugagugcaucacuccuaacgguagcauaccaaaugauaaacccuuccagaacgugaaucgcauuacauacggggcauguccucgauaugucaagcaaaacacccugaaacuugccacuggaaugagaaaugugccagaaaagcagacaaggggcaucuuuggcgcuaucgccggguucauugagaacggaugggaagguaugguggacggcugguacggguuucggcaccaaaauuccgagggaaccggccaggcagcugaucugaaaucuacgcaggccgcgaucaaccagauuaaugguaaguugaaccgucucauagggaagaccaaugagaaauuccaucagaucgaaaaggaguucagcgaagucgagggccgcauucaagaccuggaaaaauauguugaggauacaaagaucgacuuauggucauacaacgccgagcugcucguggcacuugaaaaccagcacacuaucgaucugaccgacagugagaugaauaaauuguuugaaagaacaaagaagcagcuaagggagaacgcugaagauaugggagacggcugcuucaaaauuuaucauaagugugauaaugccugcauaggguccauccggaacggaacuuacgaccacgacguauaucgagaugaggcucugaauaaccgcuuucagauuaaagguguggagcucaagagcggcuacaaagacuggauccuguggauuucuuucgccaucucaugccuucuguugugugucgcacuccugggguuuauaaugugggccugccaaaagggaaauaucagauguaacauuugcaucuga

SEQ ID NO: 129531 - RNA, 1701 nt, Artificial Sequence; identical to SEQ ID NO: 128330
  derived and/or modified CDS sequence (opt3) from hemagglutinin__InfluenzaA__ABL67385

SEQ ID NO: 129532 - RNA, 1701 nt, Artificial Sequence; identical to SEQ ID NO: 128660
  derived and/or modified CDS sequence (opt3) from hemagglutinin__InfluenzaA__ABL67396

SEQ ID NO: 129533 - RNA, 1701 nt, Artificial Sequence; identical to SEQ ID NO: 128678
  derived and/or modified CDS sequence (opt3) from hemagglutinin__InfluenzaA__ABL67407

SEQ ID NO: 129534 - RNA, 1701 nt, Artificial Sequence
  derived and/or modified CDS sequence (opt3) from hemagglutinin__InfluenzaA__ABL67418
augaagaccaucauugcccugagcuacauacucugccuuguguucgcucagaaacugcccggcaacgacaauuccacagcaacuuuguguuuagggcaccaugccgucccuaacggaacgaucguuaagaccauuacaaaugaucaaaucgaggugacuaacgcgaccgaacugguacagucuucaaguacagguggcauuugcaauagcccacaccagauccuagacggggagaacuguacccucauagaugcucugcuuggagacccgcagugcgauggcuuucaaaauaaaaagugggaccuguucguggaaagauccaaagccuauucuaacuguuaccccuaugaugucccugacuacgcaucguugaggucacucguggccagcagugguacucuggaguuuaauaacgaauccuucaauuggacagggguuacccagaacggaacgucuagcgcuugcaagcggcgcuccaauaacucauuuuucagucgacugaauuggcucacucauuuaaaguuuaaauauccagcacugaacgugaccaugcccaacaaugagaaguucgauaaacuuuacaucuggggcguccaccauccuggcacagacaacgaucagaucuuuuuguaugcccaggcuagcgggcguauuacugugucuaccaagagaucccaacagacaguaauuccaaauaucggaucaaggccccggguucgcaacauaccuagcagaauuaguaucuacuggaccauugugaaaccaggugacauccugcuaaucaauucuacgggcaaccucauugccccgaggggguacuucaagauacgguccggaaagagcucgaucaugcgcucugaugcgcccauuggcaaauguaauuccgagugcaucacuccuaacgguucaauaccaaaugacaagcccuuucagaacgucaaucgaauuacauauggggcauguccuagauacgugaaacagaacacccugaagcuggccacuggaaugaggaaugugccagaaaaacaaacacggggcaucuucggcgcuaucgccggguuuauugagaacggaugggaagguauggucgacggcugguauggguuccgucaccagaauagugagggaaucggccaggcagcugaucuuaagagcacccaagccgcgauuaaccagauaaacgguaaauugaaucgccucaucgggaagacgaacgagaaguuccaccagauugaaaaagaguuuuccgaaguugagggcagaauccaggaccuggaaaaguacguggaggauaccaaaaucgacuuauggucuuauaaugccgagcugcucguagcacuugaaaaccaacauacaauugaucugacugacagcgagaugaauaaguuguucgaaaggaccaaaaagcagcuacgggagaacgcugaagauaugggaaauggcugcuuuaagauauaccacaaaugugacaacgccugcaucgggucaauucgaaauggaacauaugaucaugacguguaccgcgaugaggcucugaacaauagauuccagaucaagggugucgagcucaaaaguggcuacaaggacuggauucuguggaucuccuuugccauaagcugcuuccuucuguguguggcauugcucggguuuaucaugugggccugccagaaaggaaacauuagguguaauaucugcauuuga

SEQ ID NO: 129535 - RNA, 1707 nt, Artificial Sequence; identical to SEQ ID NO: 128076
  derived and/or modified CDS sequence (opt3) from hemagglutinin__InfluenzaA__ABL67781

SEQ ID NO: 129536 - RNA, 1707 nt, Artificial Sequence
  derived and/or modified CDS sequence (opt3) from hemagglutinin__InfluenzaA__ABL67794
auggagaagaucgugcuccuguucgccauugucagccuuguuaaauccgaccagauaugcaucggcuaccacgcuaacaauucuaccgaacaaguggauacaauuauggagaagaacguaacugugacgcaugcacaggacauccuggaaaagacccacaaugggaaguugugugauuuagacggagucaaaccccugauucuaagagauugcucaguggccgguuggcuccugggcaacccuaugugugacgaguuuaucaauguuccagaauggaguuauauaguggagaaggcgaacccggucaaugaucuuugcuaccccggggacuucaacgauuaugaggaacugaagcauuugcucagcaggaucaaucacuuugagaaaauucagaucauuccuaaguccucuuggucgucacaugaagcuagccugggagugaguuccgccuguccauaccagggcaaaucuagcuucuuucggaacguaguuuggcugaucaagaaaaauuccacauaucccacuauaaagcgcucauacaacaauaccaaccaagaggaccucuuagugcugugggguauucaccacccuaaugaugcagccgagcagacaaaacuuuaucagaacccaaccacuuacaucagugucgggacaagcaccuugaaccagcgacuggugccccguauugcuacgagaucuaaagugaauggacaauccggcaggauggaguucuuuuggacuauccuaaagccuaacgacgcaaucaauuucgaaucaaacggcaauuuuauugccccagaauacgcuuauaaaauagucaagaaaggggauagcaccaucaugaagagugagcucgaauacggaaacugcaauacaaaaugucagacuccgaugggugccauuaacucuuccaugcccuuccauaauauccacccucugaccauaggcgagugcccaaaguauguuaagagcaaccggcuugugcuggcgacaggguugcgcaauucgccccagagagagaaaaggcggaagaaacgcggacucuuuggcgcaauugccgguuucaucgaagggggauggcagggcaugguagacggcugguacggguaucaucacucuaacgagcaaggauccgguuacgcugccgacaaggaaucaacccagaaagcaaucgauggcgugacgaauaaggucaacaguauuaucgacaagaugaauacucaguuugaggcuguggggcgagaguucaacaaccuggaaagaaggauugagaauuuaaacaaaaagauggaagauggauuccuggacguuuggacauauaaugccgagcuccuugugcugauggaaaacgagcggaccuuggauuuucacgacagcaaugucaaaaaccuauacgauaaggugcgucugcaacuccgcgacaaugcgaaagaacugggcaacgguuguuucgaguuuuaccauaagugcgauaaugaguguauggaauccguaagaaacgggacuuaugacuacccucaguauucugaggaagccaggcuuaagcgggaggagauaagcggcguuaaacuggaaucaaucggaauuuaccagaucuugaguaucuauuccacaguggcaagcucucucgcucuggccauuauggucgcuggcuuaucacuguggaugugcaguaaugggagccuacagugccgaauauguaucuga

SEQ ID NO: 129537 - RNA, 1707 nt, Artificial Sequence
  derived and/or modified CDS sequence (opt3) from hemagglutinin__InfluenzaA__ABL67816
auggagaagaucgugcuccuguucgccauugucagccuuguuaaauccgaccagauaugcaucggcuaccacgcuaacaauucuaccgaacaaguggauacaauuauggagaagaacguaacugugacgcaugcacaggacauccuggaaaagacccacaaugggaaguugugugauuuagacggagucaaaccccugauucuaagagauugcucaguggccgguuggcuccugggcaacccuaugugugacgaguuuaucaauguuccagaauggaguuauauaguggagaaggcgaacccggucaaugaucuuugcuaccccggggacuucaacgauuaugaggaacugaagcauuugcucagcaggaucaaucacuuugagaaaauucagaucauuccuaaguccucuuggucgucacaugaagcuagccugggagugaguuccgccuguccauaccagggcaaaucuagcuucuuucggaacguaguuuggcugaucaagaaaaauuccacauaucccacuauaaagcgcucauacaacaauaccaaccaagaggaccucuuagugcugugggguauucaccacccuaaugaugcagccgagcagacaaaacuuuaucagaacccaaccacuuacaucagugucgggacaagcaccuugaaccagcgacuggugccccguauugcuacgagaucuaaagugaauggacaauccggcaggauggaguucuuuuggacuauccuaaagccuaacgacgcaaucaauuucgaaucaaacggcaauuuuauugccccagaauacgcuuauaaaauagucaagaaaggggauagcaccaucaugaagagugagcucgaauacggaaacugcaauacaaaaugucagacuccgaugggugccauuaacucuuccaugcccuuccauaauauccacccucugaccauaggcgagugcccaaaguauguuaagagcaaccggcuugugcuggcgacaggguugcgcaauucgccccagagagagaggcggcgcaaaaagcgaggacucuuuggcgcaauugccgguuucaucgaagggggauggcagggcaugguagacggcugguacggguaucaucacucuaacgagcaaggauccgguuacgcugccgacaaagaaucaacccagaaggcaaucgauggcgugacgaauaaagucaacaguauuaucaauaagaugaacacucaguuugaggcuguggggagagaguucaacaaucuggaaaggcggauugagaacuuaaauaagaaaauggaagacggauuccuggauguuuggacauauaacgccgagcuccuugugcugauggaaaaugagcguaccuuggacuuucacgauagcaacgucaagaaucuauacgacaaagugcgccugcaacucagagauaacgcgaaggaacugggcaaugguuguuucgaguuuuaccauaaaugcgacaacgaguguauggaauccguaaggaaugggacuuaugauuacccucaguauucugaggaagcccggcuuaagcgagaggagauaagcggcguuaagcuggaaucaaucggaauuuaccagaucuugaguaucuauuccacaguggcaagcucucucgcucuggccauuauggucgcuggcuuaucacuguggaugugcaguaacgggagccuacagugccgcauauguaucuga

SEQ ID NO: 129538 - RNA, 1707 nt, Artificial Sequence
  derived and/or modified CDS sequence (opt3) from hemagglutinin__InfluenzaA__ABL67827
auggagaagaucgugcuccuguucgccauugucagccuuguuaaauccgaccacauaugcaucggcuaccaugcuaacaauucuaccgaacagguggauacaauuauggagaagaacguaacugugacgcacgcacaagacauccuggaaaagacccauaaugggaaguugugugauuuagacggagucaaaccccugauucuaagagauugcucaguggccgguuggcuccugggcaacccuaugugugacgaguuuaucaauguuccagaauggaguuauauaguggagaaggcgaacccggucaaugaucuuugcuaccccggggacuucaacgauuaugaggaacugaagcacuugcucagcaggaucaaucauuuugagaaaauucagaucauuccuaaguccucuuggucgucacacgaagcuagccugggagugaguuccgccuguccauaccagggcaaaucuagcuucuuucggaacguaguuuggcugaucaagaaaaauuccacauaucccacuauaaagcgcucauacaacaauaccaaccaggaggaccucuuagugcugugggguauucaccauccuaaugaugcagccgagcaaacaaaacuuuaucagaacccaaccacuuacaucagugucgggacaagcaccuugaaccagcgacuggugccccguauugcuacgagaucuaaagugaauggacaguccggcaggauggaguucuuuuggacuauccuaaagccuaacgacgcaaucaauuucgagucaaacggcaauuuuauugccccagaauacgcuuaugagauagucaaaaagggggauagcaccaucaugaaaagugaacucgaguacggaaacugcaauacaaagugucaaacuccgaugggugccauuaacucuuccaugcccuuccacaauauccauccucugaccauaggcgagugcccaaaauauguuaagagcaaccggcuugugcuggcgacaggguugcgcaauucgccccagauugaaagaaggcggaagaaacgcggacucuuuggcgcaaucgccgguuuccuggaagggggauggcagggcaugguagacggcugguacggguaucaccacucuaacgaacagggauccgguuacgcugccgacaaggagucaacccaaaaagcaaucgauggcgugacgaauaaggucaacaguauuaucaauaaaaugaacacucaguuugaagcuguggggcgagaguucaacaauuuagagagaaggauugaaaaccugaauaagaagauggaggacggauuccucgauguuuggacauauaacgccgaacuucugguguugauggagaaugaacggacccuagacuuucaugauagcaacgucaaaaaucuguacgacaaggugcgucuccagcugcgcgauaacgcgaaagagcuuggcaaugguuguuucgaguuuuaccacaagugcgacaacgaauguauggaguccguaagaaaugggacuuaugauuacccucaauauucugaagaggccaggcugaaacgggaggaaauaagcggcguuaaguuggagucaaucggaauuuaccagauccucaguaucuauuccacaguggcaagcucucuggcuuuagccauuauggucgcuggccugucacuauggaugugcaguaacgggagccuccagugccgaauauguaucuga

SEQ ID NO: 129539 - RNA, 1701 nt, Artificial Sequence
  derived and/or modified CDS sequence (opt3) from hemagglutinin__InfluenzaA__ABM22015
augaagaccaucauugcccugagcuacauacucugccuuguguucgcucagaaacugcccggcaacgacaauuccacagcaacuuuguguuuagggcaccaugccgucccuaacggaacgaucguuaagaccauuacaaaugaucaaaucgaggugacuaacgcgaccgaacugguacagucuucaaguacagguggcauuugcgacagcccacaccagauccuagauggggagaauuguacccucauagacgcucugcuuggagauccgcagugcgacggcuuucaaaacaaaaagugggaucuguucguggaaagauccaaagccuauucuaauuguuaccccuaugacgucccugauuacgcaucguugaggucacucguggccagcagugguacucuggaguuuaacaaugaauccuucaacuggacagggguuacccagaauggaacgucuagcgcuugcaagcggcgcuccaacaauucauuuuucagucgacugaacuggcucacucauuuaaaguuuaaauauccagcacugaaugugaccaugcccaacaacgagaaguucgacaaacuuuacaucuggggcguccaccauccuggcacagauaaugaccagaucuuuuuguaugcccaggcuagcgggcguauuacugugucuaccaagagaucccaacagacaguaauuccaaacaucggaucaaggccccggguucgcaauauaccuagcagaauuaguaucuacuggaccauugugaaaccaggugauauccugcuaaucaacucuacgggcaaucucauugccccgaggggguacuucaagauacgguccggaaagagcucgaucaugcgcucugacgcgcccauuggcaaauguaacuccgagugcaucacuccuaaugguucaauaccaaacgacaagcccuuucagaaugucaaccgaauuacauauggggcauguccuagauacgugaaacagaauacccugaagcuggccacuggaaugaggaacgugccagaaaaacaaacacggggcaucuucggcgcuaucgccggguuuauugagaauggaugggaagguauggucgauggcugguauggguuccgucaccagaacagugagggaaucggccaggcagcugaccuuaagagcacccaagccgcgauuaaucagauaaacgguaaauugaaccgccucaucgggaagacgaaugagaaguuccaccagauugaaaaagaguuuuccgaaguugagggcagaauccaggaucuggaaaaguacguggaggacaccaaaaucgauuuauggucuuauaacgccgagcugcucguagcacuugaaaaucaacauacaauugaccugacugauagcgagaugaacaaguuguucgaaaggaccaaaaagcagcuacgggagaaugcugaagacaugggaaacggcugcuuuaagauauaccacaaaugugauaaugccugcaucgggucaauucgaaacggaacauaugaccaugauguguaccgcgacgaggcucugaauaacagauuccagaucaagggugucgagcucaaaaguggcuacaaggacuggauucuguggaucuccuuugccauaagcugcuuccuucuguguguggcauugcucggguuuaucaugugggccugccagaaaggaaauauuaggugugauaucugcauuuga

SEQ ID NO: 129540 - RNA, 1701 nt, Artificial Sequence
  derived and/or modified CDS sequence (opt3) from hemagglutinin__InfluenzaA__ABM22026
augaaggccaaacugcucgugcuucugugcgcuuucaccgcaacauacgccgacacuaucuguauuggcuaucacgcgaacaauagcacggauaccgucgacacaguuuuggagaagaacgugacuguaacccauuccgugaauuuacuggaagauucucacaacgggaaacuaugcagacucaagggaacagcuccccugcagcuugguaauuguucaauagccggcuggauccuggggaacccugagugcgaaaguuuguuuagcaaagaguccuggucuuacauugcagaaaccccaaauccgaagaacggaacuuguuaucccggcuacuucgccgacuaugaggagcucagggaacaacugucgucagucagcaguuuuaagcgguucgagaucuuuccuaaagauuccucuuggccaaaucauacagugaccaaggguguuacggcuagcugcucccacaacgggaaaucaaguuucuacaagaaucugcucugguuaacugaaaagaacggacuguaucccaaucuuagcaagucuuacgugaacaagaaaggcaaggaggucuuggugcuguggggcguacaucacccuuccaauaugggggaccagcgcgcaauuuaccacaaagagaacgccuauguuucagugcuaagcagucauuacucucgacguuuuaccccagaaaucgcuagaaggcccaagguccgggaucaggagggacgcauaaacuauuacuggacacuccuggaaccuggugacacuaucauuuucgaggccaauggcaaccuuaucgcgccaugguaugcauuugcccuguccagaggguucggaagcggcauuaucauaucgaaugcuucuaugggugaaugugaugccaaaugccagaccccgcaaggggcaauuaacuccucauugcccuuucagaaugugcacccugugacaaucggagaguguccaaaguacgucaggaguaccaaacuccggaugguuacgggccugcgcaacgugcccagcauucagucccgaggcuuauucggggcuaucgccggauuuaucgaggguggcuggacugggaugauugacggaugguauggcuaccaucaccagaaugaacaagguucuggguacgcggccgaucagaaaagcacacagaacgcaauaaauggcaucaccaacaagguaaauucaauuaucgagaaaaugaacacucaguucacagcugugggaaaggaguucaauaaacuggaaagaaggauggaaaaccucaauaagaaagucgacgauggcuuucuugacauauggaccuauaacgccgagcuguuggugcuacuggagaacgaacggacgcucgacuuccacgauaguaauguuaagaaccuguacgagaaggugaaaaaucaacuuaagaacaaugcuaaagaaauugggaacggaugcuuugaguucuaucauaaguguaauaacgaaugcauggaguccgucaaaaaugguaccuacgacuauccuaaguacagcaaggagucuaaacugaaccgugaaaagaucgauggcgugaaauuggagucaauggggguauaucagauccucgccauuuacaguacaguugcaagcucccugguguuacuggucucucuaggagccaucucguuuuggaugugcagcaauggcucccuccagugucgcauuugcauauga

SEQ ID NO: 129541 - RNA, 1701 nt, Artificial Sequence; identical to SEQ ID NO: 128681
  derived and/or modified CDS sequence (opt3) from hemagglutinin__InfluenzaA__ABM22037

SEQ ID NO: 129542 - RNA, 1701 nt, Artificial Sequence; identical to SEQ ID NO: 128099
  derived and/or modified CDS sequence (opt3) from hemagglutinin__InfluenzaA__ABM22059

SEQ ID NO: 129543 - RNA, 1701 nt, Artificial Sequence; identical to SEQ ID NO: 129353
  derived and/or modified CDS sequence (opt3) from hemagglutinin__InfluenzaA__ABM22070

SEQ ID NO: 129544 - RNA, 1701 nt, Artificial Sequence
  derived and/or modified CDS sequence (opt3) from hemagglutinin__InfluenzaA__ABM22081
augaagaccaucauugcccugagcuacauacucugccuuguguucgcucagaaacugcccggcaacgacaauuccacagcaacuuuguguuuagggcaccaugccgucccuaacggaacgaucguuaagaccauuacaaaugaucaaaucgaggugacuaacgcgaccgaacugguacagucuucaaguacagguggcauuugcgacagcccacaccagauccuagauggggagaauuguacccucauagacgcucugcuuggagauccgcagugcgacggcuuucaaaacaaaaagugggaucuguucguggaaagauccaaagccuauucuaauuguuaccccuaugacgucccugaucaugcaucguugaggucacucguggccagcagugguacucuggaguuuaacaaugaauccuucgacuggacagggguuacccagaacggaacgucuagcgcuugcaagcggcgcuccaauaagucauuuuucagucgacugaacuggcucacucacuuaaaauacaaguauccagcacugaaugugaccaugcccaacaaugagaaauuugauaaacuuuacaucuggggcguccaucacccuggcacagacagcgaucagauuucuuuguaugcccaggcuuccgggcguaucacugugucaaccaagagaagccaacagacaguaauuccaaacaucggaaguaggccccggguucgcgacgugucuuccagaauaagcauuuacuggaccaucgucaagccuggugacauucugcuaaucaacucgacgggcaaucucaucgccccaaggggguacuucaagauucggucuggaaaauccucaauaaugcgcagugaugcgccgaucggcaaguguaacagcgagugcauuacucccaaugguuccaucccuaacgacaaaccauuucagaaugugaaccgaauaacauauggggcaugucccagauacgugaagcagaauacccugaaacuugccacuggaaugaggaacauuccugaaaagcaaacacggggcaucuucggcgcuaucgccggguuuauugagaauggaugggaagguauggucgauggcugguauggguuccgucaccagaacucugagggaaccggccaggcagcugaccugaaaagcacgcaagccgcgaucaaucagauuaacgguaaguugaaucgccucauagggaagaccaacgagaaauuucaucagaucgaaaaggaguucucagaaguugagggcaggauucaggaucuggaaaaauacguggaggacacaaagaucgauuuauggaguuauaaugccgagcugcucguagcacuugaaaaccaacacacuaucgaccugaccgauuccgagaugaacaaauuguucgaaagaacaaagaagcagcuacgggagaaugcugaagacaugggaaacggcugcuuuaaaauuuaccauaagugugauaaugccugcauagggagcauccgaaacggaacuuaugaccacgacguguaccgcgaugaggcucugaauaacagauuccagauuaaaggugucgagcucaagucuggcuacaaagacuggauccuguggauuucauuugccaucaguugcuuccuucuguguguggcauugcucggguuuauaaugugggccugccagaagggaaauaucagguguaacauuugcaucuga

SEQ ID NO: 129545 - RNA, 1701 nt, Artificial Sequence
  derived and/or modified CDS sequence (opt3) from hemagglutinin__InfluenzaA__ABM22092
augaagaccaucauugcccugagcuacauacucugccuuguguucgcucagaaacugcccggcaacgacaauuccacagcaacuuuguguuuagggcaccaugccgucccuaacggaacgaucguuaagaccauuacaaaugaucaaaucgaggugacuaacgcgaccgaacugguacagucuucaaguacaggugagauuugcgacagcccacaccagauccuagauggcgaaaauuguacccucauagacgcucugcuuggggauccgcagugcgacggauuucaaaacaaaaagugggaucuguucguggagagauccaaagccuauucuaauuguuaccccuaugacgucccugaucaugcaucguugaggucacucguggccagcaguggcacucuggaauuuaacaaugaguccuucgacugggcugguguuacacagaacgggaccucuagcgcaugcaagcggcgcuccaauaagucauuuuucagucgacugaacuggcucacgcacuuaaaauacaaguauccagcccugaaugugacuaugcccaacaaugagaaauuugauaaacuuuacaucuggggaguccaucacccuggcaccgacagcgaucagauuucuuuguaugcucaggccuccggccguaucacagugucaacuaagagaagccaacagaccguaauuccaaacaucgggaguaggccccggguucgcgacgugucuuccagaauaagcauuuacuggacaaucgucaagccuggagacauucugcuaaucaacucgaccgguaaucucaucgcgccaaggggcuacuucaagauucggucugggaaauccucaauaaugcgcagugaugcaccgaucggaaaguguaacagcgaaugcauuacgcccaauggcuccaucccuaacgacaaaccauuucagaaugugaaccgaauaacuuauggugccugucccagauacgugaagcagaauacacugaaacuugcuaccgggaugaggaacgucccugagaagcaaacucggggaauuuucggcgccaucgcaggcuuuaucgaaaaugggugggagggaaugguugaugguugguauggcuuccgucaccagaacucugaggggacaggacaggcugccgaccugaaaagcacccaagcggccauuaaucagaucaacggcaaguugaaucgccucauugguaagacgaacgaaaaauuucaucagauagagaaggaguucucagaaguggaagggagaauccaggaucuggagaaauacguagaggacaccaagauugauuuauggaguuauaaugcagaacugcucguggcucuugagaaccaacacacaaucgaccugacugauuccgaaaugaacaaauuguucgagaggaccaagaagcagcuacgggaaaaugccgaggacaugggcaacggaugcuuuaaaaucuaccauaagugugauaaugcuugcauuggcagcauacgaaacgggacauaugaccacgacgucuaccgcgaugaggcccugaauaacagauuccagaucaaaggaguggaacucaagucugguuacaaagacuggauucuguggaucucauuugcaauuaguugcuuccuucuguguguugccuugcucggcuuuaucaugugggcuugccagaaggggaauauaagguguaacaucugcauuuga

SEQ ID NO: 129546 - RNA, 1701 nt, Artificial Sequence; identical to SEQ ID NO: 129358
  derived and/or modified CDS sequence (opt3) from hemagglutinin__InfluenzaA__ABM22103

SEQ ID NO: 129547 - RNA, 1701 nt, Artificial Sequence; identical to SEQ ID NO: 128564
  derived and/or modified CDS sequence (opt3) from hemagglutinin__InfluenzaA__ABM22114

SEQ ID NO: 129548 - RNA, 1701 nt, Artificial Sequence; identical to SEQ ID NO: 129503
  derived and/or modified CDS sequence (opt3) from hemagglutinin__InfluenzaA__ABM22125

SEQ ID NO: 129549 - RNA, 1701 nt, Artificial Sequence
  derived and/or modified CDS sequence (opt3) from hemagglutinin__InfluenzaA__ABM22136
augaagaccaucauugcccugagcuacauacucugccuuguguucgcucagaaacugcccggcaacgacaauuccacagcaacuuuguguuuagggcaccaugccgucccuaacggaacgaucguuaagaccauuacaaaugaucaaaucgaggugacuaacgcgaccgaacugguacagucuucaaguacagguggcauuugcgacagcccacaccagauccuagauggggagaauuguacccucauagacgcucugcuuggagauccgcagugcgacggcuuucaaaacaaaaagugggaucuguucguggaaagauccaaagccuauucuaauuguuaccccuaugacgucccugauuacgcaucguugaggucacucguggccagcagugguacucuggaguuuaacaaugaauccuucaacuggacagggguuacccagaauggaacgucuagcgcuugcaagcggcgcuccaacaauucauuuuucagucgacugaacuggcucacucauuuaaaguuuaaauauccagcacugaaugugaccaugcccaacaacgagaaguucgacaaacuuuacaucuggggcguccaccauccuggcacagauaaugaccagaucuuuuuguaugcccaggcuagcgggcguauuacugugucuaccaagagaucccaacagacaguaauuccaaacaucggaucaaggccccggguucgcaauauaccuagcagaauuaguaucuacuggaccauugugaaaccaggugauauccugcuaaucaacucuacgggcaaucucauugccccgaggggguacuucaagauacgguccggaaagagcucgaucaugcgcucugacgcgcccauuggcaaauguaacuccgagugcaucacuccuaaugguucaauaccaaacgacaagcccuuucagaaugucaaccgaauuacauauggggcauguccuagauacgugaaacagaauacccugaagcuggccaucggaaugaggaacgugccagaaaaacaaacucggggcaucuucggcgcuauugccggguuuaucgagaauggaugggaagguauggucgauggcugguauggguuccgucaccagaacagugagggaauuggccaggcagcugaccuuaagagcacacaagccgcgauaaaucagaucaacgguaaauugaaccgccucauugggaagaccaaugagaaguuccaccagaucgaaaaagaguuuuccgaaguugagggcagaauccaggaucuggaaaaguacguggaggacacgaaaauugauuuauggucuuauaacgccgagcugcucguagcacuugaaaaucaacauaccauagaccugacagauagcgagaugaacaaguuguucgaaaggacuaaaaagcagcuacgggagaaugcugaagacaugggaaacggcugcuuuaagaucuaccacaaaugugauaaugccugcauugggucaauccgaaacggaaccuaugaccaugauguguaccgcgacgaggcucugaauaacagauuccagauuaagggugucgagcucaaaaguggcuacaaggacuggauccuguggauauccuuugccaucagcugcuuccuucuguguguggcauugcucggguuuauuaugugggccugccagaaaggaaauaucagguguaacauuugcaucuga

SEQ ID NO: 129550 - RNA, 1701 nt, Artificial Sequence; identical to SEQ ID NO: 128681
  derived and/or modified CDS sequence (opt3) from hemagglutinin__InfluenzaA__ABM22147

SEQ ID NO: 129551 - RNA, 1701 nt, Artificial Sequence; identical to SEQ ID NO: 128969
  derived and/or modified CDS sequence (opt3) from hemagglutinin__InfluenzaA__ABM22158

SEQ ID NO: 129552 - RNA, 1701 nt, Artificial Sequence; identical to SEQ ID NO: 128969
  derived and/or modified CDS sequence (opt3) from hemagglutinin__InfluenzaA__ABM22169

SEQ ID NO: 129553 - RNA, 1701 nt, Artificial Sequence; identical to SEQ ID NO: 128969
  derived and/or modified CDS sequence (opt3) from hemagglutinin__InfluenzaA__ABM22180

SEQ ID NO: 129554 - RNA, 1701 nt, Artificial Sequence; identical to SEQ ID NO: 128969
  derived and/or modified CDS sequence (opt3) from hemagglutinin__InfluenzaA__ABM22191

SEQ ID NO: 129555 - RNA, 1701 nt, Artificial Sequence; identical to SEQ ID NO: 128969
  derived and/or modified CDS sequence (opt3) from hemagglutinin__InfluenzaA__ABM22202

SEQ ID NO: 129556 - RNA, 1701 nt, Artificial Sequence; identical to SEQ ID NO: 128969
  derived and/or modified CDS sequence (opt3) from hemagglutinin__InfluenzaA__ABM22213

SEQ ID NO: 129557 - RNA, 1701 nt, Artificial Sequence; identical to SEQ ID NO: 128969
  derived and/or modified CDS sequence (opt3) from hemagglutinin__InfluenzaA__ABM22224

SEQ ID NO: 129558 - RNA, 1701 nt, Artificial Sequence; identical to SEQ ID NO: 128969
  derived and/or modified CDS sequence (opt3) from hemagglutinin__InfluenzaA__ABM22235

SEQ ID NO: 129559 - RNA, 1701 nt, Artificial Sequence
  derived and/or modified CDS sequence (opt3) from hemagglutinin__InfluenzaA__ABM22268
augaaggugaaacugcucguccuucugugcgccuucaccgcuacauacgcagacacuaucuguauuggcuaucacgccaacaauagcacggauaccguugacacaguguuggagaagaacguaacugugacccauuccgucaauuuacuggaagauucucacaacgggaaacuaugcagacucaagggaacagcgccccugcagcuugguaauuguucaguggcuggcuggauacuggggaacccugagugcgaaaguuuguuuagcaaagaguccuggucuuacaucgccgaaaccccaaauccggagaacggaacuuguuaucccggcuacuucgcagacuaugaggaacucagggagcaacugucgucaguuagcaguuuugaacgguucgagauuuuuccuaaggaguccucuuggccaaaucauacagugaccaagggugucacggccagcugcucccacaacgggaaaucaaguuucuacaagaaucugcucugguuaacugaaaagaacggacuguaucccaaucuuagcaagucuuacgugaacaauaaagagaaggaaguauugguucuguggggcgugcaucacccuuccaacaucggcgaucagcgcgcuauuuaccacaccgagaacgcauaugucucaguggugagcagucauuacucucgacguuuuacaccagaaaucgccaagagacccaaagucagggaccaggaggggcggauaaauuauuacuggacucuacucgagccuggagauaccaucauuuucgaagcuaacgguaaucugaucgccccaugguaugcguuugcacuuucccgcggcuucgggagcggaauuaucacaucgaacgccucuaugggcgagugugacgcuaagugccagaccccgcaaggugccauaaauuccucacugcccuuucagaacguucacccugugacgauuggggaauguccaaaauacguaagaaguacuaaguugaggauggugacaggacuccggaauauccccagcauucagucccgcggccuguucggcgcaaucgcuggguuuaucgagggagguuggaccggcaugauugaugggugguauggauaccaucaccagaacgaacaaggcucugguuacgccgcggaccagaaaagcacucagaaugccauagaugggaucacaaacaaggucaauucagugauugagaaaaugaacacccaguucacggcaguuggcaaggaguucaauaaguuagaacgaagaauggagaaccugaauaaaaagguggacgauggauuucucgacaucuggaccuauaacgcugaacuucuggucuugcuagagaacgaaaggacacuggacuuccacgauaguaaugugaaaaaccucuacgagaagguuaaaaaucaacugaagaacaaugccaaggagauaggcaacgggugcuuugaguucuaucauaaauguaauaacgaaugcauggaauccguaaagaauggaacuuacgacuauccuaaauacagcgaggagucuaaacuuaaccgggagaaaauugauggugugaagcuggaaucaaugggcgucuaucagaucuuggcuaucuacaguaccguggccagcucccucguccuguuagugucucugggggcaauuucguuuuggaugugcagcaauggaucccuacagugucguaucugcauuuga

SEQ ID NO: 129560 - RNA, 1701 nt, Artificial Sequence
  derived and/or modified CDS sequence (opt3) from hemagglutinin__InfluenzaA__ABM22279
augaaggccaaacugcucgugcuucugugcgcuuucaccgcaacauacgccgacacuaucuguauuggcuaucacgcgaacaauagcacggauaccgucgacacaguuuuggagaagaacgugacuguaacccauuccgugaauuuacuggaagauagacacaacgggaaacuaugcaggcucaagggaacagcuccccugcagcuugguaauuguucugucgccggcuggauacuggggaacccugagugcgaaucauuguuuaguaaagagagcugguccuacaucgcagaaaccccaaauccggagaacggaacuuguuaucccggcuacuucgccgacuaugaggaacuccgggagcaacugucuucggugagcucauuugaacgcuucgagauuuuuccuaaggagaguuccuggccaaaucauacaguuaccaagggugugacggcuucuugcagccacaacgggaaauccucauucuacaagaaucugcucugguuaacugagaaaaacggacuguaucccaaucuuaguaagagcuacgucaacaauaaagaaaaggaaguguugguacuguggggcguucaucacccuucuaacaucggcgaucagcgagcaauuuaccacaccgagaacgccuauguguccgucgugucaagccauuacagucguagauuuacaccagaaaucgcuaagaggcccaaagugcgggaccaggaggggcgcauaaauuauuacuggacucuacucgagccuggagauaccaucauuuucgaagccaacgguaaucugaucgcgccaugguaugcauuugcccuuucuagaggcuucggguccggaauuaucacaagcaacgcuucgaugggcgacugugaugccaagugccagaccccgcaaggugcaauaaauucuucccugcccuuucagaacguccacccuguuacgauugggggauguccaaaauacgugaggucaacuaaguugcggaugguaacaggccuccgcaauauccccaguauucagagccgaggccuguucggggcuaucgccggauuuaucgaggguggcuggaccgggaugauugacggaugguauggcuaccaucaccagaacgaacaagguuccggguacgcggccgauaaaaagucuacucagaaugcaauagacggcaucacaaacaaagugaauagcgucauugagaagaugaacacccaguucacggcugugggaaaggaguucaauaaauuagaaagaaggauggagaaccugaauaagaaaguugaugacggcuuucucgacaucuggaccuauaacgccgaacuucugguguugcuagagaacgaacggacacuggauuaccacgacucaaaugucaagaaccucuaugagaaagugaagaaucagcugaagaacaaugcuaaagaaauagggaacggaugcuucgaguuuuaccauaaguguaauaacgagugcauggaaaguguuaaaaaugguacuuaugauuacccuaaguauuccgaggaaagcaaacuuaagcgugagaagauugacggcguaaaacuggagucuauggggguguaccaaaucuuggccaucuacucaaccgucgcaaguagccucgugcuguuagucucccugggagccauuucuuucuggaugugcucgaacggcagccuacagugucgcaucugcauuuga

SEQ ID NO: 129561 - RNA, 1701 nt, Artificial Sequence
  derived and/or modified CDS sequence (opt3) from hemagglutinin__InfluenzaA__ABM22290
augaaggccaaacugcucgugcuucugugcgcuuucaccgcaacauacgccgacacuaucuguauuggcuaucacgcgaacaauagcacggauaccgucgacacaguuuuggagaagaacgugacuguaacccauuccgugaauuuacuggaaaacucucacaaugggaaacuaugcagacucaagggaacagcuccccugcagcuugguaacuguucagucgccggcuggauacuggggaauccugagugcgaaaguuuguuuagcaaagaguccuggucuuacaucgcagaaaccccaaacccggagaauggaacuuguuaucccggcuacuucgccgauuaugaggaacucagggagcaacugucgucagugagcaguuuugaacgguucgagauuuuuccuaaggaguccucuuggccaaaccauacaguuaccaagggugugacggcuagcugcucccacaaugggaaaucaaguuucuacaagaaccugcucugguuaacugaaaagaauggacuguaucccaaccuuagcaagucuuacgucaauaacaaagagaaggaaguguugguacuguggggcguucaucacccuuccaacaucggcgaccagcgcgcaauuuaccacaccgagaaugccuaugugucagucgugagcagucauuacucucgacguuuuacaccagaaaucgcuaagagacccaaagugagggaucaggaggggcggauaaacuauuacuggacucuacucgagccuggagacaccaucauuuucgaagccaaugguaaccugaucgcgccaugguaugcauuugcccuuucccgcggcuucgggagcggaauuaucacaucgaaugcuucuaugggcgagugugaugccaagugccagaccccgcaaggugcaauaaacuccucacugcccuuucagaauguccacccuguuacgauuggggaauguccaaaauacgugagaaguacuaaguugaggaugguaacaggacuccggaacauccccagcauucagucccgcggccuguucggcgcuaucgccggguuuaucgagggagguuggaccggcaugauugacgggugguauggauaccaucaccagaaugaacaaggcucugguuacgcggccgaucagaaaagcacucagaacgcaauagacgggaucacaaauaaggugaacucagucauugagaaaaugaauacccaguucacggcugugggcaaggaguucaacaaguuagaacgaagaauggagaaucugaacaaaaagguugaugacggauuucucgauaucuggaccuauaacgccgaacuucugguguugcuagagaaugaaaggacacuggacuuccacgacaguaacgucaaaaaucucuacgagaaggugaaaaaccaacugaagaauaacgcuaaggagauaggcaaugggugcuuugaguucuaucauaaauguaacaaugaaugcauggaauccguaaagaacggaacuuacgauuauccuaaauacagcgaggagucuaaacuuaaucgggagaaaauugacgguguuaagcuggaaucaaugggcguguaucagaucuuggccaucuacaguaccgucgcaagcucccucgugcuguuagucucucugggggccauuucguuuuggaugugcagcaacggaucccuacagugucguaucugcauuuga

SEQ ID NO: 129562 - RNA, 1701 nt, Artificial Sequence; identical to SEQ ID NO: 128303
  derived and/or modified CDS sequence (opt3) from hemagglutinin__InfluenzaA__ABM22301

SEQ ID NO: 129563 - RNA, 1701 nt, Artificial Sequence; identical to SEQ ID NO: 128303
  derived and/or modified CDS sequence (opt3) from hemagglutinin__InfluenzaA__ABM22312

SEQ ID NO: 129564 - RNA, 1701 nt, Artificial Sequence; identical to SEQ ID NO: 128303
  derived and/or modified CDS sequence (opt3) from hemagglutinin__InfluenzaA__ABM22323

SEQ ID NO: 129565 - RNA, 1701 nt, Artificial Sequence; identical to SEQ ID NO: 128303
  derived and/or modified CDS sequence (opt3) from hemagglutinin__InfluenzaA__ABM22334

SEQ ID NO: 129566 - RNA, 1701 nt, Artificial Sequence; identical to SEQ ID NO: 128304
  derived and/or modified CDS sequence (opt3) from hemagglutinin__InfluenzaA__ABM22345

SEQ ID NO: 129567 - RNA, 1701 nt, Artificial Sequence; identical to SEQ ID NO: 128304
  derived and/or modified CDS sequence (opt3) from hemagglutinin__InfluenzaA__ABM22356

SEQ ID NO: 129568 - RNA, 1701 nt, Artificial Sequence; identical to SEQ ID NO: 128304
  derived and/or modified CDS sequence (opt3) from hemagglutinin__InfluenzaA__ABM22367

SEQ ID NO: 129569 - RNA, 1698 nt, Artificial Sequence; identical to SEQ ID NO: 128889
  derived and/or modified CDS sequence (opt3) from hemagglutinin__InfluenzaA__ABM66864

SEQ ID NO: 129570 - RNA, 1701 nt, Artificial Sequence; identical to SEQ ID NO: 128969
  derived and/or modified CDS sequence (opt3) from hemagglutinin__InfluenzaA__ABM66886

SEQ ID NO: 129571 - RNA, 1701 nt, Artificial Sequence; identical to SEQ ID NO: 128969
  derived and/or modified CDS sequence (opt3) from hemagglutinin__InfluenzaA__ABM66897

SEQ ID NO: 129572 - RNA, 1701 nt, Artificial Sequence; identical to SEQ ID NO: 128969
  derived and/or modified CDS sequence (opt3) from hemagglutinin__InfluenzaA__ABM66908

SEQ ID NO: 129573 - RNA, 1701 nt, Artificial Sequence; identical to SEQ ID NO: 128304
  derived and/or modified CDS sequence (opt3) from hemagglutinin__InfluenzaA__ABM66919

SEQ ID NO: 129574 - RNA, 1701 nt, Artificial Sequence; identical to SEQ ID NO: 128304
  derived and/or modified CDS sequence (opt3) from hemagglutinin__InfluenzaA__ABM66930

SEQ ID NO: 129575 - RNA, 1701 nt, Artificial Sequence; identical to SEQ ID NO: 128304
  derived and/or modified CDS sequence (opt3) from hemagglutinin__InfluenzaA__ABM66941

SEQ ID NO: 129576 - RNA, 1701 nt, Artificial Sequence; identical to SEQ ID NO: 128304
  derived and/or modified CDS sequence (opt3) from hemagglutinin__InfluenzaA__ABM66952

SEQ ID NO: 129577 - RNA, 1701 nt, Artificial Sequence; identical to SEQ ID NO: 128304
  derived and/or modified CDS sequence (opt3) from hemagglutinin__InfluenzaA__ABM66963

SEQ ID NO: 129578 - RNA, 1701 nt, Artificial Sequence; identical to SEQ ID NO: 128304
  derived and/or modified CDS sequence (opt3) from hemagglutinin__InfluenzaA__ABM66974

SEQ ID NO: 129579 - RNA, 1701 nt, Artificial Sequence; identical to SEQ ID NO: 128304
  derived and/or modified CDS sequence (opt3) from hemagglutinin__InfluenzaA__ABM66985

SEQ ID NO: 129580 - RNA, 1701 nt, Artificial Sequence; identical to SEQ ID NO: 128304
  derived and/or modified CDS sequence (opt3) from hemagglutinin__InfluenzaA__ABM66996

SEQ ID NO: 129581 - RNA, 1701 nt, Artificial Sequence; identical to SEQ ID NO: 128304
  derived and/or modified CDS sequence (opt3) from hemagglutinin__InfluenzaA__ABM67007

SEQ ID NO: 129582 - RNA, 1701 nt, Artificial Sequence; identical to SEQ ID NO: 128304
  derived and/or modified CDS sequence (opt3) from hemagglutinin__InfluenzaA__ABM67018

SEQ ID NO: 129583 - RNA, 1701 nt, Artificial Sequence
  derived and/or modified CDS sequence (opt3) from hemagglutinin__InfluenzaA__ABM67029
augaagaccaucauugcccugagcuacauaaucugccucguguucgcucagaaacuucccggcaacgacaauuccacagcaacucuguguuuggggcaccaugccgucccuaacggaacgauuguuaagaccaucacaaaugaucaaauugaggugacuaacgcgaccgaauuaguacagucuucaaguacaggugagaucugcgacagcccacaccagauacuggauggcgaaaauuguacccuaaucgacgcucuccugggggauccgcagugcgacggauuucaaaacaaaaagugggaucuuuucguggagagauccaaagccuauucuaauuguuaccccuaugacgucccugauuacgcaucgcugaggucauugguggccagcaguggcacucucgaauuuaacaaugaguccuucaacuggacagguguuacccagaaugggacgucuagcgcuugcaagcggcgcuccaacaauucauuuuucagucgacugaacuggcugacucaucucaaguuuaaauauccagcauuaaaugugaccaugcccaacaacgagaaguucgacaaacuguacauuuggggaguccaccauccuggcacagauaaugaccagaucuuucuuuaugcccaggcuagcggccguauuacugugucuaccaagagaucccaacagacaguaaucccaaacauagggucaaggccccggguucgcgauauuccuagcagaaucaguauuuacuggaccaucgugaaaccaggagacaucuugcugauuaauucuacggguaaccuaauagccccgaggggcuacuuccggauccgcuccggaaagagcucgauuaugcgaucugacgcgcccaucgggaaguguaauuccgaaugcauaacuccuaacggcucaauuccaaaugauaaacccuuucagaacgucaauagaaucacauauggugcauguccuagguacgugaagcagaacacccucaaacuggccacugggaugcggaaugugccagagaagcaaacacguggaaucuucggcgcuauugccggcuuuaucgaaaacgggugggagggaauggucgacgguugguauggcuuccgccaccagaauagugaggggauuggacaggcagcugaucuuaaaagcacccaagccgcgauaaaccagaucaauggcaagcugaacagauugauugguaaaacgaacgaaaaguuccaccagaucgagaaggaauuuuccgagguugaagggaggauccaggaccucgagaaauacguggaggauaccaagauugaccuguggucuuauaaugccgaauuacugguagcacucgagaaccaacauacaauagaucuuacugacagcgaaaugaauaaacuguucgagcggaccaagaaacaguugcgagaaaacgcugaggauaugggcaauggaugcuuuaagaucuaccacaagugugacaacgccugcauuggcucaauccgcaaugggacauaugaucaugacguguacagagacgaggcucuaaacaauagguuccagauuaaaggagucgaacugaagagugguuacaaagauuggauccucuggauauccuuugccaucagcugcuuccugcuuuguguggcacuguugggcuuuauuaugugggccugccagaaggggaacauccgguguaauauuugcaucuga

SEQ ID NO: 129584 - RNA, 1698 nt, Artificial Sequence; identical to SEQ ID NO: 128347
  derived and/or modified CDS sequence (opt3) from hemagglutinin__InfluenzaA__ABM67051

SEQ ID NO: 129585 - RNA, 1707 nt, Artificial Sequence
  derived and/or modified CDS sequence (opt3) from hemagglutinin__InfluenzaA__ABM90467
auggagaagaucgugcugcuccuuagcauugucucccugguuaaaucugaccagauaugcaucggcuaccacgccaacaauucaaccgaacaaguggauacaauuauggagaagaacguaacugugacgcaugcucaggacaucuuggagaaaacccacaaugggaaguuaugugaucuggacggagucaaaccccuaauucucagagauugcaguguggcagguuggcugcuuggcaacccuaugugugacgaguucaucaauguuccagaauggagcuauauaguggagaaggccaacccgacaaaugaucugugcuaccccggguccuuuaacgacuaugaggaauugaagcaucuccugucuaggaucaaucacuucgagaaaauucagaucauuccuaagucgucauggagcgaucaugaagcgaguuccggagucucuagcgcuuguccauaccugggcucccccucauuuuuccggaacgugguauggcucaucaaaaagaauaguacuuauccuaccauuaaaaagagcuacaacaauacaaaccaggaggacuuacugguucuuugggguauacaccacccaaauaacgaggccgaacaaacccgcuuguaucagaaccccacuacauacaucucuauugggaccuccacgcugaaucagcgucuagugccuaagaucgcaacucgaucaaaagucaacggacagagcggcagaauggaguuuuucuggaccauccucaagccaaaugaugccauuaacuuugaaaguaauggcaacuucauagcuccggaguacgcauauaaaaucgugaagaaaggggacucugccauuaugaaguccgaacuggaguacggaaauugcaacacaaaaugucaaacucccaugggugcuaucaauagcucgaugccuuuucauaacauacacccacuuaccauuggcgagugccccaaguaugugaagucuaauaggcuggucuuggccacagggcuccggaacuccccucagcgcgaaucaagaaggaaaaagcggggacuguucggcgcgaucgcagguuuuaucgaagggggauggcagggcaugguugauggcugguacggguaucaucacaguaaugaacagggaagcgguuacgccgcugacaaagaguccacccaaaaggccauugacggcgugacgaacaaaguaaauucuaucauugauaagaugaacacucaguucgaagcaguggggcgcgaguuuaacaauuuagagcgaagaauagaaaaccugaauaagaaaauggaggacggauuccucgaugucuggacauauaacgcugaacuucugguguugauggagaaugaaaggacccuagacuuccacgauagcaacguuaagaaucuguacgacaaagugcggcuccagcugcgugauaacgccaaggagcuuggcaaugguuguuuugaguucuaccauaaaugcgacaacgaauguauggagucaauccgcaaugggacuuauaacuacccacaauauagugaagaggcgagacugaagagggaggaaauuuccggcgucaaguuggagagcaucggaacauaccagauccucucuauuuauucaaccguggccaguagccuggcauuagcuauaaugaucgccggccugucccuauggaugugcucuaaugggucgcuccagugccggauuuguaucuga

SEQ ID NO: 129586 - RNA, 1707 nt, Artificial Sequence
  derived and/or modified CDS sequence (opt3) from hemagglutinin__InfluenzaA__ABM90511
auggagaagaucgugcugcuccuuagcauugucucccugguuaaaucugaccagauaugcaucggcuaccacgccaacaauucaaccgaacaaguggauacaauuaucgagaagaacguaacugugacgcaugcucaggacauuuuggaaaagacccacaaugggaaguuaugugaucuggacggagucaaaccccuaauccucaaggauugcaguguggcagguuggcugcuuggcaacccuaugugugacgaguucauaaauguuccagaauggagcuauaucguggagaaggccaacccgacaaaugaucugugcuaccccggguccuuuaacgacuaugaggaauugaaacaucuccugucuagaauuaaucacuucgagaagauccagauuaucccuaaaucgucauggagcgaucaugaagcgaguuccggagucucuagcgcuuguccauaccugggcucccccucauuuuucaggaacgugguauggcucauaaagaaaaauaguacuuauccuaccauuaaaaagagcuacaacaauacaaaccaggaggacuuacugguucuuugggguauccaccacccaaauaacgaggaagaacaaacccgguuguaucagaaccccacuacauacauuucuaucgggaccuccacgcugaaucagcgccuagugccuaaaaucgccacucgaucaaaggucaacggacagagcggccguauggaauuuuucuggaccauucucaaaccaaaugaugcaauaaacuuugagaguaauggcaacuucaucgccccggaauacgcuuauaagauugugaaaaagggggacucugcaaucaugaaauccgagcuggaguacagcaauugcaacacaaagugucaaacucccaugggagccauaaauucgucuaugccuuuucauaacauucacccacuuaccaucggugaaugccccaaguaugugaaauccucaagacuggucuuggcuacaggccucaggaauaguccucagcgggagagccgcagaaagaaaagggggcuguucggagccaucgcgggcuuuauugaagguggguggcagggaaugguugauggcugguacggcuaucaucacuccaacgagcaggggucuggauacgcagccgacaaggaaagcacccaaaaagcuaucgacggugugacgaauaagguaaacucaauuauagauaagaugaauacucaguucgaggccgugggccgggaguuuaacaacuuagaacgccgaaucgagaaucugaacaaaaagauggaagacggguuccucgaugucuggacauauaaugcagagcuucugguguugauggaaaacgagagaacccuagacuuccacgauaguaauguuaaaaaccuguacgacaaggugaggcuccagcugcgggauaaugcuaaagagcuuggaaacggcuguuuugaguucuaccauaagugcgacaaugaguguauggaauccauucguaacgguacuuauaauuacccacaauauagcgaggaggcccgccugaagagagaagagaucucuggggucaaauuggaaucaaucggcacauaccagauucucaguauauauagcaccguggcguccucucuggccuuagcaaucaugauugcuggacugucgcuauggaugugcagcaacggcucccuccagugcaggaucuguauuuga

SEQ ID NO: 129587 - RNA, 1707 nt, Artificial Sequence
  derived and/or modified CDS sequence (opt3) from hemagglutinin__InfluenzaA__ABM90533
auggagaagaucgugcugcuccuuagcauugucucccugguuaaaucugaccagauaugcaucggcuaccacgccaacaauucaaccgaacaaguggauacaauuauggagaagaacguaacugugacgcaugcucaggacaucuuggaaaagacccacaaugggaaguuaugugaucuggacggagucaaaccccuaauucucaaggauugcaguguggcagguuggcugcuuggcaacccuaugugugacgaguucaucaauguuccagaauggagcuauauaguggagaaggccaacccgacaaaugaucugugcuaccccggguccuuuaacgacuaugaggaauugaaacaucuccugucuagaaucaaucacuucgagaagauucagaucauuccuaaaucgucauggagcgaucaugaagcgaguuccggagucucuagcgcuuguccauaccugggcucccccucauuuuucaggaacgugguauggcucaucaagaaaaauaguacuuauccuaccauaaagaaaagcuacaacaauacaaaccaggaggacuuacugguucuuugggguauucaccacccaaauaacgaggaagaacaaacccgguuguaucagaaccccacuacauacaucucuauugggaccuccacgcugaaucagcgccuagugccuaaaaucgccacucgaucaaaggucaacggacagagcggccguauggaauuuuucuggaccauccucaaaccaaaugaugcaauuaacuuugagaguaauggcaacuucauagccccggaauacgcuuauaagaucgugaaaaagggggacucugcaauuaugaaauccgagcuggaguacagcaauugcaacacaaagugucaaacucccaugggagccaucaauucgucuaugccuuuucauaacauacacccacuuaccauuggugaaugccccaaguaugugaaauccucaagacuggucuuggcuacaggccucaggaauaguccucagcgggagagccgcagaaagaaaagggggcuguucggagccaucgcgggcuuuaucgaagguggguggcagggaaugguugauggcugguacggcuaucaucacuccaacgagcaggggucuggauacgcagccgacaaggaaagcacccaaaaagcuauugacggugugacgaauaagguaaacucaaucauugauaagaugaauacucaguucgaggccgugggccgggaguuuaacaacuuagaacgccgaauagagaaucugaacaaaaagauggaagacggguuccucgaugucuggacauauaaugcagagcuucugguguugauggaaaacgagagaacccuagacuuccacgauaguaauguuaaaaaccuguacgacaaggugaggcuccagcugcgggauaaugcuaaagagcuuggaaacggcuguuuugaguucuaccauaagugcgacaaugaguguauggaauccauccguaacgguacuuauaauuacccacaauauagcgaggaggcccgccugaagagagaagagauuucuggggucaaauuggaaucaaucggcacauaccagauccucaguauuuauagcaccguggcguccucucuggccuuagcaauaaugaucgcuggacugucgcuauggaugugcagcaacggcucccuccagugcaggauuuguaucuga

SEQ ID NO: 129588 - RNA, 1707 nt, Artificial Sequence; identical to SEQ ID NO: 129587
  derived and/or modified CDS sequence (opt3) from hemagglutinin__InfluenzaA__ABM90544

SEQ ID NO: 129589 - RNA, 1701 nt, Artificial Sequence
  derived and/or modified CDS sequence (opt3) from hemagglutinin__InfluenzaA__ABN50900
augaaggccaaacugcucgugcuucugugcgcuuugagcgcaaccgacgccgauacaaucuguauuggcuaccacgcgaacaauuccacugacacggucgauaccguuuuagagaagaacgugacaguaacucauucugugaaucugcuagaagacucacacaacgggaaacucugcagacugaagggaauagcuccccuucagcuggguaaauguaguaucgccggcuggauuuuggggaauccugagugcgaaagccucuucuccaagaagucuuggucguauaucgcagagaccccaaacucagaaaauggaacauguuacccgggcuauuuugccgauuacgaggagcugagggaacaacugagcagugucuccucuuucgagcgguuugaaauuuuccccaaagagagcuccuggccuaagcauaacgugacccgcgguguuacugcuucaugcagucacaaaggaaagagcucuuuuuaucgaaaucucuuauggcugacagagaaaaacggguccuacccaaaucuuucaaagagcuaugugaacaauaaggaaaaagaggucuuggugcuguggggcguacaucaccccaguaacaucgaagaccagaagaccauauaccguaaagagaaugcauacguuucuguggucuccagccacuauaacagaagguucacgccugaaaucgccaagcggccaaaagugcgcggccaggaggggagaauuaacuacuauuggacucuacucgagcccggagauaccaucauuuuugaagcuaaugguaaccugaucgccccuugguacgcguucgcacuuucgaggggcuuugggucuggaauaauuacauccaaugccucaauggacgagugugaugcuaagugccagacuccacaaggcgccaucaacaguagccugccguuccagaaugugcaucccgucaccauuggugaauguccuaaauauguucgguccacaaaguugcgcauggugaccgggcuccgaaacaucccaucuauccagagcagaggacuguuuggcgcaauugcuggcuucauagaagggggauggacggguaugaucgacggcugguacggguaucaccaucagaaugaacaaggaucaggcuacgccgcggaucagaagaguacucagaacgccauuaaugguaucacaaacaaaguaaauuccgugauagagaagaugaacacccaguuuacugcagucgggaaagaguucaauaaguuagaaaagaggauggagaaccugaauaagaagguggacgauggcuuccucgacauuuggacauacaacgcugaacuucugguuuugcuagagaacgaacggacccuggacuuucacgauagcaaugugaaaaaccucuaugagaaggucaaaucucaacugaagaauaacgccaaagagaucggaaauggcugcuucgaauuuuaccacaaguguaacaaugagugcauggaaucagugaagaacgggacguaugacuaccccaaauauagugaggagagcaaacuuaaucgugagaaaaucgauggaguaaagcuggaguccauggguguuuaccagauuuuggcuaucuauucuaccguggccucgagccucguccuguuagugucccugggcgcaauuucauucuggaugugcaguaacgggucucuacagugucgcauaugcaucuga

SEQ ID NO: 129590 - RNA, 1701 nt, Artificial Sequence; identical to SEQ ID NO: 128969
  derived and/or modified CDS sequence (opt3) from hemagglutinin__InfluenzaA__ABN50917

SEQ ID NO: 129591 - RNA, 1701 nt, Artificial Sequence
  derived and/or modified CDS sequence (opt3) from hemagglutinin__InfluenzaA__ABN50928
augaaggccaagcugcucauccuucugugcgcuuucaccgcaacagacgccgauacuauuuguauaggcuaccacgcgaacaauagcacggacaccguggauacagucuuggagaagaacguuacugugacccauuccguaaauuuacuggaagacucucacaacgggaaacuaugcagacucaagggaaucgcuccccugcagcuugguaauuguucaauugccggcuggauccuggggaacccugagugcgaaaguuuguuuagcaaaaaguccuggucuuauauugcagagacaccaaauucggaaaacggaaccuguuacccgggcuauuucgccgauuacgaggagcucagggaacaacugucaagcgugaguuccuuugagcgguucgaaaucuuucccaaggagucuagcuggccuaaucauacugucacaaaaggugugaccgcuuccugcucacacaaggggaaaaguagcuucuaucgcaaccugcucugguuaacggagaagaauggaucuuacccaaaccuguccaaaucauauguuaauaacaaggaaaaggaggugcuugucuuguggggcgugcaucaccccagcaauauaggcgaccagcgagcaaucuaccacacugaaaacgccuacguaaguguugugucuucccauuauaaccguagauuuaccccugagauugcuaaaaggccaaagguccgggggcaggaaggacgcaucaauuacuauuggacacugcuagagcccggugauacuauuaucuucgaggccaacggcaaucucauagcgccuugguacgcauuugcccugagcagaggguucggaucgggcauuaucaccucuaacgcuuccauggacgaaugugaugccaaaugccagacaccacaaggugcaauuaauucaagucuuccguuucagaacgugcaccccgugaccaucggggaguguccuaaguaugucaggagcacgaaacugcggaugguuacuggauugcgcaauaucccauccauucagucucgaggccucuucggcgcuauagccggguuuaucgaaggagguuggacaggcaugauugacgggugguacggauaucaucaccagaacgagcaaggcagcgguuacgcggccgaucagaagucaacccagaaugcaaucaacgggauaacuaauaaagugaacaguguaauugaaaagaugaauacacaguucaccgcugugggcaaggaguucaacaaacuggagagaaggauggaaaauuuaaacaagaaagucgacgauggauuucuggacaucuggacguacaacgccgagcuccuugugcuguuggaaaaugagcggacccuagacuuccacgauuccaacguuaagaaucuguaugaaaaagucaagagccaacucaagaacaaugcuaaagagaucggcaacgggugcuuugaguucuaccauaaguguaauaacgaaugcauggagucugugaaaaauggaacauaugacuaccccaaguauucagaagagaguaaacugaaccgugagaagauugauggugugaaacuugaaagcaugggcguauaccagauccuggccauuuauuccacuguugcaucuucguuggugcuccuggucagcuuaggggccauauccuuuuggaugugcucaaauggaagucugcagugucgcaucugcauuuga

SEQ ID NO: 129592 - RNA, 1701 nt, Artificial Sequence
  derived and/or modified CDS sequence (opt3) from hemagglutinin__InfluenzaA__ABN50940
augaaggccaaacugcucgugcuucugugcgcuuucaccgcaacagacgccgauacuaucuguauuggcuaccacgcgaacaauagcacggacaccgucgauacaguuuuggagaagaacgugacuguaacccauuccgugaauuuacuggaagacucucacaacgggaaacuaugcagacucaagggaauagcuccccugcagcuugguaauuguucaaucgccggcuggauucuggggaacccugagugcgaaaguuuguuuagcaaaaaguccuggucuuauaucgcagagacaccaaauucggaaaacggaaccuguuacccgggcuauuucucagauuacgaggagcucagggaacaacugagcagugucuccucuuuugagcgguucgaaauuuuucccaaggagagcuccuggccuaaucauacugugacaaaagguguuaccgccucaugcagucacaaggggaaaagcucuuucuaucgcaaccugcucugguuaacggagaagaauggauccuacccaaaccugucaaaaagcuaugugaauaacaaggaaaaggagguccuuguguuguggggcguacaucaccccaguaauaucggcgaccagcgagcuauauaccacacugaaaacgcauacguuucuguggucuccagccauuauaaccguagauuuaccccugagaucgccaaaaggccaaaggugcgggaucaggaagggcgcauuaauuacuauuggacacugcuagagcccgaggacacuaucauuuucgaagcuaacggaaaucucaucgccccuugguacgcguuugcacugucgagagguuucggcucugggauaauuaccuccaacgccucaauggaugagugugacgcuaaaugccagacaccacaaggagccaucaauaguagccuuccguuucagaacgugcaccccgucaccauuggcgaauguccuaaguauguuagguccacgaaacugcggauggugacugguuugcgcaauaucccaucuauccagagccgagggcuuuucggagcaauugcuggcuuuauagagggcggguggacaggaaugaucgaugguugguacggcuaucaucaccagaacgaacaagggucaggauacgccgcggaccagaagaguacccagaaugccauuaacggcaucacuaauaaaguaaacuccgugauagagaagaugaauacacaguucaccgcagucgguaaggaguucaacaaacuggaaagaaggauggagaauuuaaacaagaaaguggaugacggguuucuggacauuuggacguacaacgcugaacuccuuguucuguuggagaaugaacggacccuagauuuccacgacagcaacgugaagaaucuguaugagaaagucaagucucaacucaagaacaaugccaaagagaucggcaacggaugcuuugaguucuaccauaaguguaauaacgaaugcauggaaucagugaaaaauggcacauaugauuaccccaaguauagugaggagagcaaacugaaccgugaaaagaucgacgggguaaagcucgaguccaugggaguuuaccagauucuggcuaucuauucuacuguggccucgagcuugguccuccugguguccuuaggugcaauuucauuuuggaugugcaguaauggcucucugcagugucgcauaugcaucuga

SEQ ID NO: 129593 - RNA, 1701 nt, Artificial Sequence; identical to SEQ ID NO: 129559
  derived and/or modified CDS sequence (opt3) from hemagglutinin__InfluenzaA__ABN50951

SEQ ID NO: 129594 - RNA, 1701 nt, Artificial Sequence
  derived and/or modified CDS sequence (opt3) from hemagglutinin__InfluenzaA__ABN50962
augaaggccaaacugcucgugcuucugugcgcuuucaccgcaacauacgccgacacuaucuguauuggcuaucacgcgaacaauagcacggauaccgucgacacaguuuuggagaagaacgugacuguaacccauuccgugaauuuacuggaagauucucacaacgggaaacuaugcagacucaagggaacagcuccccugcagcuugguaauuguucagucgccggcuggauacuggggaacccugagugcgaaaguuuguuuagcaaagaguccuggucuuacaucgcagaaaccccaaauccggagaacggaacuuguuaucccggcuacuucgccgacuaugaggaacucagggagcaacugucgucagugagcaguuuugaacgguucgagauuuuuccuaaggaguccucuuggccaaaucauacaguuaccaagggugugacggcuagcugcucccacaacgggaaaucaaguuucuacaagaaucugcucugguuaacugagaaaaacggacuguaucccaaucuuagcaagucuuacgucaacaauaaagaaaaggaaguguugguacuguggggcguucaucacccuuccaacaucggcgaucagcgcgcaauuuaccacaccgagaacgccuaugugucagucgugagcagucauuacucucgacguuuuacaccagaaaucgcuaagagacccaaagugagggaccaggaggggcggauaaauuauuacuggacucuacucgagccuggagauaccaucauuuucgaagccaacgguaaucugaucgcgccaugguaugcauuugcccuuucccgcggcuucgggagcggaauuaucacaucgaacgcuucuaugggcgagugugacgccaagugccagaccccgcaaggugcaauaaauuccucacugcccuuucagaacguccacccuguuacgauuggggaauguccaaaauacgugagaaguacuaaguugaggaugguaacaggacuccggaauauccccagcauucagucccgcggccuguucggcgcuaucgccggguuuaucgagggagguuggaccggcaugauugaugggugguauggauaccaucaccagaacgaacaaggcucugguuacgcggccgacaaaaagagcacucagaaugcaauagaugggaucacaaacaaaguaaauucagucauugagaagaugaacacccaguucacggcugugggcaaggaguucaauaaauuagaacgaagaauggagaaccugaauaagaaaguugacgauggauuucucgacaucuggaccuauaacgccgaacuucugguguugcuagagaacgaaaggacacuggacuuccacgauaguaaugucaagaaccucuacgagaaagugaagaaucagcugaagaacaaugcuaaagagauaggcaacgggugcuuugaguucuaucauaaguguaauaacgaaugcauggaauccgugaaaaauggaacuuacgacuauccuaaguacagcgaggagucuaaacuuaagcgggaaaagauugaugguguuaaacuggagucaaugggcguguaucaaaucuuggccaucuacaguaccgucgcaagcucccucgugcuguuagucucucugggggccauuucguuuuggaugugcagcaacggaucccuacagugucguaucugcauuuga

SEQ ID NO: 129595 - RNA, 1701 nt, Artificial Sequence; identical to SEQ ID NO: 128958
  derived and/or modified CDS sequence (opt3) from hemagglutinin__InfluenzaA__ABN50973

SEQ ID NO: 129596 - RNA, 1701 nt, Artificial Sequence; identical to SEQ ID NO: 128303
  derived and/or modified CDS sequence (opt3) from hemagglutinin__InfluenzaA__ABN50984

SEQ ID NO: 129597 - RNA, 1701 nt, Artificial Sequence; identical to SEQ ID NO: 128304
  derived and/or modified CDS sequence (opt3) from hemagglutinin__InfluenzaA__ABN50995

SEQ ID NO: 129598 - RNA, 1701 nt, Artificial Sequence
  derived and/or modified CDS sequence (opt3) from hemagglutinin__InfluenzaA__ABN51043
augaagaccaucauugcccugagcuacauacucugccuuguguucgcucagaaacugcccggcaacgacaauuccacagcaacuuuguguuuagggcaccaugccgucccuaacggaacgaucguuaagaccauuacaaaugaucaaaucgaggugacuaacgcgaccgaacugguacagucuucaaguacaggugagauuugcgacagcccacaccagauccuagauggcgaaaauuguacccucauagacgcucugcuuggggauccgcagugcgacggauuucaaaacaaaaagugggaucuguucguggagagauccaaagccuauucuaauuguuaccccuaugacgucccugauuacgcaucguugaggucacucguggccagcaguggcacucuggaauuuaacaaugaguccuucaacuggacagguguuacccagaaugggacgucuagcgcuugcaagcggcgcuccaacaauucauuuuucagucgacugaacuggcucacucauuuaaaguuuaaauauccagcacugaaugugaccaugcccaacaacgagaaguucgacaaacuuuacaucuggggaguccaccauccuggcacagauaaugaccagaucuuuuuguaugcccaggcuagcggccguauuacugugucuaccaagagaucccaacagacaguaauuccaaacaucgggucaaggccccggguucgcgauauaccuagcagaauuaguaucuacuggaccauugugaaaccaggagacauccugcuaaucaauucuacggguaaccucauugccccgaggggcuacuucaagauacgguccggaaagagcucgaucaugcgcucugacgcgcccauugggaaauguaauuccgaaugcaucacuccuaacggcucaauaccaaaugauaagcccuuucagaacgucaaucgaauuacauauggugcauguccuagauacgugaaacagaacacccugaagcuggccacugggaugaggaaugugccagagaaacaaacacggggaaucuucggcgcuaucgccggcuuuauugaaaacgggugggagggaauggucgacgguugguauggcuuccgucaccagaauagugaggggaucggacaggcagcugaucuuaagagcacccaagccgcgauuaaccagauaaauggcaaauugaaccgccucaucgguaagacgaacgaaaaguuccaccagauugagaaagaauuuuccgagguugaagggagaauccaggaccuggagaaguacguggaggauaccaaaaucgacuuauggucuuauaaugccgaacugcucguagcacuugagaaccaacauacaauugaucugacugacagcgaaaugaauaaguuguucgagaggaccaaaaagcagcuacgggaaaacgcugaggauaugggcaauggaugcuuuaagauauaccacaaaugugacaacgccugcaucggcucaauucgaaaugggacauaugaucaugacguguaccgcgacgaggcucugaacaauagauuccagaucaagggagucgaacucaaaagugguuacaaggauuggauucuguggaucuccuuugccauaagcugcuuccuucugugugugguuuugcucggcuuuaucaugugggcaugccagaaagggaacauuagguguaauaucugcauuuga

SEQ ID NO: 129599 - RNA, 1701 nt, Artificial Sequence; identical to SEQ ID NO: 129444
  derived and/or modified CDS sequence (opt3) from hemagglutinin__InfluenzaA__ABN51054

SEQ ID NO: 129600 - RNA, 1701 nt, Artificial Sequence
  derived and/or modified CDS sequence (opt3) from hemagglutinin__InfluenzaA__ABN51066
augaaggccaaacugcucgugcuucugugcgcuuucaccgcaacauacgccgacacuaucuguauuggcuaucacgcgaacaauagcacggauaccgucgacacaguuuuggagaagaacgugacuguaacccauuccgugaauuuacuggaagauucucacaacgggaaacuaugcagacucaagggaacagcuccccugcagcuugguaauuguucagucgccggcuggauacuggggaacccugagugcgaaaguuuguuuagcaaagaguccuggucuuacaucgcagaaaccccaaauccggagaacggaacuuguuaucccggcuacuucgccgacuaugaggaacucagggagcaacugucgucagugagcaguuuugaacgguucgagauuuuuccuaagaaguccucuuggccaaaucauacaguuaccaaaggugugacggcuagcugcucccacaacgggaagucaaguuucuacaaaaaucugcucugguuaacugagaagaacggacuguaucccaaucuuagcaaaucuuacgucaacaauaaggaaaaggagguguugguacuguggggcguucaucacccuuccaacaucggcgaucagcgcaccauuuaccacacagaaaacgcauaugugucagucgugagcagucauuacucucgacguuuuacuccagagaucgccaaaagacccaaggugagggaccaggaagggcggauaaauuauuacuggacccuacucgagccuggagauacaaucauuuucgaggcuaacgguaaucugaucgccccaugguaugcguuugcacuuucccgcggcuucgggagcggaauuaucaccucgaacgccucuaugggcgacugugaugcuaaaugccagacgccgcaaggugccauaaauuccucacugcccuuucagaacguccacccuguuacuauuggggaauguccaaaguacgugagaaguacaaaauugaggaugguaaccggacuccggaauauccccagcauucagucccgcggccuguucggcgcaaucgcuggguuuaucgagggagguuggacuggcaugauugacgggugguauggauaccaucaccagaacgaacaaggcucugguuacgccgcggauaagaaaagcacacagaaugccauagacgggaucaccaacaaggucaauucagugauugagaagaugaacacgcaguucaccgcagugggcaaagaguucaauaaguuagaacgaagaauggagaaccugaauaaaaagguugaugacggauuucucgacaucuggacauauaacgcugaacuucugguguugcuagagaacgaaaggacucuggauuuccacgacaguaaugucaaaaaccucuacgagaaggugaagaaucagcugaaaaacaaugccaaggaaauaggcaacgggugcuuugaguucuaucauaaauguaauaacgagugcauugaauccguaaagaauggaaccuacgauuauccuaaauacagcgaggaaucuaaacuuaagcgggagaagaucgacgguguuaagcuggagucaaugggcguguaucaaaucuuggcuauuuacaguacagucgccagcucccucgugcuguuagucucucugggggcaaucggauuuuggaugugcucgaacggcagccuacagugucguauuugcauauga

SEQ ID NO: 129601 - RNA, 1698 nt, Artificial Sequence; identical to SEQ ID NO: 128344
  derived and/or modified CDS sequence (opt3) from hemagglutinin__InfluenzaA__ABN51077

SEQ ID NO: 129602 - RNA, 1698 nt, Artificial Sequence; identical to SEQ ID NO: 128347
  derived and/or modified CDS sequence (opt3) from hemagglutinin__InfluenzaA__ABN51088

SEQ ID NO: 129603 - RNA, 1701 nt, Artificial Sequence
  derived and/or modified CDS sequence (opt3) from hemagglutinin__InfluenzaA__ABN51099
augaagaccaucauugcccugagcuacauauucugccucgcucuuggccaggaccugcccgggaacgauaauuccacagcaacuuuguguuuaggacaccaugccgugccuaacgguacgcuggucaaaaccaucacaaaugaccaaauugagguuacuaacgcgaccgaacuugugcagucuucaaguacaggcaagaucugcaauaacccacacaggauucucgaugggaucgacuguacccugauagaugcucuacugggagacccgcauugcgauguauuucagaaugagacuugggacuuguucguggaaagaagcaaagccuuuuccaacuguuaucccuacgaugucccugacuaugcaucucuccggucgcugguggccucaagcggcacacuggaguucaucaccgaagguuuuacguggacugggguuacccagaauggaggcaguaacgcuugcaagcgcggcccaggguccggauucuuuucucgacucaauugguuaacaaaaagcgguuccacuuaccccgugcugaacgucaccaugccuaauaacgauaauuucgacaaguuguauauuuggggcgugcaccauccaucaacaaaccaagagcagaccaguuuguacguacaggcaagcgggcguguuacggugucuacuagaaggucccagcaaacaaucauucccaacaucggaucacggccuuggguccgcggccugagcaguagaauaucuauuuauuggaccaucgugaagccaggugaugugcuagucauuaauuccaacgggaaucucaucgccccgaggggauacuuuaaaaugcggacuggcaagagcucgaucaugcgcucugacgcucccauugacacauguauauccgagugcaucaccccuaacggcucaauuccaaaugauaaacccuuccagaacguuaauaagaucacguacggggccuguccuaaauaugugaagcagaacacccugaaacuugcgacaggaaugcgaaauguaccagaaaagcagacuagaggucuguuuggcgcaauagccggguucauugagaacggaugggaaggcaugaucgacgguugguacggguuuaggcaccaaaauagugagggcaccggacaggcugccgaucuuaagagcacacaggcagcuaucgaccaaauuaacggcaaacucaaucgggugaucgagaagaugaacgaaaaauuccaccagauugagaaggaguucuccgaagucgaagggcguauacaggaucuggagaaauauguggaggacacuaagaucgauuuauggucuuacaaugccgaacugcucguugcgcuugagaaccagcauaccauugaccugacagauagcgaaaugaacaaguuguuugagaaaacccgcagacaacuaagggaaaaugccgaggacaugggaaacgguugcuucaagaucuaucacaaaugugauaaugcaugcaucgagucaauucggaacggcacuuacgaccaugacguguaucgagaugaagcucugaauaaccgcuuucagauaaagggggucgagcucaaaaguggauacaaggacuggauccuguggauuuccuucgccaucagcugcuuucuucugugugugguauugcucggcuucauuaugugggcuugccagagagguaauaucagguguaacauaugcaucuga

SEQ ID NO: 129604 - RNA, 1701 nt, Artificial Sequence
  derived and/or modified CDS sequence (opt3) from hemagglutinin__InfluenzaA__ABN51110
augaagaccaucauugcccugagcuacauauucugccucgcucuuggccaggaccugcccgggaacgauaauuccacagcaacuuuguguuuaggacaccaugccgugccuaacgguacgcuggucaaaaccaucacagacgaucaaauugagguuacuaaugcgaccgaacuugugcagucuucaaguacaggcaagaucugcaacaauccacacaggauucucgacgggaucaacuguacccugauagaugcucuacugggagacccgcauugcgauguauuucaggacgagacuugggauuuguucguggaaagaagcaaagccuuuuccaauuguuaucccuacgacgucccugauuaugcaucucuccggucgcugguggccucaagcggcacacuggaguucaucaccgaagguuuuacguggacugggguuacccagaacggaggcaguaaugcuugcaagcgcggcccaggguccggauucuuuucucgacucaacugguuaacaaaaagcgguuccacuuaccccgugcugaaugucaccaugccuaacaaugacaacuucgauaaguuguauauuuggggcgugcaccauccaucaacaaaucaagagcagaccaguuuguacguacaggcaagcgggcguguuacggugucuacuagaaggucccagcaaacaaucauucccaacaucggaucacggccuuggguccgcggccugagcaguagaauaucuauuuauuggaccaucgugaagccaggugacgugcuagucauuaacuccaaugggaaccucaucgccccgaggggauacuuuaaaaugcggacuggcaagagcucgaucaugcgcucugacgcucccauugauacauguauauccgagugcaucaccccuaauggcucaauuccaaacgacaaacccuuccagaauguuaacaagaucacguacggggccuguccuaaauaugugaagcagaauacccugaaacuugcgacaggaaugcgaaacguaccagaaaagcagacuagaggucuguuuggcgcaauagccggguucauugagaauggaugggaaggcaugaucgaugguugguacggguuuaggcaccaaaacagugagggcaccggacaggcugccgaccuuaagagcacacaggcagcuaucgaucaaauuaauggcaaacucaaccgggugaucgagaagacuaaugaaaaauuccaccagauugagaaggaguucuccgaagucgaagggcguauacaggaccuggagaaauauguggaggauaccaagaucgacuuauggucuuacaacgccgaacugcucguugcgcuugagaaucagcauacaauugaucugaccgacagcgaaaugaacaaguuguuugagaaaacucgcagacaacuaagggaaaacgccgaggauaugggaaaugguugcuucaagaucuaucacaaaugugacaacgcaugcaucgagucaauucggaauggcacguacgaccaugauguguaucgagacgaagcucugaacaaucgcuuucagauaaagggggucgagcucaaaaguggauacaaggauuggauccuguggauuuccuucgccaucagcugcuuucuucugugugugguauugcucggcuucauuaugugggcuugccagagagguaacaucagguguaauauaugcaucuga

SEQ ID NO: 129605 - RNA, 1701 nt, Artificial Sequence
  derived and/or modified CDS sequence (opt3) from hemagglutinin__InfluenzaA__ABN51121
augaagaccaucauugcccugagcuacauauucugccucgcucuuggccaggaccugcccgggaacgauaauuccacagcaacuuuguguuuaggacaccaugccgugccuaacgguacgcuggucaaaaccaucacagacgaucaaauugagguuacuaaugcgaccgaacuugugcagucuucaaguacaggcaagaucugcaacaauccacacaggauucucgacgggaucaacuguacccugauagaugcucuacugggagacccgcauugcgauguauuucaggacgagacuugggauuuguucguggaaagaagcaaagccuuuuccaauuguuaucccuacgacgucccugauuaugcaucucuccggucgcugguggccucaagcggcacacuggaguucaucaccgaagguuuuacguggacugggguuacccagaacggaggcaguaaugcuugcaagcgcggcccaggguccggauucuuuucucgacucaacugguuaacaaaaagcgguuccacuuaccccgugcugaaugucaccaugccuaacaaugacaacuucgauaaguuguauauuuggggcgugcaccauccaucaacaaaucaagagcagaccaguuuguacguacaggcaagcgggcguguuacggugucuacuagaaggucccagcaaacaaucauucccaacaucggaucacggccuuggguccgcggccugagcaguagaauaucuauuuauuggaccaucgugaagccaggugacgugcuagucauuaacuccaaugggaaccucaucgccccgaggggauacuuuaaaaugcggacuggcaagagcucgaucaugcgcucugacgcucccauugauacauguauauccgagugcaucaccccuaauggcucaauuccaaacgacaaacccuuccagaauguuaacaagaucacguacgggaccuguccuaaauaugugaagcagaauacacugaaacuugccacuggaaugcgaaacguaccagaaaagcagaccagaggucuguuuggcgcgauagcaggguucauugagaauggaugggaaggcaugaucgaugguugguacggguuuaggcaccaaaacagugagggcacaggacaggccgcugaccuuaagagcacucaggccgcaaucgaucaaauuaauggcaaacucaaccgggugaucgagaagaccaaugaaaaauuccaccagauugagaaggaguucuccgaagucgaagggcguauacaggaccuggagaaauauguggaggauacaaagaucgacuuauggucuuacaacgcugaacugcucguugcccuugagaaucagcauaccauugaucugacugacuuggaaaugaacaagcuauuugagaaaacgcgcagacaacugagggaaaacgcggaggauaugggaaaugguugcuucaagaucuaucacaaaugugacaacgccugcaucgagagcauucggaauggcacauacgaccaugauguguaucgagacgaagcacucaacaaucgcuuucagauaaagggggucgagcugaaaucaggauacaaggauuggauccuuuggauuaguuucgcuaucuccugcuuucuguugugugugguacuccugggcuucauuaugugggccugccagagagguaacaucagguguaauauaugcaucuga

SEQ ID NO: 129606 - RNA, 1701 nt, Artificial Sequence
  derived and/or modified CDS sequence (opt3) from hemagglutinin__InfluenzaA__ABN51132
augaagaccaucauugcccugagcuacauauucugccucgcucuuggccaggaccugcccgggaacgauaauuccacagcaacuuuguguuuaggacaccaugccgugccuaacgguacgcuggucaaaaccaucacagacgaucaaauugagguuacuaaugcgaccgaacuugugcagucuucaaguacaggcaagaucugcaacaauccacacaggauucucgacgggaucaacuguacccugauagaugcucuacugggagacccgcauugcgauguauuucaggacgagacuugggauuuguucguggaaagaagcaaagccuuuuccaauuguuaucccuacgacgucccugauuaugcaucucuccggucgcugguggccucaagcggcacacuggaguucaucaccgaagguuuuacguggacugggguuacccagaacggaggcaguaaugcuugcaagcgcggcccaggguccggauucuuuucucgacucaacugguuaacaaaaagcgguuccacuuaccccgugcugaaugucaccaugccuaacaaugacaacuucgauaaacuuuauauuuggggcgugcaccauccaucaacaaaucaagagcagaccaguuuguacguacaggcaagcgggcguguuacggugucuacuagaaggucccagcaaacaaucauucccaacaucggaucacggccuuggguccgcggccugagcaguagaauaucuauuuauuggaccaucgugaagccaggugacgugcuagucauuaacuccaaugggaaccucaucgccccgaggggauacuuuaagaugcggacuggcaagagcucgaucaugcgcucugacgcuuccauugauacauguauaucagagugcaucacccccaauggcaguauuccuaacgacaaaccauuccagaauguuaacaagaucacguacggggccugucccaaauaugugaagcagaauacccugaaacuugcgacaggaaugcgaaacguaccugaaaagcagacuagaggucuguuuggcgcaauagccggguucauugagaauggaugggaaggcaugaucgaugguugguacggguuuaggcaccaaaacagcgagggcaccggacaggcugccgacuugaaguccacacaggcagcuaucgaucaaauuaauggcaaacucaaccgggugaucgagaagacuaaugaaaaauuccaccagauugagaaggaguucucugaagucgaagggcguauacaggaccuggagaaauauguggaggauaccaagaucgacuuauggagcuacaacgccgaacugcucguugcgcuugagaaucagcauacaauugaucugaccgacucagaaaugaacaaguuguuugagaaaacucgcagacaacuaagggaaaacgccgaggauaugggaaaugguugcuucaagaucuaucacaaaugugacaacgcaugcaucgagaguauucggaauggcacguacgaccaugauguguaucgagacgaagcucugaacaaucgcuuucagauaaagggggucgagcucaaauccggauacaaggauuggauccuguggauuagcuucgccaucucuugcuuucuucugugugugguauugcucggcuucauuaugugggcuugccagagagguaacaucagguguaauauaugcaucuga

SEQ ID NO: 129607 - RNA, 1698 nt, Artificial Sequence; identical to SEQ ID NO: 128848
  derived and/or modified CDS sequence (opt3) from hemagglutinin__InfluenzaA__ABN51143

SEQ ID NO: 129608 - RNA, 1701 nt, Artificial Sequence
  derived and/or modified CDS sequence (opt3) from hemagglutinin__InfluenzaA__ABN51154
augaagaccaucauugcccugagcuacauacucugccuuguguucacacagaaacugcccggcaacgacaauuccacugcuacguuguguuuagggcaccaugcagucccuaacggaacccugguuaagacaaucacuaaugaucaaauugaggugaccaacgccacagaauugguacagucuucaaguaccgguagaaucugcgacagcccacaccagauucucgauggcgagaauuguacucugaucgacgcgcuucugggggauccgcauugcgacggauuucagaacaaagaaugggauuuguucguggagagguccaaggcuuauucuaauuguuaccccuaugacgucccugauuacgugucgcuccggucacugguugccagcaguggcacacuggaauuuaacaaugaguccuucaacuggaccgguguggcacaaaaugggacgucuagcgccugcaaacgccgauccgacaagucauuuuucagucgucucaacugguuacaccagcugaaguauaaauacccagcucuuaaugucacuaugcccaacaaugagaaguuugauaaauuguauauauggggagugcaucacccuggcaccgacagcgaucagaucucucuguacgcacaggccuccggcagaguaacaguuucaacuaagaggagccaacagaccgugauuccaaacaucgggaguggacccuggguccggggugugucuucccgcauuagcaucuacuggacaauagugaaaccuggcgacauucuacucaucaacucgaccgggaaucugauugcuccaagaggauauuucaagaucaggucuggcaaguccucaaucaugcggagugacgccccgauugguaaauguaacagcgaaugcauaacgcccaauggguccaucccuaacgauaagccauuucagaaugucaaccgcauuacuuacggacccuguccucgauauguuaaacagaauacacuuaagcuggcgaccggcaugagaaacgugccagagaaacaaacuaggggcaucuucggggcaauagccggauuuauugaaaaugguugggagggcaugauggacgggugguacggauuccggcaccagaacucugagggcacaggucaggcugccgaucuaaagagcacccaagcagcuaucaaucagaucaacgggaaacucaaucgucugauugaaaagacgaacgagaaguuucaucagaucgaaaaagaguucucagaaguagagggccgcauucaggacuuagagaaguauguggaagauaccaaaauagaccuguggaguuacaaugccgagcuccuugucgcgcuggaaaaccaacacacaaucgauuugacugacuccgagaugaacaagcuauucgaaagaaccaaaaagcagcugagggagaaugccgaggauaugggaaacggcugcuuuaagauuuaucauaaaugugacaaugcaugcaucgggagcauccggaacggaacauacgaucacgacguguaccgagacgaagcucucaauaaccgcuuccagauuaaggguguugagcugaaaucuggcuauaaggauuggauacuuuggaucucauuugccauuaguugcuuccuguuguguaucgugcuccugggguuuauuaugugggcuugccagaaaggaaauaucagauguaacauaugcaucuga

SEQ ID NO: 129609 - RNA, 1701 nt, Artificial Sequence
  derived and/or modified CDS sequence (opt3) from hemagglutinin__InfluenzaA__ABN59390
augaagaccaucauugcccugagcuacauaaucugccucguguucgcucagaaacuucccggcaacgacaauuccacagcaacucuguguuuggggcaccaugccgucccuaacggaacgauuguuaagaccaucacaaaugaucaaauugaggugacuaacgcgaccgaauuaguacagucuucaaguacaggugagaucugcgacagcccacaccagauacuggauggcgaaaauuguacccuaaucgacgcucuccugggggauccgcagugcgacggauuucaaaacaaaaagugggaucuuuucguggagagauccaaagccuauucuaauuguuaccccuaugacgucccugauuacgcaucgcugaggucauugguggccagcaguggcacucucgaauuuaacaaugaguccuucaacuggacagguguuacccagaaugggacgucuagcgcuugcaagcggcgcuccaacaauucauuuuucagucgacugaacuggcugacucaucucaaguuuaaauauccagcauuaaaugugaccaugcccaacaacgagaaguucgacaaacuguacauuuggggaguccaccauccuggcacagauaaugaccagaucuuucuuuaugcccaggcuagcggccguauuacugugucuaccaagagaucccaacagacaguaaucccaaacauagggucaaggccccggguucgcaauauuccuagcagaaucaguauuuacuggaccaucgugaaaccaggagauaucuugcugauuaacucuacggguaaucuaauagccccgaggggcuacuuccggauccgcuccggaaagagcucgauuaugcgaucugacgcgcccaucgggaaguguaacuccgaaugcauaacuccuaauggcucaauuccaaacgacaaacccuuucagaaugucaacagaaucacauauggugcauguccuagguacgugaagcagaauacccucaaacuggccacugggaugcggaacgugccagagaagcaaacacguggaaucuucggcgcuauugccggcuuuaucgaaaaugggugggagggaauggucgaugguugguauggcuuccgccaccagaacagugaggggauuggacaggcagcugaccuuaaaagcacccaagccgcgauaaaucagaucaacggcaagcugaacagauugauugguaaaacgaaugaaaaguuccaccagaucgagaaggaauuuuccgagguugaagggaggauccaggaucucgagaaauacguggaggacaccaagauugaucuguggucuuauaacgccgaauuacugguagcacucgagaaucaacauacaauagaccuuacugauagcgaaaugaacaaacuguucgagcggaccaagaaacaguugcgagaaaaugcugaggacaugggcaacggaugcuuuaagaucuaccacaagugugauaaugccugcauuggcucaauccgcaacgggacauaugaccaugauguguacagagacgaggcucuaaauaacagguuccagauuaaaggagucgaacugaagagugguuacaaagacuggauccucuggauauccuuugccaucagcugcuuccugcuuuguguggcacuguugggcuuuauuaugugggccugccagaaggggaauauccgguguaacauuugcaucuga

SEQ ID NO: 129610 - RNA, 1701 nt, Artificial Sequence
  derived and/or modified CDS sequence (opt3) from hemagglutinin__InfluenzaA__ABN59401
augaaggccaaacugcucgugcuucugugcgcuuugagcgcaaccgacgccgauacaaucuguauuggcuaccacgcgaacaauuccacugacacggucgauaccguuuuagagaagaacgugacaguaacucauucugugaaucugcuagaagacucacacaacgggaaacucugcagacugaagggaauagcuccccuucagcuggguaaauguaauaucgccggcuggauuuuggggaacccugagugcgaaagucucuucagcaagaaguccuggucuuauaucgcagagaccccaaauucggaaaacggaacauguuacccgggcuauuuugccgauuacgaggagcugagggaacaacugucaagcgucaguuccuucgagcgguuugaaauuuuccccaaagagcgcucuuggccuaagcauaauaucacccgaggugugacugcugcaugcagccacaaagggaaguccucauuuuaucguaaccucuuauggcugacagagaaaaauggaaguuacccaaaccuuaauaagagcuauguuaacaauaaggaaaaagagguguugguccuguggggcgugcaucaccccucuaacauagaagaccagaagacccuauacagaaaagagaacgccuacguauccguugugucaagcaauuauaacaggcgguucacgccugaaaucgcugagcgcccaaaggucagaggccaggccgggaggauuaauuacuauuggacucuccuggagcccggagauaccaucauuuuugaagcgaacgguaaucuuaucgcaccuuggcacgccuucgcucugagucggggcuuugggucuggaauaauuacauccaacgccagcauggacgagugugauacuaaaugccagaccccacaaggcgcaaucaauucgucuuugccguuccagaacauucaucccgugacaaucggugaauguccuaaguacgugcgcuccaccaaacuccgaauggucacggggcugagaaauaucccaucaauucagaguaggggauuauuuggcgcuauagccggcuucaucgaagggggauggacugguaugauugacggcugguauggguaccaccaucagaacgagcaaggaagcggcuaugcggccgaucagaaguccacacagaaugcaaucaacgguauaaccaauaagguuaacucugugauugagaaaaugaauacucaguuuacagcuguagggaaggaguucaacaaacuggaaaagcggauggagaaccucaauaaaaagguggacgauggcuuccuugacaucuggaccuacaacgccgaacuguugguccuacuggagaaugaacguacgcucgacuuucacgauagcaacgugaagaaucuguacgagaaaguuaagucacaacuuaaaaacaaugcuaaggagaucggaaacggcugcuucgaauuuuaucacaaauguaauaacgagugcauggaaagugugaagaaugggaccuacgacuaucccaaguacuccgaggagagcaaacugaaccgcgaaaagauugauggagucaaauuggagucuauggguguguaucagauccucgccauuuacucaacaguagcaaguagccugguuuuacuggugucccuaggcgccauaucuuucuggaugugcucgaaugggagccuccaguguagaaucugcauuuga

SEQ ID NO: 129611 - RNA, 1698 nt, Artificial Sequence
  derived and/or modified CDS sequence (opt3) from hemagglutinin__InfluenzaA__ABN59412
augaaggccaaccugcucgugcuucugugcgcuuuggcagccgcggacgcugauaccaucuguauuggcuaccacgccaauaacagcacagacacugucgauacgguuuuagagaaaaaugugaccguaacacauuccgugaaccugcuagaagacucucacaaugggaagcucugcagacugaaaggaauagcaccccuucagcuggguaaguguaacaucgccggcugguugcucgggaauccugagugcgauccacugcugccggucaggucauggaguuauauuguggaaacucccaacagcgagaauggaaucuguuacccuggcgacuucauugauuaugaagaacuccgggagcaauuauccucuguuucgucauuugaacgcuucgagaucuuuccaaaagaaagcaguuggcccaaccauaauaccaacggugugacagcugcaugcucccacgaggggaagucuagcuucuaccgaaaucugcuuugguugaccgagaaggaaggauccuauccuaaacugaagaacucauacgucaauaaaaagggcaaagaggugcuaguacucuggggcauacaucacccacccaacaguaaggaacagcagaaccuguaucagaaugagaacgccuacguuagcguggucacuucuaauuacaaccguagauuuacaccugaaaucgcugagaggccaaaggugcgggaccaagccgggcgcaugaauuauuacuggacccuucugaaaccgggagauacgauuaucuucgaggcgaacgguaauuugauugcacccauguaugccuuugcucucuccagaggcuucgggucaggaaucauaacuagcaacgccaguaugcacgaauguaauaccaagugccagacaccucugggcgcaauuaacucuuccuuaccauaccagaauauccaucccgugacuauuggugaguguccuaaauaugucaggagcgcuaagcugcggaugguuaccgggcuccgcaacaucccaucgauccagucucgaggacuuuuuggcgccauugcgggcuucauagaagggggauggacagguaugaucgacggcugguacggguaucaccaucaaaaugagcagggauccggcuacgccgcagaucagaaaucaacccagaacgcuauuaaugguaucacgaacaaggugaacacuguaauagaaaagaugaauauucaauuuacagccguggggaaggaguucaacaagcuggagaaaagaauggaaaauuugaacaagaaagucgacgauggcuuucuagacaucuggaccuacaaugcugagcugcucgugcugcuugaaaacgagaggacucuggaguuccacgacaguaauguuaagaacuuguaugagaaagugaaaagccagcucaagaauaacgccaaagagaucggaaauggcugcuucgaauuuuaccacaagugugauaacgagugcauggaauccguccggaaugggacauaugacuaccccaaauauucugaggagagcaagcugaaccgugaaaaaguggauggaguaaaguuagagucaauggguauuuaccagauccuggcaauuuauaguaccguugccuccagccuagugcuccuggucucucuuggcgcuauaucauucuggaugugcaguaaugggagcuugcaaugucgcaucugcauuuga

SEQ ID NO: 129612 - RNA, 1701 nt, Artificial Sequence
  derived and/or modified CDS sequence (opt3) from hemagglutinin__InfluenzaA__ABN59423
augaaggccaaacugcucgugcuucugugcgcuuugagcgcaaccgacgccgauacaaucuguauuggcuaccacgcgaacaauuccacugacacggucgauaccguuuuagagaagaacgugacaguaacucauucugugaaucugcuagaagacucacacaacgggaaacucugcagacugaagggaauagcuccccuucagcuggguaaauguaguaucgccggcuggauuuuggggaauccugagugcgaaagccucuucuccaagaagucuuggucguauaucgcagagaccccaaacucagaaaauggaacauguuacccgggcuauuuugccgauuacgaggagcugagggaacaacugagcagugucuccucuuucgagcgguuugaaauuuuccccaaagagcgcagcuggccuaagcauaacgugacccgagguguuacugcuuccugcucacacaaagggaagaguagcuuuuaucguaaucucuuauggcugacagagaaaaacggaucuuacccaaaucuuuccaagucauaugugaacaauaaggaaaaagaggucuuggugcuguggggcguacaucaccccagcaacaucgaaaaucagaagaccauauacagaaaagagaacgcauacguuaguguggucucuuccaacuauaauaggcgguucacgccugaaaucgccgagcgcccaaaggugagagaccaggagggcaggauuaacuacuauuggacucuacucgaacccggggauaccaucauuuuugaggcuaauggaaaccugaucgccccuugguacgcguucgcacuuagccgggguuuuggcucggggauaauuacaucuaaugccuccauggacgaaugugauacuaaaugccagaccccacaaggagcuaucaacucaagucugccguuccagaaugugcaccccgucacaauuggcgaguguccuaaguauguucgcagcaccaaauugcgaauggugacgggucucagaaacaucccauccauccagucuagggggcuguuuggagccauugcaggcuucauagaaggcggguggacuggaaugaucgacgguugguacggcuaucaucaccagaaugagcaagggagcggauacgcugccgaucagaagucaacacagaacgcgauuaauggcaucaccaacaagguaaauagugugauagagaaaaugaacacucaguuuacagccgucgguaaggaguucaauaaauuagaaaagcggauggaaaaccugaacaaaaagguggacgauggguuccucgacauuuggaccuacaaugcagagcuucugguuuugcuagaaaacgagcguacgcuggacuuucaugauuccaaugugaagaaccucuaugagaaagucaagagccaacugaaaaauaacgcuaaggaaaucggcaauggaugcuucgaguuuuaccacaaauguaacaaugaaugcauggagucugugaagaacggcaccuaugacuaccccaaguauucagaggaaaguaaacuuaaucgcgagaagaucgaugggguaaaacuggaaagcaugggaguuuaccagauuuuggccaucuauuccacaguggcuucuucgcucguccuguuagugagccugggugccauuuccuucuggaugugcucaaacggcagucuacaguguagaauaugcaucuga

SEQ ID NO: 129613 - RNA, 1701 nt, Artificial Sequence; identical to SEQ ID NO: 128814
  derived and/or modified CDS sequence (opt3) from hemagglutinin__InfluenzaA__ABO32656

SEQ ID NO: 129614 - RNA, 1701 nt, Artificial Sequence
  derived and/or modified CDS sequence (opt3) from hemagglutinin__InfluenzaA__ABO32667
augaagaccaucauugcccugagcuacauacucugccuuguguucgcucagaaacugcccggcaacgacaauuccacagcaacuuuguguuuagggcaccaugccgucccuaacggaacgcugguuaagaccaucacaaaugaucaaauugaggugacuaacgcgaccgaacuuguacagucuucaaguacagguggcaucugcgacagcccacaccagauucucgauggggagaauuguacccugaucgacgcucuacugggagauccgcauugcgacggcuuucagaacaaagaaugggauuuguucguggagagauccaaggccuauucuaauuguuaccccuaugacgucccugauuacgcaucgcucaggucacugguggccagcagugguacucuggaauuuaacaaugaguccuucaacuggacagggguugcucaaaauggaaccucuagcgcaugcaaacggcgcuccaacaagucauuuuucagucgacucaauugguuacaccagcugaaguauaaauacccagcccuuaacgugacgaugcccaauaacgagaaguuugacaaauuguauauauggggcguccaucacccuagcacugauucugaccagaucucccuguacgcucaggccucaggccgugugaccguaagcacaaagagaagucaacagacuguuauuccaaacaucgggucuaggcccugggugcgggaugucuccagccgcauuucgaucuacuggaccauagugaaaccuggagacauucuacucaucaauucuacagguaaccugauugcgccaagaggcuauuucaagaucagguccgggaagucaaguaucaugcggagcgacgcaccgauuggaaaauguaauuccgaaugcauaacccccaacggcucuaucccuaaugauaagccauuucagaacgugaaucgcauuacguacggugccuguccccgauaugucaaacagaacacucuuaagcuggcuacagggaugagaaauguuccugagaaacaaaccaggggaaucuucggcgccauagcaggcuuuauugaaaacgggugggagggaaugguggacgguugguacggcuuccggcaccagaauagcgaggggacuggacaggcugccgauuugaagucaacacaagcggccaucaaccagaucaauggcaaacucaaccgucugauugguaagaccaaugaaaaguuucaucagaucgagaaagaguucagugaaguagaagggcgcauucaggacuuagagaaguauguggaggauacgaaaauagaccugugguccuacaacgcagaacuccuugucgcucuggagaaccaacacaccaucgauuugacagacagcgaaaugaauaagcuauucgagagaacuaaaaagcagcugagggaaaacgccgaggauaugggcaauggaugcuuuaagauuuaucauaaaugugacaacgcuugcaucggcucuauccggaaugggaccuacgaucacgacguguaccgagacgaggcccucaacaaucgcuuccagauuaagggaguugaacugaaaucagguuauaaggauuggauacuuuggaucaguuuugcaauuagcugcuuccuguugugugugguccuccugggcuuuaucaugugggccugccagaaagggaacauuagauguaauaucugcauauga

SEQ ID NO: 129615 - RNA, 1698 nt, Artificial Sequence
  derived and/or modified CDS sequence (opt3) from hemagglutinin__InfluenzaA__ABO32678
augaaggugaaacugcucguccuucugugcaccuucacagccacuuacgcugacacgaucuguauuggcuaucacgcaaacaauagcaccgauacaguugacacuguguuggagaagaacguaaccgugacacauuccgucaauuuacuggaagauucucacaacgggaaacuaugccuccugaagggaauagcgccccuucagcuggguaauuguucaguggccggcuggaucuuggggaacccugagugcgaacuccugauuaguaaagagagcugguccuacaucguugaaaccccaaauccggagaacggaacuuguuaucccggcuacuuugcugacuaugaggaacugagagagcaacucucuucggugagcucauucgaaagguuugagauuuucccuaaggagaguuccuggccaaaucauacagucaccggugugucugccagcugcucccacaacgggaagucaaguuuuuaccggaauuuacuguggcuuacgggcaaaaacggauuguaucccaaucugagcaagucuuacgcaaacaauaaagaaaaggagguucuaguacucuggggcgugcaucacccuccaaacaucggggaucagcgcgcccuguaccacacugaaaacgcuuaugucuccguggugucaagccauuacagucgacguuucacccccgagauagcaaaaagaccuaaggucagggaccaggaaggacggaucaauuauuacuggacacuucuggagccaggugauacuauuaucuuugaggccaacggcaauuugauugcuccgcgcuucgccuuugcgcucucuagaggguucggauccggcaucauaaccagcaacgcacccauggacgaaugugaugccaagugccagacaccucaaggugcuauuaauucgucucugccauuucagaacguucaccccgugaccaucggggaguguccuaaauauguaagguccgccaaguuacggauggcaacgggacugcgcaauauuccaucaauccagagucgaggccucuucggcgcuaucgccggguuuauugaaggagguuggacuggcaugguggacgggugguacggauaucaucaccagaacgagcaaggcagcgguuacgcggccgaucagaaauccacacagaaugcaauaaacgggaucaccaauaaggucaacucugugauugaaaagaugaauacucaguucacagcuguuggcaaagaguucagcaaacuugagagaaggauggaaaaccugcacaagaagguggacgauggauuuuuggacaucuggaccuacaaugccgagcuacugguccuccuggaaaacgagcggacgcuugacuuccaugauucaaacgugaaaaaucuguaugaaaagguaaaaagucaauugaagaacaaugcuaaagagauaggcaacgggugcuuugaguucuaccacaaguguaaugacgaaugcauggaguccguuaagaacggaaccuaugauuaccccaaauauagcgaagagucuaagcucaaucgugagaaaauugacggugugaagcuggaaucaaugggcgucuaccagaucuuagccaucuauaguacaguggcaagcucccugguccuacucgugucucugggggccauuucguuuuggaugugcagcaacggaucccuucagugucgcaucugcauuuga

SEQ ID NO: 129616 - RNA, 1701 nt, Artificial Sequence
  derived and/or modified CDS sequence (opt3) from hemagglutinin__InfluenzaA__ABO32692
augaagaccaucauugcccugagcuacauacucugccuuguguucgcucagaaacugcccggcaacgacaauuccacagcaacuuuguguuuagggcaccaugccgucccuaacggaacgaucguuaagaccauuacaaaugaucaaaucgaggugacuaacgcgaccgaacugguacagucuucaaguacagguggcauuugcgacagcccacaccagauccuagauggggagaauuguacccucauagacgcucugcuuggagauccgcagugcgacggcuuucaaaacaaaaagugggaucuguucguggaaagauccaaagccuauucuaauuguuaccccuaugacgucccugauuacgcaucguugaggucacucguggccagcagugguacucuggaguuuaacaaugaauccuucaacuggacagggguuacccagaauggaacgucuagcgcuugcaagcggcgcuccaacaauucauuuuucagucgacugaacuggcucacucauuuaaaguuuaaauauccagcacugaaugugaccaugcccaacaacgagaaguucgacaaacuuuacaucuggggcguccaccauccuggcacagauaaugaccagaucuuuuuguaugcccaggcuagcgggcguauuacugugucuaccaagagaucccaacagacaguaauuccaaacaucggaucaaggccccggguucgcaauauaccuagcagaauuaguaucuacuggaccauugugaaaccaggugauauccugcuaaucaacucuacgggcaaucucauugccccgaggggguacuucaagauacgguccggaaagagcucgaucaugcgcucugacgcgcccauuggcaaauguaacuccgagugcaucacuccuaaugguucaauaccaaacgacaagcccuuucagaaugucaaccgaauuacauauggggcauguccuagauacgugaaacagaauacccugaagcuggccacuggaaugaggaacgugccagaaaaacaaacacggggcaucuucggcgcuaucgccggguuuauugagaauggaugggaagguauggucgauggcugguauggguuccgucaccagaacagugagggaaucggccaggcagcugaccuuaagagcacccaagccgcgauuaaucagauaaacgguaaauugaaccgccucaucgggaagacgaaugagaaguuccaccagauugaaaaagaguuuuccgaaguugagggcagaauccaggaucuggaaaaguacguggaggacaccaaaaucgauuuauggucuuauaacgccgagcugcucguagcacuugaaaaucaacauacaauugaccugacugauagcgagaugaacaaguuguucgaaaggaccaaaaagcagcuacgggagaaugcugaagacaugggaaacggcugcuuuaagauauaccacaaaugugauaaugccugcaucgggucaauucgaaacggaacauaugaccaugauguguaccgcgacgaggcucugaauaacagauuccagaucaagggugucgagcucaaaaguggcuacaaggacuggauucuguggaucuccuuugccauaagcugcuuccuucugugugugguuuugcucggguuuaucaugugggcaugccagaaaggaaauauuagguguaacaucugcauuuga

SEQ ID NO: 129617 - RNA, 1701 nt, Artificial Sequence; identical to SEQ ID NO: 129481
  derived and/or modified CDS sequence (opt3) from hemagglutinin__InfluenzaA__ABO32751

SEQ ID NO: 129618 - RNA, 1701 nt, Artificial Sequence; identical to SEQ ID NO: 129481
  derived and/or modified CDS sequence (opt3) from hemagglutinin__InfluenzaA__ABO32762

SEQ ID NO: 129619 - RNA, 1701 nt, Artificial Sequence; identical to SEQ ID NO: 129503
  derived and/or modified CDS sequence (opt3) from hemagglutinin__InfluenzaA__ABO32775

SEQ ID NO: 129620 - RNA, 1701 nt, Artificial Sequence; identical to SEQ ID NO: 128291
  derived and/or modified CDS sequence (opt3) from hemagglutinin__InfluenzaA__ABO32790

SEQ ID NO: 129621 - RNA, 1701 nt, Artificial Sequence
  derived and/or modified CDS sequence (opt3) from hemagglutinin__InfluenzaA__ABO32803
augaagaccaucauugcccugagcuacauacucugccuuguguucgcucagaaacugcccggcaacgacaauuccacagcaacuuuguguuuagggcaccaugccgucccuaacggaacgaucguuaagaccauuacaaaugaucaaaucgaggugacuaacgcgaccgaacugguacagucuucaaguacagguggcauuugcgacagcccacaccagauccuagauggggagaauuguacccucauagacgcucugcuuggagauccgcagugcgacggcuuucaaaacaaaaagugggaucuguucguggaaagauccaaagccuauucuaauuguuaccccuaugacgucccugauuacgugucguugaggucacucguugcaagcagugguacucuggaguuuaacaaugaauccuucaacuggacaggggugacccagaauggaacgucuagcgccugcaagcggcgcuccaacaauucauuuuucagucgacugaacuggcucacucauuuaaaguuuaaauauccagcucugaaugucaccaugcccaacaacgagaaguucgacaaacuuuacaucuggggcgugcaccauccuggcacagauaaugaccagauuagcuuguaugcacaggccucugggcguaucacuguauccaccaagagaucacaacagacaguuauuccaaacaucggaagcaggccccgggugcgcgauauaccuaguagaauuucuaucuacuggaccauugucaaaccaggugacacgcugcuaaucaauuccacuggcaaccucaucgcuccgaggggguacuuuaagauucggagcggaaagucgucuauaaugcgcuccgacgcccccaucgauaaauguaauucagagugcauuacaccuaacggcaguaucccaaaugacaagcccuuccagaacgugaaucgaauaaccuauggugcguguccuagauacgugaaacagaacacucugaaacuugcaacagggaugaggaaugucccagaaaaacaaacccggggaauuuuuggcgccaucgcuggcuucaucgagaacgggugggaaggaaugguugaugguugguauggcuuucgucaccagaauagcgaggggauuggacaggccgcagaccugaaguccacgcaagcugccaucaaccagauuaauggcaaauugaaccgccucauagguaagaccaacgagaaguuccaccagaucgaaaaagaguucucugaaguggaggggaggauucaggaucuggaaaaguacguagaggacacaaaaaucgauuuauggagcuauaaugcggagcugcucguggcccuugaaaaccaacauacuaucgaccugaccgauucagagaugaauaaguuguuugaaagaacaaagaagcagcuacgggagaacgcagaagacaugggcaauggaugcuucaagauuuaccacaaaugugauaacgcuugcauaggcaguauccgaaaugggacuuaugaccaugacgucuaccgcgaugaggcccugaacaauagauuucagauuaagggaguggagcucaaauccgguuacaaggacuggauccuguggauuagcuucgcuaucucuugcuuucuucuguguguugccuugcucggcuucauaaugugggcaugccagaaagggaacaucagguguaauauuugcaucuga

SEQ ID NO: 129622 - RNA, 1701 nt, Artificial Sequence; identical to SEQ ID NO: 128681
  derived and/or modified CDS sequence (opt3) from hemagglutinin__InfluenzaA__ABO32816

SEQ ID NO: 129623 - RNA, 1701 nt, Artificial Sequence; identical to SEQ ID NO: 128304
  derived and/or modified CDS sequence (opt3) from hemagglutinin__InfluenzaA__ABO32827

SEQ ID NO: 129624 - RNA, 1701 nt, Artificial Sequence
  derived and/or modified CDS sequence (opt3) from hemagglutinin__InfluenzaA__ABO32838
augaagaccaucauugcccugagcuacauacucugccuuguguucgcucagaaacugcccggcaacgacaauuccacagcaacuuuguguuuagggcaccaugccgucccuaacggaacgaucguuaagaccauuacaaaugaucaaaucgaggugacuaacgcgaccgaacugguacagucuucaaguacagguggcauuugcgacagcccacaccagauccuagauggggagaauuguacccucauagacgcucugcuuggagauccgcagugcgacggcuuucaaaacaaaagaugggaucuguucguggaaagguccaaggccuauucuaauuguuaccccuaugacgucccugauuacgcaucguugcggucacucguggccagcagugguacucuggaguuuaacaaugaauccuucaacuggacagggguuacccagaauggaacgucuagcgcuugcaaacgccgauccaacaauucauuuuucagucgucugaacuggcucacucauuuaaaguuuaaguauccagcacugaaugugaccaugcccaacaacgagaaauucgacaaguuguacaucuggggcguccaccauccuggcacagauaaugaccagauuuuucuuuaugcccaggcuagcgggagaaucacugugucuaccaaaaggucccaacagacaguaauuccaaacaucggaucacggccccgcguuagaaauauaccuagcaggauuaguaucuacuggaccauugugaagccaggugauauccugcuaaucaacucuacgggcaaucucauugccccgcggggguacuucaaaauacgcuccggaaagagcucgaucaugcgaucugacgcgcccauuggcaaguguaacuccgagugcaucacuccuaaugguucaauaccaaacgacaaacccuuucagaaugucaacagaauuacauauggggcauguccuagguacgugaagcagaauacccugaaacuugccacuggaaugcggaacgugccagaaaagcaaacacguggcaucuucggcgcuaucgccggguuuauugagaauggaugggaagguauggucgauggcugguauggguuccgccaccagaacagugagggaaucggccaggcagcugaccugaaaagcacccaagccgcgauuaaucagauaaacgguaaguugaacagacucaucgggaaaacgaaugagaaguuccaccagauugaaaaggaguuuuccgaaguugagggcaggauccaggaucuggaaaaauacguggaggacaccaagaucgauuuauggucuuauaacgccgagcugcucguagcacuugaaaaucaacauacaauugaccugacugauagcgagaugaacaaauuguucgaacggaccaagaaacagcuacgagagaaugcugaagacaugggaaacggcugcuuuaagauauaccacaagugugauaaugccugcaucgggucaauucgcaacggaacauaugaccaugauguguacagagacgaggcucugaauaacagguuccagaucaaaggugucgagcucaagaguggcuacaaagacuggauucuguggaucuccuuugccauaagcugcuuccuucuguguguggcauugcucggguuuaucaugugggccugccagaagggaaauauucgguguaacaucugcauuuga

SEQ ID NO: 129625 - RNA, 1701 nt, Artificial Sequence; identical to SEQ ID NO: 129624
  derived and/or modified CDS sequence (opt3) from hemagglutinin__InfluenzaA__ABO32849

SEQ ID NO: 129626 - RNA, 1701 nt, Artificial Sequence
  derived and/or modified CDS sequence (opt3) from hemagglutinin__InfluenzaA__ABO32860
augaagaccaucauugcccugagcuacauacucugccuuguguucgcucagaaacugcccggcaacgacaauuccacagcaacuuuguguuuagggcaccaugccgucccuaacggaacgaucguuaagaccauuacaaaugaucaaaucgaggugacuaacgcgaccgaacugguacagucuucaaguacagguggcauuugcgacagcccacaccagauccuagauggggagaauuguacccucauagacgcucugcuuggagauccgcagugcgacggcuuucaaaacaaaagaugggaucuguucguggaaagguccaaggccuauucuaauuguuaccccuaugacgucccugauuacgcaucguugcggucacucguggccagcagugguacucuggaguuuaacaaugaauccuucaacuggacagggguuacccagaauggaacgucuagcgcuugcaaacgccgauccaacaauucauuuuucagucgucugaacuggcucacucauuuaaaguuuaaguauccagcacugaaugugaccaugcccaacaacgagaaauucgacaaguuguacaucuggggcguccaccauccuggcacagauaaugaccagauuuuucuuuaugcccaggcuagcgggagaaucacugugucuaccaaaaggucccaacagacaguaauuccaaacaucggaucacggccccgcguuagagauauaccuagcaggauuaguaucuacuggaccauugugaagccaggugacauccugcuaaucaauucuacgggcaaccucauugccccgcggggguacuucaaaauacgcuccggaaagagcucgaucaugcgaucugacgcgcccauuggcaaguguaauuccgagugcaucacuccuaacgguucaauaccaaaugauaaacccuuucagaacgucaauagaauuacauauggggcauguccuagguacgugaagcagaacacccugaaacuugccacuggaaugcggaaugugccagaaaagcaaacacguggcaucuucggcgcuaucgccggguuuauugagaacggaugggaagguauggucgacggcugguauggguuccgccaccagaauagugagggaaucggccaggcagcugaucugaaaagcacccaagccgcgauuaaccagauaaaugguaaguugaacagacucaucgggaaaacgaacgagaaguuccaccagauugaaaaggaguuuuccgaaguugagggcaggauccaggaccuggaaaaauacguggaggauaccaagaucgacuuauggucuuauaaugccgagcugcucguagcacuugaaaaccaacauacaauugaucugacugacagcgagaugaauaaauuguucgaacggaccaagaaacagcuacgagagaacgcugaagauaugggaaauggcugcuuuaagauauaccacaagugugacaacgccugcaucgggucaauucgcaauggaacauaugaucaugacguguacagagacgaggcucugaacaauagguuccagaucaaaggugucgagcucaagaguggcuacaaagauuggauucuguggaucuccuuugccauaagcugcuuccuucuguguguggcauugcucggguuuaucaugugggccugccagaagggaaacauucgguguaauaucugcauuuga

SEQ ID NO: 129627 - RNA, 1701 nt, Artificial Sequence; identical to SEQ ID NO: 129609
  derived and/or modified CDS sequence (opt3) from hemagglutinin__InfluenzaA__ABO32871

SEQ ID NO: 129628 - RNA, 1701 nt, Artificial Sequence
  derived and/or modified CDS sequence (opt3) from hemagglutinin__InfluenzaA__ABO32882
augaagaccaucauugcccugagcuacauaaucugccucguguucgcucagaaacuucccggcaacgacaauuccacagcaacucuguguuuggggcaccaugccgucccuaacggaacgauuguuaagaccaucacaaaugaucaaauugaggugacuaacgcgaccgaauuaguacagucuucaaguacaggugagaucugcgacagcccacaccagauacuggauggcgaaaauuguacccuaaucgacgcucuccugggggauccgcagugcgacggauuucaaaacaaaaagugggaucuuuucguggagagauccaaagccuauucuaauuguuaccccuaugacgucccugauuacgcaucgcugaggucauugguggccagcaguggcacucucgaauuuaacaaugaguccuucaacuggacagguguuacccagaaugggacgucuagcgcuugcaagcggcgcuccaacaauucauuuuucagucgacugaacuggcugacucaucucaaguuuaaauauccagcauuaaaugugaccaugcccaacaacgagaaguucgacaaacuguacauuuggggaguccaccauccuggcacagauaaugaccagaucuuuccauaugcccaggcuagcggccguauuacugugucuaccaagagaucccaacagacaguaauccccaacauagggucaaggccucggguucgcaauauuccaagcagaaucaguauuuacuggaccaucgugaaaccgggagauauccuuuugauuaacucuacggguaaucugauagcccccaggggcuacuuccggauccgcuccggaaagagcucgauuaugcgaucugacgcgccuaucgggaaguguaacuccgaaugcauaacuccaaauggcucaauucccaacgacaaaccuuuucagaaugucaacagaaucacauauggugcauguccaagguacgugaagcagaauacccuaaaacucgccacugggaugcggaacgugcccgagaagcaaacacguggaaucuucggcgcuauugccggcuuuaucgaaaaugggugggagggaauggucgaugguugguauggcuuccgccaccagaacagugaggggauuggacaggcagcugaccugaaaagcacccaagccgcgauaaaucagaucaacggcaaacuuaacagacugauugguaagacgaaugaaaaguuccaccagaucgagaaggaauuuuccgagguugaagggaggauccaggauuuggagaaauacguggaggacaccaagauugaucucuggucuuauaacgccgaacuguuaguagcacuggagaaucaacauacaauagaccucacugauagcgaaaugaacaaacuuuucgagcggaccaagaaacagcugcgagaaaaugcugaggacaugggcaacggaugcuuuaagaucuaccacaagugugauaaugccugcauuggcucaauccgcaacgggacauaugaccaugauguguacagagacgaggcuuugaauaacagguuccagauuaaaggagucgaacuaaagagugguuacaaagacuggauccuguggauauccuuugccaucagcugcuuccuccuguguguggcacuucugggcuuuauuaugugggccugccagaaggggaauauccgguguaacauuugcaucuga

SEQ ID NO: 129629 - RNA, 1701 nt, Artificial Sequence
  derived and/or modified CDS sequence (opt3) from hemagglutinin__InfluenzaA__ABO32893
augaagaccaucauugcccugagcuacauacucugccuuguguucgcucagaaacugcccggcaacgacaauuccacagcaacuuuguguuuagggcaccaugccgucccuaacggaacgaucguuaagaccauuacaaaugaucaaaucgaggugacuaacgcgaccgaacugguacagucuucaaguacaggugagauuugcgacagcccacaccagauccuagauggcgaaaauuguacccucauagacgcucugcuuggggauccgcagugcgacggauuucaaaacaaaaagugggaucuguucguggagagauccaaagccuauucuaauuguuaccccuaugacgucccugauuacgcaucguugaggucacucguggccagcaguggcacucuggaauuuaacaaugaguccuucaacuggacagguguuacccagaaugggacgucuagcgcuugcaagcggcgcuccaacaauucauuuuucagucgacugaacuggcucacucauuuaaaguuuaaauauccagcacugaaugugaccaugcccaacaacgagaaguucgacaaacuuuacaucuggggaguccaccauccuggcacagauaaugaccagaucuuuuuguaugcccaggcuagcggccguauuacugugucuaccaagagaucccaacagacaguaauuccaaacaucgggucaaggccccggguucgcaauauaccuagcagaauuaguaucuacuggaccauugugaaaccaggagauauccugcuaaucaacucuacggguaaucucauugccccgaggggcuacuucaagauacgguccggaaagagcucgaucaugcgcucugacgcgcccauugggaaauguaacuccgaaugcaucacuccuaauggcucaauaccaaacgacaagcccuuucagaaugucaaccgaauuacauauggugcauguccuagauacgugaaacagaauacccugaagcuggccacugggaugaggaacgugccagagaaacaaacacggggaaucuucggcgcuaucgccggcuuuauugaaaaugggugggagggaauggucgaugguugguauggcuuccgucaccagaacagugaggggaucggacaggcagcugaccuuaagagcacccaagccgcgauuaaucagauaaacggcaaauugaaccgccucaucgguaagacgaaugaaaaguuccaccagauugagaaagaauuuuccgagguugaagggagaauccaggaucuggagaaguacguggaggacaccaaaaucgauuuauggucuuauaacgccgaacugcucguagcacuugagaaucaacauacaauugaccugacugauagcgaaaugaacaaguuguucgagaggaccaaaaagcagcuacgggaaaaugcugaggacaugggcaacggaugcuuuaagauauaccacaaaugugauaaugccugcaucggcucaauucgaaacgggacauaugaccaugauguguaccgcgacgaggcucugaauaacagauuccagaucaagggagucgaacucaaaagugguuacaaggacuggauucuguggaucuccuuugccauaagcugcuuccuucugugugugguuuugcucggcuuuaucaugugggcaugccagaaagggaauauuagguguaacaucugcauuuga

SEQ ID NO: 129630 - RNA, 1701 nt, Artificial Sequence; identical to SEQ ID NO: 129629
  derived and/or modified CDS sequence (opt3) from hemagglutinin__InfluenzaA__ABO32904

SEQ ID NO: 129631 - RNA, 1701 nt, Artificial Sequence; identical to SEQ ID NO: 129444
  derived and/or modified CDS sequence (opt3) from hemagglutinin__InfluenzaA__ABO32915

SEQ ID NO: 129632 - RNA, 1701 nt, Artificial Sequence; identical to SEQ ID NO: 129444
  derived and/or modified CDS sequence (opt3) from hemagglutinin__InfluenzaA__ABO32926

SEQ ID NO: 129633 - RNA, 1701 nt, Artificial Sequence
  derived and/or modified CDS sequence (opt3) from hemagglutinin__InfluenzaA__ABO32937
augaagaccaucauugcccugagcuacauacucugccuuguguucgcucagaaacugcccggcaacgacaauuccacagcaacuuuguguuuagggcaccaugccgucccuaacggaacgaucguuagaaccauuacaaaugaucaaaucgaggugacuaacgcgaccgaacugguacagucuucaaguacaggugagauuugcgacagcccacaccagauccuagauggcgaaaauuguacccucauagacgcucugcuuggggauccgcagugcgacggauuucaaaacaagaaaugggaucuguucguggagagguccaaggccuauucuaauuguuaccccuaugacgucccugauuacgcaucguugcggucacucguggccagcaguggcacucuggaauuuaacaaugaguccuucaacuggacagguguuacccagaaugggacgucuagcuccugcaaacgccgaucaaacaauagcuuuuucagucgucugaacuggcucacucauuuaaaguuuaaguauccagcucugaaugugaccaugcccaacaacgagaaauucgacaaguuguacaucuggggaguccaccauccuggcacagauaaugaccagauuuuucuuuaugcacaggccucuggcagaaucacuguguccaccaaaaggucacaacagacaguaauuccaaacaucgggagccggccccgcguuagaaauauaccuaguaggauuucuaucuacuggaccauugugaagccaggagauauccugcuaaucaacuccacggguaaucucauugcuccgcggggcuacuucaaaauacgcagcgggaagucgucuaucaugcgauccgacgcccccauuggaaaguguaacucagaaugcaucacuccuaauggcaguauaccaaacgacaaacccuuucagaaugucaacagaauuacauauggugcguguccuagguacgugaagcagaauacccugaaacuugcaacugggaugcggaacgugccagagaagcaaacacguggaaucuucggcgccaucgcuggcuuuauugaaaaugggugggagggaauggucgaugguugguauggcuuccgccaccagaacagcgaggggaucggacaggccgcagaccugaaauccacccaagcugccauuaaucagauaaacggcaaguugaacagacucaucgguaaaacgaaugaaaaguuccaccagauugagaaggaauuuucugagguugaagggaggauccaggaucuggagaaauacguggaggacaccaagaucgauuuauggagcuauaacgcggaacugcucguagcccuugagaaucaacauacaauugaccugacugauucagaaaugaacaaauuguucgagcggaccaagaaacagcuacgagaaaaugcagaggacaugggcaacggaugcuuuaagauauaccacaagugugauaaugcuugcaucggcaguauucgcaacgggacauaugaccaugauguguacagagacgaggcccugaauaacagguuccagaucaaaggagucgaacucaaguccgguuacaaagacuggauucuguggaucagcuuugcuauaucuugcuuccuucuguguguggccuugcucggcuuuaucaugugggcaugccagaaggggaauauucgguguaacaucugcauuuga

SEQ ID NO: 129634 - RNA, 1698 nt, Artificial Sequence
  derived and/or modified CDS sequence (opt3) from hemagglutinin__InfluenzaA__ABO32948
augagagccaagcugcucgugcuucugugcaccuucacagcuacuuacgcagacacgaucuguauuggcuaucacgccaacaauagcaccgauacagucgacacuguuuuggagaaaaacgugaccguaacacauuccgugaauuuacuggaagauucucacaacgggaagcuaugccuccugaaaggaauagcgccccuucagcuggguaauuguucagucgcuggcuggaucuuggggaacccugagugcgaacuccugauuaguaaggagagcugguccuacaucguggaaaccccaaauccggagaacggaacuuguuaucccggcuacuuugccgacuaugaggaacugagggagcaacucucuucgguuagcucauucgaacgguuugagauuuucccuaaagguaguuccuggccaaaucauacagugaccggggucucugcaagcugcucccacaacggaaagucaaguuuuuaccgcaauuuacuguggcuuacgggcaagaacggcuuguaucccaaucugagcaugucuuacgugaacaauaaagagaaggaaguucuaguacucuggggagugcaucacccuccaaacaucggggaucagcgagcccuguaccacacugagaacgcuuaugucuccguggugucaagccauuacagucguagauucacccccgaaauagcaaaaaggccuaagguccgggaccaggagggucgcaucaauuauuacuggacacuucuggaaccaggcgauacuauuaucuuugaggccaacgggaauuugauugcuccgugguaugccuucgcgcucucuagaggauuuggcuccgguaucauaaccagcaacgcacccauggacgagugugaugccaaaugccagacaccucaaggggcuauuaauucgucucugccauuccagaacguucaccccgugaccaucggagaauguccuaaguacguaagguccgccaaguuacggauggugacgggccugcgcaauauuccaucaauccagagucgaggccucuuuggggcaaucgcuggauucauugaggguggcuggacugggauggucgacggaugguauggcuaccaucaccagaacgaacaagguagcggguacgccgcggaucagaaauccacacagaaugccauaaacggcaucaccaauaaggugaacucuguuauugagaaaaugaauacucaguuuacagcagugggaaaggaguucaacaaacuugaaagaaggauggagaaucugaacaagaaagucgacgauggcuucuuggacaucuggaccuauaacgcugaacuacuggugcuccuggagaaugaacggacgcuugacuuucacgauagcaacguaaagaaucuguacgagaagguuaaaucacaauugaagaacaaugccaaagaaauagggaacggaugcuucgaguuuuaucauaaguguaauaacgagugcauggaaagugugaaaaaugguaccuacgacuaucccaaguacuccgaggaaagcaagcucaaccgugagaaaauugauggcgucaagcuggagucuauggggguguaucagaucuuagcuaucuacucaacagucgccaguagccuggugcuacucguuucccugggagcaauuucuuucuggaugugcucgaauggcagccuucagugucgcaucugcauuuga

SEQ ID NO: 129635 - RNA, 1698 nt, Artificial Sequence
  derived and/or modified CDS sequence (opt3) from hemagglutinin__InfluenzaA__ABO32959
augaaggccaaacugcucgugcuucugugcaccuucacagcuacuuacgcagacacgaucuguauuggcuaucacgccaacaauagcaccgauacagucgacacuguuuuggagaagaacgugaccguaacacauuccgugaauuuacuggaagauucucacaacgggaaacuaugccuccugaagggaauagcgccccuucagcuggguaauuguucagucgcuggcuggaucuuggggaacccugagugcgaacuccugauuaguaaagagagcugguccuacaucguggaaaccccaaauccggagaacggaacuuguuaucccggcuacuuugccgacuaugaggaacugagagagcaacucucuucgguuagcagcuucgaaagguuugagauuuucccuaaggagaguuccuggccaaaucauacagugaccggugucucugcaagcugcucccacaacgggaagucaaguuuuuaccggaauuuacuguggcuuacgggcaaaaacggauuguaucccaaucugagccgcucuuacgugaacaauaaggaaaaagagguucuaguacucuggggcgugcaucacccuccaaacaucggggaucagcgagcccuguaccacacugaaaacgcuuaugucuccguggugucaagccauuacagucguagauucacccccgagauagcaaagaggccuaaaguccgggaccaggaaggacgcaucaauuauuacuggacacuucuggagccaggugauacuuugauuuuugaggccaacggcaaucucaucgcuccgugguaugccuucgcgcugucuagaggguuuggauccggcauuaucaccagcaacgcacccauggacgaaugugaugccaagugccagacaccucaaggugcuauaaauucgucuuuaccauuccagaacguucaccccgugaccauuggggaguguccuaaguacguaagguccacgaaacugcggauggugacuggacuccgcaauaucccaucaauucagagucgaggccuuuuuggcgccaucgcaggguucaucgaaggagguuggacaggcauggucgacgggugguauggauaccaucaccagaacgagcaaggcagcgguuacgcugccgaucagaaguccacccagaaugcgauuaacgggauaacuaauaaagugaacucuguuaucgaaaagaugaauacacaguuuaccgccgugggcaaagaguucaacaagcuggagagaaggauggaaaauuugaacaaaaaggucgacgauggauuccuagacauuuggacguauaacgcagagcugcucgugcugcuugaaaaugagcggacccuggacuuucacgauagcaacguaaagaauuuguacgaaaaaguuaagucacaacucaaaaacaaugcuaaggagaucggcaacgggugcuucgaguuuuaucauaaauguaauaacgaaugcauggagagugugaagaauggaacauacgacuaucccaaguacuccgaagagagcaaacugaaccgugagaagauagauggugucaaauuagaaucuaugggcguguaucagauucuggccaucuacucaacugucgcuaguagccuagugcuccugguuucccuuggggccaucucuuucuggaugugcucgaauggaucauugcagugucgcauuugcaucuga

SEQ ID NO: 129636 - RNA, 1698 nt, Artificial Sequence; identical to SEQ ID NO: 129252
  derived and/or modified CDS sequence (opt3) from hemagglutinin__InfluenzaA__ABO32970

SEQ ID NO: 129637 - RNA, 1701 nt, Artificial Sequence
  derived and/or modified CDS sequence (opt3) from hemagglutinin__InfluenzaA__ABO32981
augaaggccaaacugcucgugcuucugugcgcuuugagcgcaaccgacgccgauacaaucuguauuggcuaccacgcgaacaauuccacugacacggucgauaccguuuuagagaagaacgugacaguaacucauucugugaaucugcuagaagacucacacaacgggaaacucugcagacugaagggaauagcuccccuucagcuggguaaauguaguaucgccggcuggauuuuggggaauccugagugcgaaagccucuucuccaagaagucuuggucguauaucgcagagaccccaaacucagaaaauggaacauguuacccgggcuauuuugccgauuacgaggagcugagggaacaacugagcagugucuccucuuucgagcgguuugaaauuuuccccaaagagcgcagcuggccuaagcauaacgugacccgagguguuacugcuuccugcucacacaaagggaagaguagcuuuuaucguaaucucuuauggcugacagagaaaaacggaucuuacccaaaucuuuccaagucauaugugaacaauaaggaaaaagaggucuuggugcuguggggcguacaucaccccagcaacaucaaggaccagaaaaccauauacagaaaggaaaaugcauacguuaguguggucucuuccaacuauaacaggcgguucacgccugagaucgccgaacgcccaaaagugagagaucaggcuggcaggauuaauuacuauuggacucuacucgagcccggggacaccaucauuuuugaggccaacggaaaucugaucgcgccuugguacgcauucgcccuuagccgggguuuuggcucggggauaauuacaucuaacgcuuccauggaugaaugugacacuaagugccagaccccacaaggagccaucaauucaagucugccguuccagaacgugcaccccgucacaauuggcgaguguccuaaauauguucgcagcaccaaguugcgaauggugacgggucucagaaauaucccauccauccagucuagggggcuguuuggagcaauugcuggcuucauagaaggcggguggacuggaaugaucgaugguugguacggcuaucaucaccagaacgagcaagggagcggauacgccgcggaccagaagucaacacagaaugccauuaacggcaucaccaauaaaguaaacagugugauagaaaagaugaauacucaguuuacagcagucgguaaagaguucaacaaguuagagaaacggauggaaaaucugaacaagaagguggaugacggguuccucgacauuuggaccuacaacgcugagcuucugguuuugcuagaaaaugagcguacgcuggauuuucaugacuccaacgugaaaaaucucuaugaaaaggucaaaagccaacugaagaacaaugccaaagagaucggcaacggaugcuucgaguuuuaccacaaguguaauaacgaaugcauggagucugugaagaauggcaccuaugauuaccccaaauauucagaagagaguaaacuuaaccgcgagaagaucgacgggguaaagcuggaaagcaugggaguuuaccagauuuuggcuaucuauuccacaguggccucuucgcucguccuguuagugagccugggugcaauuuccuucuggaugugcucaaauggcagucuacaguguagaauaugcaucuga

SEQ ID NO: 129638 - RNA, 1701 nt, Artificial Sequence
  derived and/or modified CDS sequence (opt3) from hemagglutinin__InfluenzaA__ABO32992
augaaggccaaacugcucgugcuucugugcgcuuugagcgcaaccgacgccgauacaaucuguauuggcuaccacgcgaacaauuccacugacacggucgauaccguuuuagagaagaacgugacaguaacucauucugugaaucugcuagaagacucacacaacgggaaacucugcagacugaagggaauagcuccccuucagcuggguaaauguaguaucgccggcuggauuuuggggaauccugagugcgaaagccucuucuccaagaagucuuggucguauaucgcagagaccccaaacucagaaaauggaacauguuacccgggcuauuuugccgauuacgaggagcugagggaacaacugagcagugucuccucuuucgagcgguuugaaauuuuccccaaagagcgcagcuggccuaagcaugacgugacccgagguguuacugcuuccugcucacacaaagggaagaguagcuuuuaucguaaccucuuauggcugacagagaaaaauggaucuuacccaaaccuuuccaagucauaugugaauaacaaggaaaaagaggucuuggugcuguggggcguacaucaccccagcaauaucgaagaucagaagaccauauacagaaaagagaacgcauacguuaguguggucucuuccaauuauaacaggcgguucacgccugaaaucagcgagcgcccaaaggugagagaccagaaaggcaggauuaacuacuauuggacucuacucgagcccggggauaccaucauuuuugaagccaauggaaaccugaucgcuccuugguacgccuucgcgcuuucgcgggguuuuggcucugggauaauuacauccaaugcaucaauggacgagugugauacuaagugccagaccccacaaggagccaucaacaguagccugccguuccagaaugugcaccccgucacaauuggcgaauguccuaaauauguucgcuccaccaaguugcgaauggugacgggucucagaaacaucccaucuauccagagcagggggcuguuuggagcuauugccggcuucauagagggcggguggacuggaaugaucgacgguugguacggcuaucaucaccagaaugaacaagggucaggauacgcagcugaucagaagaguacacagaacgccauuaauggcaucaccaacaaaguaaauuccgugauagagaagaugaacacucaguuuacagcggucgguaaagaguucaauaaguuagaaaaacggauggagaaccugaauaagaagguggacgacggguuccucgauauuuggaccuacaacgccgaacuucugguuuugcuagagaacgaacguacgcuggacuuucaugauagcaaugugaaaaaccucuaugagaaggucaaaucucaacugaagaauaacgcaaaagagaucggcaauggaugcuucgaauuuuaccacaaguguaacaaugagugcauggaaucagugaagaacggcaccuaugacuaccccaaauauagugaggagagcaaacuuaaucgcgaaaagaucgaugggguaaagcuggaguccaugggaguuuaccagauuuuggcuaucuauucuacaguggccucgagccucguccuguuagugucccugggugcuauuucauucuggaugugcaguaacggcucucuacaguguagaauaugcaucuga

SEQ ID NO: 129639 - RNA, 1701 nt, Artificial Sequence
  derived and/or modified CDS sequence (opt3) from hemagglutinin__InfluenzaA__ABO33006
augaaggccaaaauccuggugcuccuuugcgcucugagcgcaaccgacgccgauacaauuuguauaggcuaccacgcgaacaauuccacugacacggucgauaccguuuuggagaagaacgugacaguaacucauucugugaauuuacuggaagacucacacaacgggaaacuaugcagacucaagggaaucgcuccccugcagcuugguaaauguaguauugccggcuggauccuggggaauccugagugcgagagcuuguucuccaagaagucuuggucguauauugcagaaaccccaaacucagaaaauggaacauguuacccgggcuauuuugccgauuacgaggagcucagggaacaacugagcagugucuccucuuucgagcgguuugaaaucuuccccaaagagcgcagcuggccuaagcauaacgugacccgagguguuacugcuuccugcucacacaaagggaagaguagcuuuuaucguaaucugcucugguuaacagagaaaaacggaucuuacccaaaucuguccaagucauaugugaacaauaaggaaaaagagguccuuguguuguggggcguacaucaccccagcaacauagaagaccagaagaccaucuacagaaaagagaaugcauacguuaguguggucucuuccaacuauaacaggcgguucacgccugaaauuagcaagcgcccaaaagugagagaucaggagggcaggaucaauuacuauuggacucugcuagagcccggggacaccauuaucuuugaagccaacggaaaucucauagcuccuugguacgccuucgcgcugucgcgggguuuuggcucugggauuaucacauccaacgcaucaauggaugagugugacacuaagugccagaccccacaaggagccauuaauaguagccuuccguuccagaacgugcaccccgucacaaucggcgaauguccuaaauauguucgcuccaccaagcugcgaauggugacggguuugagaaauaucccaucuauucagagcagggggcucuuuggagcuauagccggcuucaucgagggcggguggacuggaaugauugaugguugguacggcuaucaucaccagaacgaacaagggucaggauacgcagcugaccagaagaguacacagaaugccaucaacggcauaaccaauaaaguaaacuccgugauugagaagaugaauacucaguuuacagcggucgguaaagaguucaacaagcuggaaaaacggauggagaauuuaaacaagaagguggaugacggguuccuggacaucuggaccuacaacgccgaacuccuuguucuguuggagaaugaacguacgcuagauuuucaugacagcaacgugaaaaaucuguaugagaaggucaaaucucaacucaagaacaaugcaaaagagaucggcaacggaugcuucgaauuuuaccacaaguguaauaacgagugcauggaaucagugaagaauggcaccuaugauuaccccaaauauagugaggagagcaagcugaaccgcgaaaagauugacgggguaaaacuugaguccaugggaguuuaccagauccuggcuauuuauucuacaguggccucgagcuugguccuccugguguccuuaggugcuauaucauucuggaugugcaguaauggcucucugcaguguagaaucugcauuuga

SEQ ID NO: 129640 - RNA, 1701 nt, Artificial Sequence
  derived and/or modified CDS sequence (opt3) from hemagglutinin__InfluenzaA__ABO33025
augaaggccaaacugcucgugcuucugugcgcuuugagcgcaaccgacgccgauacaaucuguauuggcuaccacgcgaacaauuccacugacacggucgauaccguuuuagagaagaacgugacaguaacucauucugugaaucugcuagaagacaaccacaaugggaaacucugcaagcugaaaggaauagcuccccuucagcuggguaaguguucaaucgccggcuggauuuuggggaacccugagugcgaaagucucuucagcaagaaauccuggucuuauaucgcagagaccccaaauucggaaaacggaacauguuacccgggcuauuuugccgauuacgaggagcugagagaacaacugucaagcgucaguuccuucgagagguuugaaauuuuccccaaggagucuagcuggccuaaucauaacgugaccaaagguguuacugcuuccugcucacacaaggggaaaaguagcuuuuaucggaaucucuuauggcugacagagaagaacggaucuuacccaaaucuuuccaagucauaugugaacaauaaagaaaaggaggucuuggugcuguggggcguacaucaccccagcaacaucaaagaccagcgcaccauauaccgaaaggaaaacgcauacguuaguguggucucuucccacuauaaucguagauucacgccugagaucgccaaaaggccaaaggugcgggaucaggaaggccgcauuaacuacuauuggacucuacucgagcccggggacaccaucauuuuugaggcuaauggaaaccugaucgccccuugguacgcguucgcacuuagcagagguuuuggcucggggauaauuacaucuaaugccuccauggaugaaugugacgcuaaaugccagacuccacaaggagccaucaacucaagucugccguuccagaaugugcaucccgucaccauuggcgaguguccuaaguauguuaggagcacaaaguugcggauggugaccggucuccgcaacaucccauccauccagucucgagggcuguuuggagcaauugcuggcuucauagaaggcggguggacgggaaugaucgaugguugguacggcuaucaccaucagaaugagcaagggagcggauacgccgcggaccagaaaucaacucagagugccauuaacggcaucacaaauaagguaaacuccauaauugaaaagaugaauacccaguuuacugcaguggguaaagaguucaacaaauuagagaagagaauggaaaaucugaacaagaaagucgaugacggguuccucgacaucuggacauacaacgcugagcuucugguguugcuagaaaaugagaggacccuggauuuucacgacagcaacguuaagaaucucuaugaaaaagugaagucucaacugaaaaacaaugccaaggagaucggcaacggaugcuucgaguuuuaccacaaguguaauaacgaaugcauggagucagucaaaaauggcacguaugauuaccccaaguauagugaagagagcaaacuuaaccgggagaagauugacggggugaaacuggaauccaugggaguauaccagaucuuggcuauuuauucuaccguugccucgagccucgugcuguuagucucccugggugcaauaucauucuggaugugcaguaauggcucucuacagugucguaucugcauuuga

SEQ ID NO: 129641 - RNA, 1701 nt, Artificial Sequence
  derived and/or modified CDS sequence (opt3) from hemagglutinin__InfluenzaA__ABO33036
augaagaccaucauugcccugagcuacauacucugccuuguguucgcucagaaacugcccggcaacgacaauuccacagcaacuuuguguuuagggcaccaugccgucccuaacggaacgcugguuaagaccaucacaaaugaucaaauugaggugacuaacgcgaccgaacuuguacagucuucaaguacagguagaaucugcaauagcccacaccagauucucgacggcgagaacuguacccugaucgaugcucuacugggggacccgcauugcgauggauuucagaauaaagaaugggacuuguucguggagaggcggaaggccuauuccaacuguuaccccuaugaugucccugacuacgcaucucuccgcucgcugguggccucaagcggcacucuggaauuuaauaacgagaguuucaauuggacagguguugcucaaaacgggaccuccucugcaugcaaacgacguagcauaaaguccuuuuucucaagacucaauugguuacaccagcugaaguauaaauacccagcccuuaacgugacgaugcccaauaacgagaaguuugauaaauuguauaucuggggaguccaucacccuaguacugacagcgaucagauuucucuguacgcucaggccuccggcagggugaccguaucaacaaagcggagccaacagacuguuaucccaaacauuggcagucgccccugggugagaggggucucuuccaggaucagcauauacuggaccauugugaaaccuggagacauccuacucauuaauucgacagguaaccugaucgcgccacggggcuauuucaagauccgcucugggaaguccucaauuaugcgaagugaugcaccgauaggaaaauguaauagcgaaugcaucacccccaacggcuccauuccuaaugacaagccauuucagaacgugaauagaaucacguacggugccugucccagguaugucaaacagaacacucuuaagcuggcuacagggaugcggaauguuccugagaaacaaacccguggaauauucggcgccauugcaggcuuuaucgaaaacgggugggagggaaugguggacgguugguacggcuuccgccaccagaauagcgaggggacuggacaggcugccgauuugaagucuacacaagcggccaucaaccagauuaauggcaaacucaacagacugaucgaaaagaccaaugagaaguuucaucagauugaaaaagaguucucagaaguagaggguaggauacaggacuuagagaaguauguggaagauacgaaaaucgaccuguggaguuacaacgcagagcuccuugucgcucuggaaaaccaacacaccauugauuugacagacuccgagaugaauaagcuauucgaacggacuaaaaagcagcugcgagagaacgccgaggauauggggaauggcugcuuuaagaucuaucauaaaugugacaacgcuugcaucggaagcauucgcaauggcaccuacgaucacgacguguacagagaugaagcccucaacaauagguuccagauaaaggggguugagcugaaaucuggauauaaggacuggauccuuuggauuucauuugcaaucaguugcuuccuguugugugugguccuccuggguuuuauuaugugggccugccagaaaggcaacauccgguguaauauaugcaucuga

SEQ ID NO: 129642 - RNA, 1701 nt, Artificial Sequence; identical to SEQ ID NO: 128120
  derived and/or modified CDS sequence (opt3) from hemagglutinin__InfluenzaA__ABO33047

SEQ ID NO: 129643 - RNA, 1701 nt, Artificial Sequence; identical to SEQ ID NO: 128698
  derived and/or modified CDS sequence (opt3) from hemagglutinin__InfluenzaA__ABO33058

SEQ ID NO: 129644 - RNA, 1701 nt, Artificial Sequence
  derived and/or modified CDS sequence (opt3) from hemagglutinin__InfluenzaA__ABO33069
augaagaccaucauugcccugagcuacauauucugccucguguuugcucagaaccuucccggcaaugacaacuccacagcaacucuguguuuggggcaccaugccgucccuaauggaacguuaguuaaaaccaucacaaacgaucaaauugaggugacuaaugcgaccgaacugguacagucuucaaguacagguagaaucugcgacagcccacacaggauucuagauggcaagaacuguacccucaucgacgcucugcuuggggauccgcauugcgacggauuccagaaugagaaaugggaucuguuuguggaacgguccaaggccuucucuaacuguuaucccuacgacgucccugauuaugcaucguugcgcucacucguggccagcaguggcacucuggaguuuauaaaugaagguuucaacuggacagggguuacccagaauggaggcuccuacgcuugcaaacgaggcccagacaacagcuuuuucucucgucugaauuggcucuaugaguccgagucaaaguaccccguguuaaacgucacgaugccuaauaacgauaacuuugacaagcuguauaucuggggagugcaccauccaaguacugauaaagaacaaaccaaucuuuacguacaggcaagcgggagaguuacagugucuacuaagaaaucccagcagaccauuauccccaacgucgguucaaggccuugggugcggggcuugagcagucgcauuucuaucuacuggacaauagugaagccaggggacauucugcuaaucaauuccaacggaaaucucauugccccgagaggcuauuucaaaaucaggaccgguaagagcucgaucaugcggucugacgcucccauugggacguguuccucagagugcauaacuccuaacggaaguaucccaaaugauaagcccuuucaaaacgucaauaaaauuacauacggcgccuguccuaaguauguuaaacagaacacccugaaacuugcgacuggcaugcgcaaugugccagaaaagcagacacgagggaucuucggagcaauagccgguuuuauugagaacggcugggaggggaugguagacggaugguacggcuucagacaccagaauagcgaagguaccgggcaagcugccgaucugaaguccacgcaggcagcuaucgaccagaucaacggcaaauugaauagggugauugagaagaccaacgaaaaguuccaccaaaucgagaaagaauuuucugaggucgagggacggauucaggaucucgaaaaguauauagaggacacaaaaaucgaucuguggagcuacaacgccgaauuacugguggcgcucgagaaucagcauacuauugaccuuaccgauucaaagaugaacaaacuguucgaaaagacacgucgccaguugagagagaaugccgaggacaugggcaacgggugcuuuaagaucuaucacaaaugugauaaugcaugcaucggaaguauuaggaacgguacuuacgaccaugacguuuaccgggaugaagcucuaaauaaccgauuccaaauaaagggcguggagcugaaauccggguauaaggacuggauccucuggauuagcuuugccaucucuugcuuccugcuuugugucgugcuguugggauuuauuaugugggcuugccagaaaggcaauauccgcuguaacauaugcaucuga

SEQ ID NO: 129645 - RNA, 1701 nt, Artificial Sequence; identical to SEQ ID NO: 128969
  derived and/or modified CDS sequence (opt3) from hemagglutinin__InfluenzaA__ABO37988

SEQ ID NO: 129646 - RNA, 1701 nt, Artificial Sequence
  derived and/or modified CDS sequence (opt3) from hemagglutinin__InfluenzaA__ABO38010
augaaggccaaacugcucgugcuucugugcgcuuucaccgcaacauacgccgacacuaucuguauuggcuaucacgcgaacaauagcacggauaccgucgacacaguuuuggagaagaacgugacuguaacccauuccgugaauuuacuggaagauucucacaacgggaaacuaugcagacucaagggaacagcuccccugcagcuugguaauuguucagucgccggcuggauacuggggaacccugagugcgaaaguuuguuuagcaaagaguccuggucuuacaucgcagaaaccccaaauccggagaacggaacuuguuaucccggcuacuucgccgacuaugaggaacucagggagcaacugucgucagugagcaguuuugaacgguucgagauuuuuccuaaggaguccucuuggccaaaucauacaguuaccaagggugugacggcuagcugcucccacaacgggaaaucaaguuucuacaagaaucugcucugguuaacugagaaaaacggacuguaucccaaucuuagcaagucuuacgucaacaauaaagaaaaggaaguguugguacuguggggcguucaucacccuuccaacaucggcgaucagcgcgcaauuuaccacaccgagaacgccuaugugucagucgugagcagucauuacucucgacguuuuacaccagaaaucgcuaagagacccaaagugagggaccaggaggggcggauaaauuauuacuggacucuacucgagccuggagauaccaucauuuucgaagccaacgguaaucugaucgcgccaugguaugcauuugcccuuucccgcggcgucgggagcggaauuaucacaucgaacgcuucuaugggcgacugugaugccaagugccagaccccgcaaggugcaauaaauuccucacugcccuuccagaacguucacccugugacgauuggggaguguccaaaauacguaagaaguacuaaguugaggauggugacaggacuccggaauauccccagcauucagucccgcggccuguuuggcgcuaucgccggguucaucgaaggagguuggaccggcaugauugacgggugguauggauaccaucaccagaacgagcaaggcucugguuacgcggccgauaaaaagagcacucagaaugcaauagacgggaucacaaacaaagucaauucagugauugaaaagaugaacacccaguuuacggcuguuggcaaggaguucaauaaauuagagcgaagaauggaaaaccugaauaagaaaguggaugacggauuccucgacaucuggaccuauaacgccgagcuucuggucuugcuagaaaacgagaggacacuggauuuucacgacaguaaugugaagaaccucuacgaaaaaguaaagaaucagcugaagaacaaugcuaaagagauaggcaacgggugcuucgaguuuuaucauaaguguaauaacgaaugcauggaguccguuaaaaauggaacuuacgauuauccuaaguacagcgaagagucuaaacuuaagcgggagaagauugacggugugaaacuggaaucaaugggcgucuaucaaaucuuggccaucuacaguaccguggcaagcucccucguccuguuagugucucugggggccauuucguucuggaugugcagcaacggaucccuacagugucguaucugcauuuga

SEQ ID NO: 129647 - RNA, 1698 nt, Artificial Sequence
  derived and/or modified CDS sequence (opt3) from hemagglutinin__InfluenzaA__ABO38021
augaaggccaaacugcucgugcuucugugcaccuucacagcuacuuacgcagacacgaucuguauuggcuaucacgccaacaauagcaccgauacagucgacacuguuuuggagaagaacgugaccguaacacauuccgugaauuuacuggaagauucucacaacgggaaacuaugccuccugaagggaauagcgccccuucagcuggguaauuguucagucgcuggcuggaucuuggggaacccugagugcgaacuccugauuccaaaagagaguuggagcuacaucguggaaaccccgaaucccgagaacggaacuuguuauccuggcuacuuugccgacuaugaggaacugagagagcaacucuccucuguuucgucauucgaaagguuugagauuuucccaaaggagagcaguuggcccaaucauacagugaccggugucuccgcaucuugcagccacaacgggaaguccucauuuuaccggaauuuacuguggcuuacgggcaaaaacggauuguauccuaaucugaguaagagcuacgccaacaauaaagaaaaggaggugcuaguacucuggggcguucaucacccacccaacaucggggaucagcgcgcucuguaccacacugaaaacgcauaugugucugucguguccucacauuacagccgacguuucauaccugagauggccaaaagaccaaaggugagggaccaggaaggacggaucaauuauuacuggacccuucuggagccgggugauacaauuaucuuugaggcuaacggcaauuugauugcccccugguaugcguucgcacucagucgcggguuuggaucuggcaucauaacuuccaacgccccuaugggugaaugugacgcuaagugccagaccccacaaggggccauuaauagcucgcugcccuuccagaacguccacccuguuacaaucggagaguguccaaaauacgugagaucugcaaaguuaaggaugguaaccggccugcggaauauucccuccauccagucacgcggccucuuuggggcuaucgccggauucauugaagguggcuggacggggaugguggauggaugguauggcuaccaucaccagaacgagcaagguaguggguacgcggccgaccagaaaagcacucagaaugcaauaaacggcaucacaaauaaggucaacuccgugauugaaaagaugaauacccaguuuacugcuguuggaaaagaguucaacaaacuugagcgaagaauggaaaaucugaacaagaagguggaugacggcuucuuggauaucuggacauauaacgccgagcuacugguccuccuggaaaaugagaggacccuugacuuucacgacucuaacgugaaaaaucuguacgaaaagguaaaaagccaauugaagaacaaugcuaaagagauagggaacggaugcuucgaguuuuaucauaaguguaauaacgaaugcauggagucaguuaagaaugguacguacgauuauccgaaauacagugaagaguccaagcucaaccgggagaaaauugacggcgugaagcuggaaagcaugggggucuaucagaucuuagccaucuacucuaccguggcaucaagucugguccuacucgugagccugggagccauuuccuucuggaugugcucuaauggcucgcuucagugucguaucugcauuuga

SEQ ID NO: 129648 - RNA, 1698 nt, Artificial Sequence
  derived and/or modified CDS sequence (opt3) from hemagglutinin__InfluenzaA__ABO38032
augaaggugaaacugcucguccuucugugcaccuucacagccacuuacgcugacacgaucuguauuggcuaucacgcaaacaauagcaccgauacaguugacacuguguuggagaagaacguaaccgugacacauuccgucaauuuacuggaagauucucacaacgggaaacuaugccuccugaagggaauagcgccccuucagcuggguaauuguucaguggccggcuggaucuuggggaacccugagugcgaacuccugauuaguaaagagagcugguccuacaucguugaaaccccagacccggagaauggaacuuguuaucccggcuacuuugcugauuaugaggaacugagagagcaacucucuucggugagcucauucgaaagguuugagauuuucccuaaggagaguuccuggccaaaccauacagucaccggugugucugccagcugcucccacaaugggaagucaaguuuuuaccggaacuuacuguggcuuacgggaaagaauggcuuguaucccaaccugagcaagucuuacgcaaauaacaaagaaaaggaggugcuaguucucuggggcgugcaucacccuccaaauaucggggaccagcgcgcccuguaccacacugaaaacgcuuaugucuccguggugucaagccauuacagucgacguuucacccccgagauagcaaaaagaccuaaggucagggaucaggaaggacggaucaacuauuacuggacacuucuggagccaggugacacuauuaucuuugaggccaauggcaacuugauugcuccgcgcuaugccuucgcgcucucuagaggguuuggauccggcaucauaaccagcaaugcacccauggaugaaugugacgccaagugccagacaccuaaaggugcuauuaacucgucucugccauuccaaaauguucaccccgugaccaucggggaguguccuaaguacguaagguccgccaaauuacggauggugacgggacugcgcaacauuccaucaauccagagucgaggccucuuuggcgcaaucgcuggguucauugaaggagguuggacuggcauggucgaugggugguauggauaccaucaccagaaugagcagggcagcgguuacgccgcggaccaaaaguccacacagaacgccauaaaugggaucaccaacaaaguaaauucuguuauugaaaagaugaacacucaguuuacagcagugggcaaagaguucaauaaacuugagagaaggauggaaaaccugaauaagaaagucgaugacggauucuuggacaucuggaccuauaacgcugagcuacuggugcuccuggaaaacgagcggacgcuugauuuucacgacagcaauguaaagaaccuguacgaaaaaguuaagucacaguugaaaaauaacgccaaggagauaggcaaugggugcuucgaguuuuaucauaaguguaacaaugaaugcauggagagugugaaaaacggaaccuacgauuaucccaaguacuccgaagagagcaaacucaaucgugagaagauugacggugucaaacuggaaucuaugggcaucuaucaaaucuuagcuauuuacucaacaguggccaguagccugguccuacucgugucccugggggcaaucucuuucuggaugugcucgaacggaagccuucagugucgcauuugcauauga

SEQ ID NO: 129649 - RNA, 1698 nt, Artificial Sequence; identical to SEQ ID NO: 128848
  derived and/or modified CDS sequence (opt3) from hemagglutinin__InfluenzaA__ABO38043

SEQ ID NO: 129650 - RNA, 1701 nt, Artificial Sequence
  derived and/or modified CDS sequence (opt3) from hemagglutinin__InfluenzaA__ABO38054
augaaggccagacugcucgugcuucugugcgcuuuggcagccaccgacgcggauacaaucuguauuggcuaccacgcuaacaauagcacugacacggucgauaccguuuuagagaaaaacgugacaguaacucauuccgugaaucugcuagaagacucucacaacgggaagcucugcaggcugaaaggaauagcaccccuucagcuggguaaguguaauaucgccggcuggauuuuggggaacccugagugcgaaucacuccugagugagcggagcugguccuauaucgucgaaaccccaaauucugagaacggaacauguuacccgggcgauuucauugacuaugaggaacugcgcgagcaacucucgucagugagcaguuuugaacgauucgagaucuuuuccaaagagucuagcuggcccaagcauaauaccacucgugguguuacagccgcuugcucccacgcagggaagucaaguuucuacagaaacuuacuguggcuuaccgaaaaagauggaagcuauccuaauuugaacaauucuuacgugaacaagaaaggcaaggagguccuggugcuauggggcguacaucacccauccaauauaaaagaccagcagacgcucuaucagaaggaaaacgccuacguuucaguggucagcaguaacuacaauaggcgguuuacucccgagaucgcugaacgcccuaaggugagagggcaagccggaaggaugaacuauuacuggacccugcuuaaaccaggugauacaauuauguucgaggcgaauggcaaccugaucgcacccugguaugccuuugcuuugucucggggguucggauccggcauuaucacuagcaaugccucgaugcacgagugugacaccaagugccagacaccucagggugcaauaaacucuucccucccauuucagaauauucauccggugaccaucggggaaugucccaaauacguccgcucaacgaagcugcgaaugguuacuggauuaagaaacauuccuaguauccaaagcaggggccuguucggcgcuaucgccggguuuauugagggagguuggacaggcaugauagaugggugguauggauaccaccaucagaaugaacagggcuccgguuaugcggccgaccagaaaucuacccaaaacgcaaucaaugggauuacuaacaaggugaauagcguaaucgagaaaaugaacacacaguucaccgcugugggcaaggaauuuaauaaccucgagaagcggauggagaaccuuaauaaaaaggucgaugacggauuccuggacauauggacguacaacgccgaauugcuagugcugcucgagaaugaacguacccuggauuuccacgacucaaacguuaaaaaucuuuacgagaaggugaaaaaccagcugcgcaauaacgcuaaggaaauuggcaaugggugcuuugaguucuaucacaaguguaacaaugagugcauggaaagugucaaaaacggaacauacgauuauccaaaguacuccgaggaaagcaaauugaauagagagaagaucgacggugugaaacucgagucuaugggcguauaucaaauccuggccauuuacucaacuguugcaaguagcuuagugcugcuagucucccucggggccaucucuuuuuggaugugcucgaacggaagccugcaguguaggauuugcauauga

SEQ ID NO: 129651 - RNA, 1701 nt, Artificial Sequence
  derived and/or modified CDS sequence (opt3) from hemagglutinin__InfluenzaA__ABO38065
augaaggccaaacugcucgugcuucugugcgcuuugagcgcaaccgacgccgauacaaucuguauuggcuaccacgcgaacaauuccacugacacggucgauaccguuuuagagaagaacgugacaguaacucauucugugaaucugcuagaagacucacacaacgggaaacucugcagacugaagggaauagcuccccuucagcuggguaaauguaguaucgccggcuggauuuuggggaauccugagugcgaaagccucuucuccaagaagucuuggucguauaucgcagagaccccaaacucagaaaauggaacauguuacccgggcuauuuugccgauuacgaggagcugagggaacaacugagcagugucuccucuuucgagcgguuugaaauuuuccccaaagagcgcagcuggccuaagcauaacaucacccgaggugugacugcuuccugcucacacaaagggaagaguagcuuuuaucguaaucucuuauggcugacagagaaaaacggaucuuacccaaaucuuuccaagucauauguuaacaauaaggaaaaagagguguugguccuguggggcgugcaucaccccagcaacauagaagaccagaagaccaucuacagaaaagagaaugcauacguaaguguugugucuuccaacuauaacaggcgguucacgccugaaauugccaagcgcccaaaagucagaggccaggaggggaggaucaauuacuauuggacucuacucgagcccggagauaccauuaucuuugaagcuaacgguaaucugauagccccuugguacgcguucgcacuuagccggggcuuugggucgggaauuaucacaucuaacgccuccauggacgagugugauacuaagugccagaccccacaaggcgcuauuaauucaagucugccguuccagaacgugcaccccgugacaaucggugaauguccuaaauauguccgcagcaccaaguugcgaaugguuacggggcucagaaauaucccauccauucagucuaggggacuguuuggcgccauagcaggcuucaucgaagggggauggacugguaugauugacggcugguacggguaucaucaccagaacgaacaaggaagcggcuacgcugccgaucagaagucaacacagaaugcgaucaacgguauaaccaauaaagugaacaguguaauugagaagaugaauacucaguuuacagccguggggaaagaguucaacaaguuagaaaaacggauggagaaucugaacaagaaggucgacgauggcuuccucgacaucuggaccuacaacgcagaacuucugguguugcuagagaaugaacguacgcuggacuuucaugauuccaacguuaaaaaucucuaugagaaggugaaaagccaacugaagaacaaugcuaaagagaucggaaacggcugcuucgaauuuuaccacaaguguaauaacgagugcauggaaucugucaagaaugggaccuaugacuaccccaaauauucagaggagaguaaacuuaaccgcgagaagauugauggagugaagcuggagagcauggguguauaccagaucuuggccauuuauuccacaguugcuucuucgcucgugcuguuagucagccugggcgccauauccuucuggaugugcucaaaugggagucuacaguguagaaucugcauuuga

SEQ ID NO: 129652 - RNA, 1701 nt, Artificial Sequence; identical to SEQ ID NO: 128291
  derived and/or modified CDS sequence (opt3) from hemagglutinin__InfluenzaA__ABO38076

SEQ ID NO: 129653 - RNA, 1701 nt, Artificial Sequence
  derived and/or modified CDS sequence (opt3) from hemagglutinin__InfluenzaA__ABO38087
augaagaccaucauugcccugagcuacauacucugccuuguguucgcucagaaacugcccgucaacgacaauuccacagcaacuuuguguuuaggccaccaugccguuccuaacgggacgcuggugaagaccaucacaaaugaucacauugagguaacuaacgcgaccgaacuugugcaaucuucaaguacaggaagaaucugcgacagcccacaucagauucucgauggugagaauuguacccugaucgacgcucuacugggcgauccgcacugcgacggguuucagaacaaagaaugggauuuguucgucgagagguccacugccuauucuaauuguuaccccuaugacgugccugauuacgcaucgcuccggucacugguugccagcaguggaacacuggaauuuaacaaugaguccuucaacuggaccggcguggcucagaaugguacgucuagcgcaugcaagcgccgauccauaaaaucauuuuucagucgucucaacugguuacaucaacugaaguauaaguacccagcccuuaaugucacuaugcccaacaaugagaaauuugacaaguuguauaucuggggagugcaccacccuagcaccgauucugaccagauuucccuguacgcucaggccucagggagaguaacaguuagcacuaaaaggagucagcaaaccgugaucccaaacauuggcucucggcccuggguccgcggcguguccagcagaaucucgauauacuggacaauugugaagccuggggauauccuacucauuaacucuaccggaaaucugaucgcgccaagggguuauuucaaaauccgguccggcaagucaaguauuaugcgcagcaacgcaccgauagggaaguguaauuccgaaugcaucacgcccaacggaucuauuccuaaugacaaaccauuucagaacgucaaucgaaucacuuacggcgccugucccagauauguuaagcagaacacacuuaaacuggcuaccgguaugaggaaugugccugagaagcagacucgggggauauucggagccauugcaggcuuuaucgaaaacggcugggaggggaugguagacggaugguacgguuuccgucaucaaaauagcgagggcacagggcaggcugccgauuugaaaucaacccaggcggccaucaaccaaauuaauggaaagcucaaccgccugaucgagaaaacgaaugaaaaguuucaccagauugaaaaggaguucagugaaguggagggcagaauacaggacuuagagaaauaugucgaagauaccaagaucgaccugugguccuacaacgcagagcuccuuguggcucuggaaaaccagcauacaauugauuugacugacagcgagaugaauaaacuauucgaaaggacccggaagcaacugcgagagaacgccgaggauguugguaaugggugcuuuaaaaucuaucacaagugugacaacgcuugcaucggcucuauucgcaauggaacauacgaucacgacguguacagagaugaagcccucaacaauagguuccagauaaagggcgucgagcugaaaucaggguauaaggacuggauccuuuggauuaguuuugcaaucagcugcuuccuguugugugugguacuccugggauuuauuaugugggccugccagaaagguaacauccgguguaauauaugcaucuga

SEQ ID NO: 129654 - RNA, 1689 nt, Artificial Sequence
  derived and/or modified CDS sequence (opt3) from hemagglutinin__InfluenzaA__ABO38098
auggccaucauuuaccugauacuccuuuucaccgcugugagaggcgaccagaucugcauuggguaucacgcaaacaauagcacagagaaggucgauacuauccuggaaaggaacguuacggugacccaugccaaagacauuuuggagaagacacacaauggaaaauuauguaagcugaacgguauacccccucuagaacucggcgauugcuccaucgcgggguggcugcuuggaaauccagagugugaccggcuguugucuguaccggaauggucauacaucauggagaaagagaacccccgcgauggccucugcuauccugguaguuuuaaugacuacgaagaacugaagcaucugcucagcuccgugaagcacuucgaaaaagucaagauuuuaccaaaagaucgauggacucaacauaccacaaccgggggaucucgugcuugugccgugucgggcaaccccucauuuuucagaaauaugguuuggcugacuaagaaaggcagcaacuauccuguggcaaaggggaguuacaauaacacauccggagagcagaugcuuaucauuugggguguccaccacccaaaugacgagaccgaacagaggacguuguaucagaacgugggcacuuacguaucuguugggaccagcacacugaauaagcgguccacucccgauaucgccacccgcccuaaagugaacggacaaggcgguagaauggaguuuucauggacacuacucgacaugugggauaccauaaacuucgaaaguacggggaaucugauugcuccagaguacggauuuaagaucagcaaaagggggucuuccggcauuaugaagacugaaggcacacuuggaaacugcgagaccaaaugucagacuccgcugggugcaaucaauacaaccuugcccuuccauaacguccacccucucacgaucggcgagugcccaaaguaugugaaaucagaaaagcugguguuagccaccgggcugcggaaugucccccagauugagagccgcggacucuuuggcgcuauagccgguuucaucgaagggggcuggcagggaaugguugacggcugguacggguaucaucacaguaacgaucaaggaucugguuacgcggcagacaaggaguccacacagaaagccuuugacggcauuacuaauaaggugaacagcguaaucgagaaaaugaauacccaguucgaggcuguggggaaggaguuuucgaaccuugaacgaagacuggagaauuugaacaaaaagauggaagauggauuccuagacgucuggacauauaaugccgagcugcucgugcugauggaaaacgagaggacucuugauuuccacgacucuaauguuaagaaccuguacgauaaagugcggaugcaguugcgugacaacgucaaggagcucggcaaugguuguuuugaguucuaucauaaaugcgaugacgaauguaugaacuccgugaagaaugggaccuacgauuacccuaaauaugaagaggagucaaagcugaaccgcaaugaaauaaagggcguaaaauuaaguagcaugggaguuuaccaaauucuggcaaucuaugcuacaguggccggcucccuaucucucgcgaucaugauggccgggauuagcuuuuggaugugcucaaacggaagucugcagugcagaaucuguauuuga

SEQ ID NO: 129655 - RNA, 1701 nt, Artificial Sequence
  derived and/or modified CDS sequence (opt3) from hemagglutinin__InfluenzaA__ABO38230
augaagaccaucauugcccugagcuacauauucugccagguguuugcucaaaaccuccccggcaaugacaacuccacagcaacucuuugucuggggcaccaugccgucccuaauggaacguugguuaaaaccaucacaaacgaucagauugaggugacuaaugcgaccgaauuaguacagucuucaaguacagguagaaucugcgacaacccacacaggauucuggauggcaagaauuguacccuaaucgacgcucuccugggggauccgcauugcgacggauuccagaacgagaaaugggaucuuuuuguggaacggagcaaggccuucuccaauuguuaucccuacgacgucccugauuaugcaucucugcgcucguugguggccucaagcggcacucucgaguuuuucaacgaagguuuuaauuggacagggguuacccaaaacggaggcaguuacgcuugcaaacgaggcccagacaauuccuucuuuucucgucugaacuggcuguauaagagcgaguccacguaccccgugcucaaugucacuaugccuaacaacgauaauuucgacaaguuauauauauggggagugcaccauccaucaaccgauaaagagcagacaaaccuguacguacaggcaagugggagaguuacugugagcaccaagaggucucagcaaacaaucauucccuccgucgguucacggccuugggugcgcggccuuagcaguagaaucucuauuuacuggaccaucgugaaaccaggggacgucuugcugauaaauuccaacggaaaucuaauugccccgaggggcuauuuuaagauccggacggguaaaagcucgauuaugcgcucugacgcucccaucgggacuuguuccucagaaugcaucacaccuaacggaaguauuccaaaugauaagcccuuccagaacguugacaagauaaccuacggcgccuguccuaaauaugugaagcagaauacucucaaacuggcgacaggcaugcgaaacguaccagagaagcagaccagagggaucuuuggagcaauugccgguuucaucgaaaauggcugggaggggaugauagauggaugguacggcuucaggcaccaaaacagcgaggguacggggcaggcugccgaccuuaaauccacccaggcagcuauugaucaaaucaauggcaagcugaaccgggugaucgagaaaacaaaugaaaaguuucaccagauugaaaaggaguucucugaagucgagggacguauccaggacuuggagaaauauguggaagauacuaagauugaccucuggagcuacaacgccgagcuguuaguugcgcuggaaaaccagcauaccauagaucucacagacucagagaugaauaaacuuuuugaaaagacucgcagacaacugagggagaacgccgaggauaugggcaaugggugcuucaaaaucuaucacaagugugacaacgcaugcauuggaaguauccggaaugguaccuacgaccaugauguguaccgagacgaggcuuugaacaaucgcuuucagaucaagggcgucgaacuaaaauccggguauaaggauuggauucuguggaucagcuucgccauaucuugcuuucuccugugugugguacuucugggauucauuaugugggcuugccagaaaggcaacaucagauguaauauuugcaucuga

SEQ ID NO: 129656 - RNA, 1701 nt, Artificial Sequence
  derived and/or modified CDS sequence (opt3) from hemagglutinin__InfluenzaA__ABO38241
augaagaccaucauugcccugagcuacauauccugccucguguucgcucagaaacuucccggcaacgacaauucuacagcaacucuguguuuggggcaccaugccgucccuaacggaacguuaguuaagaccaucacaaaugaucaaauugaggugacuaacgcgaccgaacugguacagucaaguagcacagguagaaucugcgacuccccacacaggauucuagauggcaaaaauuguacccucaucgacgcucugcuuggggauccgcauugcgacggauuucagaacgagaagugggaucuguucguggaacggucuaaagccuuuucgaauuguuaucccuacgacgucccugauuaugcaucauugcgcagccucguggccaguuccggcacucuggaguucauaaacgaagguuuuaauuggacagggguuacccagucuggaggcagcuacacgugcaagcgaggcuccgugaacucauucuuuagucgucugaauuggcucuaugagagcgagucuaaguacccagcuuuaaacgucacuaugcccaauaacgggaaauucgacaagcuguauaucuggggagugcaccauccuuccaccgauaaagaacaaacaaaucuuuacguaagagcaucagguaggguuacugugagcaccaagcggagucagcagacagucauuccaaacaucggcccccgcccuugggugagaggguugucuuccaggauuagcaucuacuggaccauagugaaaccaggagacauucugcuaaucaacucgacgggcaaucucauugccccgcgggguuauuuuaagauccgcacugggaagucuuccaucaugcgaucagaugcucccauuggaacauguaguagcggcugcauaaccccuaacggcuccaucccaaaugacaaacccuuccagaacgucaauaagauuacuuacggggccuguccuagauauguuaaacaaaacacacugaaacuugcgaccggaaugaggaaugugccagagaaacagacgcgggguaucuuuggcgcaauagccggguucauugaaaacggaugggagggcaugguagacgguugguacggguuucgucaccagaauagcgagggcaccggacaggcugccgaucugaagucuacacaagcagcuaucgaccagaucaacggcaaauugaaucgccucauugaaaagacuaacgagaaguuccaccagaucgaaaaagaguucucagaaguggaggggaggauucaagaucuggagaaguaugucgaagacaccaaaauagauuuauggaguuacaaugccgagcugcucguggcgcuugaaaaccagcauacaaucgacaugacugauuccgagaugaauaagcuguuugaaaagaccagaaagcaguugcgggagaacgccgaggacaugggaaacgguugcuucaagauuuaucacaaaugugauaaugcaugcaucggcagcauccgaaacgggacauacgaccaugauguuuaccgcgacgaagcucuaaauaacagauuucagauuaagggaguggagcugaaaucuggcuauaaggacuggauacucuggaucucauucgccauuaguugcuuucugcuuugugucgugcuguuggguuucaucaugugggcuugccaaaaagggaauauuagguguaacaucugcauauga

SEQ ID NO: 129657 - RNA, 1701 nt, Artificial Sequence; identical to SEQ ID NO: 128330
  derived and/or modified CDS sequence (opt3) from hemagglutinin__InfluenzaA__ABO38252

SEQ ID NO: 129658 - RNA, 1689 nt, Artificial Sequence
  derived and/or modified CDS sequence (opt3) from hemagglutinin__InfluenzaA__ABO38296
auggugaucauuuaccugauacuccuuuucaccgccgucagaggcgaccagaucugcauuggguaucacgcuaacaauagcacagagaagguugauacuauccuggaaaggaacgugacgguaacccaugcaaaagacauuuuggagaagacacacaauggaaaauuauguaagcugaacgguauacccccucuagaacucggcgauugcuccaucgccggguggcugcuuggaaauccagagugugaccggcuguugucugugccggaauggucauacaucauggagaaagagaacccccgcgauggccucugcuauccugguaguuuuaaugacuacgaagaacugaagcauuuccugagcuccgucaagcacuuugaaaaagugaagauucucccaaaagaucgauggacucaacauaccacaaccgggggaucucgugcgugugcuguuucgggcaaccccucauucuuuagaaauauggugugguuaacuaagaaaggcagcaacuauccugucgccaaggggaguuacaauaacacauccggagagcagaugcugaucauuuggggugugcaccacccaaaugacgagaccgaacagaggacgcuuuaucagaacguaggcacuuacguuucuguggggaccagcacauugaauaagcgguccacucccgauaucgcaacccgcccuaaagucaacggacugggcgguagaauggaguucucauggacacuacucgacaugugggauaccauaaacuuugaaaguacggggaaucugauugccccagaguacggauucaagaucagcaaaagggggucuuccggcauuaugaagacugaaggcacacuuggaaacugcgagaccaaaugucaaacuccgcugggugcuaucaauacaaccuugcccuuucauaacgugcacccucucacgaucggcgagugcccaaaguaugugaaaucagaaaagcuggucuuagcaaccgggcugcggaauguuccccagauugagagccgcggacucuucggcgccauagcugguuuuaucgaagggggcuggcagggaaugguggacggcugguacggguaucaucacaguaacgaucagggaucugguuacgccgcggacaaggaguccacacaaaaagcauucgacggcauuacuaauaagguaaacagcgugaucgagaaaaugaauacccaguuugaggccgucgggaaggaguucucgaaccuugaacgaagacuggagaauuugaacaaaaagauggaagauggauuccuagacguguggacauauaaugcugagcugcucguucugauggaaaacgagaggacucuugauuuucacgacucuaaugugaagaaccuguacgauaaaguccggaugcaguugcgugacaacgccaaggagcucggcaaugguuguuucgaauuuuaucauaaaugcgaugacgaguguaugaacuccgugaagaaugggaccuacuacuauccuaaauacgaagaggagucaaagcugaaccgcaaugaaauaaagggcguaaaauuaaguagcaugggaguuuaucagauucuggcaaucuacgcuacaguggccggcucccuaucucucgcgaucaugauggccgggauuagcuucuggaugugcucaaacggaagucugcaaugcagaaucuguauuuga

SEQ ID NO: 129659 - RNA, 1698 nt, Artificial Sequence; identical to SEQ ID NO: 128918
  derived and/or modified CDS sequence (opt3) from hemagglutinin__InfluenzaA__ABO38318

SEQ ID NO: 129660 - RNA, 1698 nt, Artificial Sequence; identical to SEQ ID NO: 128848
  derived and/or modified CDS sequence (opt3) from hemagglutinin__InfluenzaA__ABO38329

SEQ ID NO: 129661 - RNA, 1701 nt, Artificial Sequence
  derived and/or modified CDS sequence (opt3) from hemagglutinin__InfluenzaA__ABO38351
augaaggccagacugcucgugcuucugugcgcuuuggcagccaccgacgcggauacaaucuguauuggcuaccacgcuaacaauagcacugacacggucgauaccguuuuagagaaaaacgugacaguaacucauuccgugaaucugcuagaagacucucacaacgggaagcucugcaggcugaaaggaauagcaccccuucagcuggguaaguguaauaucgccggcugguugcucgggaacccugagugcgauccacugcugccggcccggucauggaguuauauugucgaaacccccaauagcgagaacggaaucuguuacccuggcgcuuucauugacuaugaagaacuccgcgagcaauuauccucugugucgucauuugaacgauucgagaucuuuccaaaagaaagcaguuggcccaaucauaacacaaauauagguguuaccgcagccugcucccacgcugggaagucuagcuucuaccguaaccugcuuugguugacuaagaaaggaggcuccuauccuaagcugaaaaauucauacgugaacaagaaaggcaaggagguccuagugcucugggggauccaucacccaaguaauagcaaggaucagcagacacuguaucagaacgagaacgccuacguaucuguuguguccucaaauuacaacagaagguuuacccccgaaauugcggagcggccugaaguccgcgaccaagcaggaagaaugaauuauuacuggacgcuucuggagccaggugauacuaucauguucgaagccaacggcaauuugguggcuccgugguaugccuuugcacucagcaggggguucggaaguggcauuaucaccucuaacgcuuccaugcacgaguguaauacaaaaugccagacuccccagggugccauaaacagcucgcugccuuuucagaauauucauccagugaccaucggggagugucccaaguacguccggucugcgaaauuacgcaugguuacaggacugcgaaacauuccuuccauccaaucaagaggccucuucggcgccaucgcaggguuuauugaaggagguuggaccggcaugauagacgggugguauggauaccaccaucagaaugagcagggcagugguuaugcugccgaucagaaaagcacgcaaaacgcuaucaaugggauuacuaacaaaguaaauuccgugaucgaaaagaugaacacacaguucaccgccgugggcaaagaguuuaacaaucuugaaaagaggauggagaaccugaauaagaaagucgacgauggauucuuggacauauggacuuacaacgcagagcuacuggugcuccuggaaaaugagcggacacuugacuuccacgauucuaacguuaagaaucuguacgaaaaagucaagagccaguugaaaaacaaugccaaggagauuggcaacgggugcuuugaguucuaucacaagugugacaaugagugcauggagucagugcguaacggaaccuacgauuauccaaaauacagugaagaguccaagcucaaucgcgaaaagaucgacggugugaagcuggagagcaugggcguauaucaaaucuuagcuauuuacucuacgguugcgucaagucuggugcuacucgucagccugggggcaaucuccuuuuggaugugcucuaacggaucgcuucaguguagaauuugcauauga

SEQ ID NO: 129662 - RNA, 1701 nt, Artificial Sequence
  derived and/or modified CDS sequence (opt3) from hemagglutinin__InfluenzaA__ABO38362
augaaggccaaacugcucgugcuucugugcgcuuugagcgcaaccgacgccgauacaaucuguauuggcuaccacgcgaacaauuccacugacacggucgauaccguuuuagagaagaacgugacaguaacucauucugugaaucugcuagaagacucacacaacgggaaacucugcagacugaagggaauagcuccccuucagcuggguaaauguaguaucgccggcuggauuuuggggaauccugagugcgaaagccucgucuccaagaagucuuggucguauaucgcagagaccccaaacucagaaaauggaacauguuacccgggcuauuucgccgauuacgaggagcugagggaacaacugagcaguguguccucuuuugagcgguucgaaauuuuucccaaagagagcuccuggccuaagcauaacguuacccgcggugugacugcuucaugcagucacaaagggaaaagcucuuucuaucgaaaucucuuauggcugacagagaaaaacggauccuacccaaaucuuucaaagagcuaugucaacaauaaggaaaaagagguguugguacuguggggcguucaucaccccaguaacaucgaaaaucagaagaccauauaccguaaagagaacgcauacgugucugucguguccagccacuauaacagaagguuuacgccugaaaucgccaagcggccaaaagugcgcgaccaggagggcagaauuaauuacuauuggacucuacucgagcccggggauaccaucauuuucgaagcuaacggaaaucugaucgccccuugguacgcguuugcacuuucgagggguuucggcucugggauaauuacauccaacgccucaaucgacgagugugaugcuaagugccagacuccacaaggagccauuaauaguagccugccguuucagaacguccaucccguuaccaucggcgaauguccuaaauaugugcgguccacaaaguugcgcaugguaaccggucuccgaaauaucccaucuauucagagcagagggcuguucggagcaauagcuggcuuuaucgagggcggguggacgggaaugauugacgguugguacggcuaucaccaucagaacgaacaagggucaggauacgccgcggaucagaagaguacucagaaugccaucaacggcauaacaaauaaagugaacuccgucauugagaagaugaauacccaguucacugcaguggguaaagaguuuaacaaguuagaaaagaggauggagaaucugaacaagaagguugacgauggguuccucgacaucuggacauacaacgcugaacuucugguguugcuagagaaugaacggacccuggacuuccacgauagcaacgucaaaaaucucuaugagaaggugaaaucucaacugaagaacaaugccaaagagaucggcaacggaugcuuugaguucuaccacaaguguaauaacgaaugcauggaaucaguaaagaauggcacguaugacuaccccaaauauagugaggagagcaaacuuaaccgugaaaagauugaugggguuaagcuggaguccaugggaguguaccagaucuuggcuauuuauucuaccgucgccucgagccucgugcuguuagucucccugggugcaauaucauuuuggaugugcaguaauggcucucuacagugucgcaucugcauuuga

SEQ ID NO: 129663 - RNA, 1698 nt, Artificial Sequence
  derived and/or modified CDS sequence (opt3) from hemagglutinin__InfluenzaA__ABO38373
augaaggccagacugcucgugcuucugugcgcuuuggcagccaccgacgcggauacaaucuguauuggcuaccacgcuaacaauagcacugacacggucgauaccguuuuagagaaaaacgugacaguaacucauuccgugaaucugcuagaagacucucacaacgggaagcucugcaggcugaaaggaauagcaccccuucagcuggguaaguguaauaucgccggcuggauuuuggggaacccugagugcgaaucacuccugagugagcggagcugguccuauaucgucgaaaccccaaauucugagaacggaacauguuacccgggcgauuucauugacuaugaggaacugcgcgagcaacucucgucagugagcaguuuugaacgauucgagaucuuuuccaaagagucuagcuggcccaagcauaccacuggugggguuacagccgcuugcucccacgcaggaaagucaaguuucuaccguaauuuacuguggcuuaccgaaaaagauggcagcuauccuaacuugaauaacucuuacgugaauaagaaaggcaaggagguccuggugcuauggggaguacaucacccauccaacauaaaagaccagcagacgcucuaucagaaggaaaaugccuacguuucaguggucagcaguaacuacaacagaagguuuacucccgagaucgcugaacggccuaaggugcgcgggcaagccgguagaauuaauuauuacuggacccugcuuaaaccaggcgauacaaucauguucgaggcgaacgggaaucugauugcacccugguaugccuuugcuuugucuaggggauucggcuccgguaucauaacuagcaacgccucgaugcacgagugugacaccaagugccagacaccucagggggcaauuaauucuucccucccauuucagaacauccauccggugaccauuggagaaugucccaaauacguccggucaacgaagcugcgcaugguuacuggcuuacgaaauaucccuaguauccaaagcagaggccuguucggggcuauugccggauuuauagaggguggcuggacagggaugaucgauggaugguauggcuaccaccaucagaacgaacaggguuccggguaugcggccgaccagaaaucuacccaaaaugcaauuaacggcaucacuaauaaggugaacagcguaauagagaaaaugaauacacaguucaccgcugugggaaaggaauuuaacaaucucgagaagaggauggagaaccuuaacaaaaaggucgaugacggcuuccuggacauuuggacguacaaugccgaauugcuagugcugcucgagaacgaacggacccuggauuuccacgacucaaauguuaaaaaccuuuacgagaaggugaaaaaucagcugcguaacaaugcuaaggaaaucgggaacggaugcuuugaguucuaucacaaguguaauaacgagugcauggaaagugucaaaaaugguacauacgauuauccaaaguacuccgaggaaagcaaauugaaccgcgagaagaucgacggcgugaaacucgagucuauggggguauaucaaauucuggccaucuacucaacugcagccaguagcuuaguucugcuagugucccucggagcuauuucuuuuuggaugugcucgaauggcagccugcaguguagaauaugcaucuga

SEQ ID NO: 129664 - RNA, 1701 nt, Artificial Sequence
  derived and/or modified CDS sequence (opt3) from hemagglutinin__InfluenzaA__ABO38384
augaaggccagacugcucgugcuucugugcgcuuuggcagccgcggacgcugauaccaucuguauuggcuaccacgccaacaauagcacagacacugucgauacgguuuuagagaaaaacgugaccguaacacauuccgugaaucugcuagaagacucucacaacgggaagcucugcaggcugaaaggaauacccccucuucagcuggguaaguguaauaucgcaggcugguugcucgggaacccagagugcgauucacugcugccggcccggaguuggagcuauauugucgaaacucccaauuccgagaacggagcuuguuacccuggcgacuucaucaauuaugaggaacuccgcgagcaauuaucuucggugagcagcuuugaacgauucgagauuuuuccaaaagaaaguuccuggcccaagcauaacaccacaaaggguguuaccgcagccugcucucacgcugggaaaagcuccuucuaccguaaucugcuuugguugacuaagaaagaggauucauauccuaagcugaaaaacaguuacgugaauaagaagggaaaagagguccuagugcucuggggcguacaucacccaucaucuuccaaggaacagcagacacuguaucagaacgagaaugccuacguuucaguggucagcaguaacuacaacagaagguuuacccccgaaaucgcggagcggccuaaagugcgcgaccaaacgggcagaaugaauuauuacuggacucuucuggaaccaggggauaccauaaucuucgaggcaaacggaaauuugauugccccgugguaugcuuuugcccucucuagggguuucggcuccgggaucauuacaagcaacgcaucgaugcacgaguguaauacuaagugccagacaccccagggagcuaucaacucuucccugccuuuucagaauauacauccagugaccauuggcgaaugucccaaauacguccggucagccaaguuacgcaugguuaccggucugcgaaacaucccuaguauucaaagcagaggacucuucggggcgaucgccggcuuuaucgagggcggguggacgggaaugauugacgguugguauggcuaccaccaucagaaugaacagggguccggauaugcagcugaucagaaaucuacucaaaacgccauaaauggcaucacaaacaaggugaauagcguaauugagaagaugaacacccaguucacugcuguggguaaagaauuuaauaaccuugagaagaggauggagaaccugaauaaaaaggucgacgauggguucuuggacaucuggacauacaacgccgaacuacuggugcuccuggagaaugaacggacccuugacuuccacgauucaaacguuaaaaaucuguacgagaaggugaagagucaguugaaaaacaaugcaaaggaaauaggcaacggaugcuuugaguucuaucacaaaugugacaaugagugcauggaauccguccguaacggcacguacgauuauccaaaguacagcgaggaaucuaaacucaaucgcgagaagauugacggggugaagcuggagucaaugggaguauaucaaaucuuagccaucuacaguaccguugcuagcucccuggugcuacucgucucucugggugcgauuucguuuuggaugugcagcaacggcucccuucaguguagaaucugcauuuga

SEQ ID NO: 129665 - RNA, 1701 nt, Artificial Sequence
  derived and/or modified CDS sequence (opt3) from hemagglutinin__InfluenzaA__ABO38395
augaaggccaagcugcucgugcuucugugcgcuuucaccgcaacagacgccgauacuaucuguauuggcuaccacgcgaacaauagcacggacaccgucgauacaguuuuggagaagaacgugacuguaacccauuccgugaauuuacuggaagacucucacaacgggaaacuaugcagacucaagggaauagcuccccugcagcuugguaauuguucaaucgccggcuggauucuggggaacccugagugcgaaaguuuguuuagcaaaaaguccuggucuuauaucgcagagacaccaaauucggaaaacggaaccuguuacccgggcuauuucgccgauuacgaggagcucagggaacaacugucaagcgucaguuccuuugagcgguucgaaauuuuucccaaggagucuagcuggccuaaucauacugugacaaaagguguuaccgcuuccugcucacacaaggggcgcaguagcuucuaucgaaaccugcucugguuaacgaaaaagaauggaucuuacccaaaccuguccaaaucauaugugaauaacaaggagaaggaaguccuuguguuguggggcguacaucaccccagcaauaucggcgaccagcgugcaauauaccacacugagaacgccuacguuaguguggucucuucccauuauaacagaagguuuaccccugaaaucgcuaaacggccaaaggugcgcgaucaggaggggagaauuaauuacuauuggacacugcuagaacccggagacacuaucauuuucgaggccaacgguaaucucaucgcgccuugguacgcauuugcccugagcaggggcuucgggucgggaauaauuaccucuaacgcuuccauggaugagugugacgccaaaugccagacaccacaaggcgcaaucaauucaagucuuccguuucagaacgugcaccccgucaccauuggugaauguccuaaguauguucggagcacgaaacugcgcauggugacuggguugcgaaauaucccauccauccagucuagaggacucuucggcgcuauugccggcuuuauagaagggggauggacagguaugaucgauggcugguacggguaucaucaccagaacgaacaaggaagcggcuacgcggccgaccagaagucaacccagaaugcaauuaacgguaucacuaauaaaguaaacagugugauagagaagaugaauacacaguucaccgcugucgggaaggaguucaacaaacuggagaggcggauggagaauuuaaacaagaaaguggaugacggcuuucuggacauuuggacguacaacgccgaacuccuuguucuguuggagaaugaacguacccuagauuuccacgacuccaacgugaagaaucuguaugagaaagucaagagccaacucaagaacaaugcuaaagaaaucggaaacggcugcuuugaguucuaccauaaguguaauaacgagugcauggaaucugugaaaaaugggacauaugauuaccccaaguauucagaggaaaguaaacugaaccgcgagaagaucgacggaguaaaacuugagagcauggguguuuaccagauucuggccaucuauuccacuguggcaucuucguugguccuccuggugagcuuaggcgccauuuccuuuuggaugugcucaaaugggagucugcaguguagaauaugcaucuga

SEQ ID NO: 129666 - RNA, 1701 nt, Artificial Sequence
  derived and/or modified CDS sequence (opt3) from hemagglutinin__InfluenzaA__ABO38406
augaaggccaaacugcucgugcuucugugcgcuuugagcgcaaccgacgccgauacaaucuguauuggcuaccacgcgaacaauuccacugacacggucgauaccguuuuagagaagaacgugacaguaacucauucugugaaucugcuagaagacaaccacaaugggaaacucugcaagcugaaaggaauagcuccccuucagcuggguaaguguucaaucgccggcuggauuuuggggaacccugagugcgaaagucucuucagcaagaaauccuggucuuauaucgcagagaccccaaauucggaaaacggaacauguuacccgggcuauuuugccgauuacgaggagcugagagaacaacugucaagcgucaguuccuucgagagguuugaaauuuuccccaaggagucuagcuggccuaaucauaacgugaccaaagguguuacugcuuccugcucacacaaggggaaaaguagcuuuuaucggaaucucuuauggcugacagagaagaagggaucuuacccaaaccuuuccaaaucauaugugaauaacaaggaaaaagaggucuuggugcuguggggcauccaucaccccagcaauauagaagaccagaagaccaucuaccgcaaagagaacgcauacguaaguguugugucuucccacuauaaccgacguuucacgccugaaauugccaagagaccaaaagucagggaucaggagggccggaucaauuacuauuggacucuacucgagcccggggacaccauuaucuuugaagcuaacggaaaucugauagccccuugguacgcguucgcacuuagccgcgguuuuggcucggggauuaucacaucuaacgccuccauggaugagugugacgcuaagugccagacuccaagaggagccauuaauucaagucugccguuccaaaacgugcaucccgugaccaucggcgaauguccuaaguaugucaggagcacaaaauugcggaugguuaccggucuccgcaauaucccauccauucagucucgagggcuguuuggagcaauagcuggcuucaucgagggcggguggacgggaaugauugaugguugguacggcuaucaccaucagaacgaacaggggagcggauacgccgcggaccaaaagucaacucagagugccaucaauggcauaacaaacaaaguaaauuccauuaucgagaagaugaacacccaguuuacugcaguggguaaagaguucaauaaguuagaaaagagaauggagaaccugaauaaaaagguggaugacggguuccucgacaucuggacauacaacgcugaacuucuggucuugcuagagaacgaaaggacccuggauuuucacgacagcaaugugaaaaaccucuaugagaagguuaaaucucagcugaagaauaacgccaaggagauuggcaauggaugcuucgaauuuuaccacaaauguaacaaugagugcauggaaucagugaagaacggcacguaugauuaccccaaauauagugaggagagcaaacuuaaucgggaaaagaucgacggggucaagcuggaguccaugggaguguaccaaauuuuggcuauauauucuaccguagccucgagccucguucuguuagugucccugggugcaaucucauucuggaugugcaguaacggcucucuacagugucguauuugcaucuga

SEQ ID NO: 129667 - RNA, 1701 nt, Artificial Sequence
  derived and/or modified CDS sequence (opt3) from hemagglutinin__InfluenzaA__ABO38417
augaagaccaucauugcccugagcuacauacucugccuuguguucgcucagaaacugcccgucaacgacaauuccacagcaacuuuguguuuaggccaccaugccguuccuaacgggacgcuggugaagaccaucacaaaugaucacauugagguaacuaacgcgaccgaacuugugcaaucuucaccaacaggaagaaucugcgacaguccgcaucagauucucgauggugagaauuguacccugaucgacgcucuacugggcgauccccacugcgacggguuucagaacaaagaaugggauuuguucgucgagaggagcacugccuauuccaauuguuacccuuaugacgugccagauuacgcaucucuccggucgcugguugccucaagcggaacacuggaauuuaacaaugagaguuucaacuggaccggcguggcucagaaugguacguccucugcaugcaagcgccgaagcauaaaauccuuuuucucacgucucaacugguuacaucaacugaaguauaaguaccccgcccuuaaugucacuaugccuaacaaugagaaauuugacaaguuguauaucuggggagugcaccacccaaguaccgauagcgaccagauuucucuguacgcucaggccuccgggagaguaacaguuucaacuaaaaggagccagcaaaccgugauccccaacauuggcagucggccuuggguccgcggcgugucuuccagaaucagcauauacuggacaauugugaagccaggggauauccuacucauuaacucgaccggaaaucugaucgcgccgagggguuauuucaaaauccggucuggcaaguccucaauuaugcgcaguaacacgcccauagggaaguguaauagcgaaugcaucacuccuaacggauccauuccaaaugacaaacccuuucagaacgucaaucgaaucacauacggcgcauguccuagauauguuaagcagaacacccuuaaacuggccacugguaugaggaaugugccagagaagcagacacgggggauauucggagcuauugccggcuuuaucgaaaacggcugggaggggaugguagacggaugguacgguuuccgucaucaaaauucugagggcaccgggcaggcagcugauuugaaaagcacgcaggccgcgaucaaccaaauuaauggaaagcucaaccgccugaucgagaaaaccaaugaaaaguuucaccagauugaaaaggaguucucagaaguggagggcagaauacaggacuuagagaaauaugucgaagauacaaagaucgaccuguggaguuacaacgccgagcuccuuguggcacuggaaaaccagcauacuauugauuugaccgacuccgagaugaauaaacuauucgaaaggacacggaagcaacugcgagagaacgcugaggauauggguaaugggugcuuuaaaaucuaucacaagugugacaacgccugcaucggcagcauucgcaauggaacuuacgaucacgacguuuacagagaugaagcucucaacaauagguuccagauaaagggcguggagcugaaaucuggguauaaggacuggauccuuuggauuucauuugccaucaguugcuuccuguugugugucgugcuccugggauuuauuaugugggcaugccagaaagguaacauccgguguaauauaugcaucuga

SEQ ID NO: 129668 - RNA, 1689 nt, Artificial Sequence
  derived and/or modified CDS sequence (opt3) from hemagglutinin__InfluenzaA__ABO38712
auggccaucauuuacuucauacugcucuuuaccgcugugagaggcgaccagaucugcauuggguaucacgcaaacaauagcacagagaaggucgauacuauccuugaaaggaacguuacggugacccaugccaaagacauucuggagaagacacacaauggaaaauuguguaaguuaaacgguauacccccucuggaacuaggcgauugcuccaucgcgggguggcuccugggaaauccagagugugaccggcuucugcgcguaccggaauggucuuacaucauggagaaagagaacccccgauauucauugugcuacccuggcaguuucaaugauuaugaggaacucaagcaucugcugagcuccgugaagcacuuugaaaaaguccguauucucccaaaggacgguuggacucaacauaccacaucugggggaucgaaggcuugugccgugucaggcaaaagcaguuucuuuagaaacaugguuugguuaaccaaaaagggccccaauuacccuguggcaaagagguccuauaacaauacuucuggggagcagaugcugaucauuuggggaguccaccacccaaaagaugaggccgaacagcgggcucuuuaccagaagguggguacauacguaagcgcauccaccucaacguugaacaaacgcaguacucccgagaucgccgcuagaccugaaguuaauggccuggggagcaggauggaguucucuuggacccuacucgacgugugggauacaauaaacuuugaauccacuggaaaucuggucgccccagaguauggcuucaagauuucaaaacgggguagcagugggaucaugaagaccgagggaacacuuggcaacugcgaaaccaaaugucaaacgccgcugggcgcgauuaacacuacauugcccuuucauaaugugcacccucucaccaucggggagugcccaaaguacgugaagucugaaaaacuggucuuagcaacuggacugcgcaacguuccccagaucgagucccgaggucucuucggcgccauugcuggguuuauagaaggaggcuggcaggguaugguggacgggugguauggcuaccaucacagcaaugaucagggaucgggcuaugccgcagacaaggagucuacacaaaaggcuuucgauagaaucaccaacaaaguaaauuccgugauugagaaaaugaacacgcaguuugaagccgucgggaaggaguucucaaaucuugaaaagaggcuggagaacuugaauaaaaagauggaagacggauuccuagacguguggaccuacaacgcggagcugcucguucugauggagaaugaacggacacuugauuuucacgacaguaacgugaaaaaucuguauaacaagguccguaugcaguugcgcgauaaugugaaagagcucgguaacggcuguuucgaauuuuaccauaagugcgacgaugaguguaugagcuccguaaagaacgggacuuacgacuauccuaaauacgaggaagagucuaagcugaaaagaaaugaaaucaagggaguuaaauuaagcucaaugggcguguaucagauacuggccauuuacgcaaccgucgcugguagucuaucccucgccaucaugaucgcugggauuagccuguggaugugcucuaacggcucacuucaaugcaggaucuguauuuga

SEQ ID NO: 129669 - RNA, 1689 nt, Artificial Sequence
  derived and/or modified CDS sequence (opt3) from hemagglutinin__InfluenzaA__ABO38723
auggccaucauuuacuucauacugcucuuuaccgcugugagaggcgaccagaucugcauuggguaucacgcaaacaauagcacagagaaggucgauacuauccuugaaaggaacguuacggugacccaugccaaagacauucuggagaagacacacaauggaaaauuguguaaguuaaacgguauacccccucuggaacuaggcgauugcuccaucgcgggguggcuccugggaaauccagagugugaccggcuucugcgcguaccggaauggucuuacaucauggagaaagagaacccccgauauucauugugcuacccuggcaguuucaaugauuaugaggaacucaagcaucugcugagcuccgugaagcacuuugaaaaaguccguauucucccaaaggacgguuggacucaacauaccacaucugggggaucgaaggcuugugccgugucaggcaaaagcaguuucuuuagaaacaugguuugguuaaccaaaaagggccccaauuacccuguggcaaagagguccuauaacaauacuucuggggagcagaugcugaucauuuggggaguccaccacccaaacgaugaggccgaacagcgggcucuuuaccagaaaguggguacauacguaagcgcauccaccucaacguugaauaagcgcaguacucccgagaucgccgcuagaccugaaguuaacggccuggggagcaggauggaguucucuuggacccuacucgacgugugggauacaauaaauuuugaauccacuggaaaccuggucgccccagaguauggcuucaaaauuucaaagcgggguagcagugggaucaugaaaaccgagggaacacuuggcaacugcgaaaccaagugucaaacgccgcugggcgcgauuaauacuacauugcccuuucauaacgugcacccucucaccaucggggagugcccaaaauacgugaagucugaaaagcuggucuuagcaacuggacugcgcaauguuccccagaucgagucccgaggucucuucggcgccauugcuggguuuauagaaggaggcuggcaggguaugguggacgggugguauggcuaccaucacagcaacgaucagggaucgggcuaugccgcagacaaagagucuacacaaaaggcuuucgauagaaucaccaauaaaguaaacuccgugauugagaagaugaauacgcaguuugaagccgucgggaaagaguucucaaaccuugaaaagaggcugggaaauuugaacaagaaaauggaggacgguuuccuagacguguggaccuacaaugcggaacugcucguucugauggagaacgagcggacacuugauuuucacgacaguaaugugaagaaccuguauaauaaaguccguaugcaguugcgcgauaacgugaaggaacucggcaacggguguuucgaguuuuaccauaaaugcgacgaugaauguaugagcuccguaaagaauggaacuuacgacuauccuaaguacgaggaggaaucuaaacugaagagaaacgagaucaaaggcguuaaguuaagcucaauggguguguaucagauacuggccauuuacgcaaccgucgcugggagucuaucccucgccaucaugaucgcuggcauuagccuguggaugugcucuaauggaucacuucaaugcaggaucuguauuuga

SEQ ID NO: 129670 - RNA, 1698 nt, Artificial Sequence
  derived and/or modified CDS sequence (opt3) from hemagglutinin__InfluenzaA__ABO44046
augaaggugaaacugcucguccuucugugcaccuucacagccacuuacgcugacacgaucuguauuggcuaucacgcaaacaauagcaccgauacaguugacacuguguuggagaagaacguaaccgugacacauuccgucaauuuacuggaagauucucacaacgggaaacuaugccuccugaagggaauagcgccccuucagcuggguaauuguucaguggccggcuggaucuuggggaacccugagugcgaacuccugauuaguaaagagagcugguccuacaucguugaaaccccaaauccggagaacggaacuuguuaucccggcuacuuugcugacuaugaggaacugagagagcaacucucuucggugagcucauucgaaagguuugagauuuucccuaaggagaguuccuggccaaaucauacagucaccggugugucugccagcugcucccacaacgggaagucaaguuuuuaccggaauuuacuguggcuuacgggcaaaaacggauuguaucccaaucugagcaagucuuacgcaaacaauaaagaaaaggagguucuaguacucuggggcgugcaucacccuccaaacaucggggaucagcgcgcccuguaccacacugaaaacgcuuaugucuccguggugucaagccauuacagucgacguuucacccccgagauagcaaaaagaccuaaggucagggaccaggaaggacggaucaauuauuacuggacacuucuggagccaggugauacuauuaucuuugaggccaacggcaauuugauugcuccgcgcuaugccuucgcgcucucuagaggguuuggauccggcaucauaaccagcaacgcacccauggacgaaugugaugccaagugccagacaccucaaggugcuauuaauucgucucugccauuccagaacguucaccccgugaccaucggggaguguccuaaauacguaagguccgccaaguuacggauggugacgggacugcgcaauauuccaucaauccagagucgaggccucuuuggcgcaaucgcuggguucauugaaggagguuggacuggcauggucgacgggugguauggauaccaucaccagaacgagcaaggcagcgguuacgccgcggaucagaaauccacacagaaugccauaaacgggaucaccaauaagaugaacucugugauugaaaagaugaauacucaguuuacagcaguuggcaaagaguucaacaaacuugagagaaggauggaaaaucugaacaagaagguggacgauggauucuuggacaucuggaccuauaacgcugagcuacugguccuccuggaaaaugagcggacgcuugacuuucacgauagcaacgugaaaaaucuguacgaaaagguaaaaucacaauugaagaacaaugccaaagagauaggcaacgggugcuucgaguuuuaucauaaguguaauaacgaaugcauggagaguguuaagaauggaaccuacgacuaucccaaauacuccgaagagagcaagcucaaccgugagaaaauugauggugugaagcuggaaucuaugggcgucuaucagaucuuagcuaucuacucaacaguggccaguagccugguccuacucgugucccugggggcaauuucuuucuggaugugcucgaauggaagccuucagugucgcaucugcauuuga

SEQ ID NO: 129671 - RNA, 1689 nt, Artificial Sequence
  derived and/or modified CDS sequence (opt3) from hemagglutinin__InfluenzaA__ABO44057
auggccaucauuuaccugauacuccuuuucaccgcugugagaggcgaccagaucugcauuggguaucacgcaaacaauagcacagagaaggucgauacuauccuggaaaggaacguuacggugacccaugccaaagacauuuuggagaagacacacaauggaaaauuauguaagcugaacgguauacccccucuagaacucggcgauugcuccaucgcgggguggcugcuuggaaauccagagugugaccggcuguugcgcguaccggaauggucuuacaucauggagaaagagaacccccgauauucacucugcuacccuggcaguuuuaaugauuaugaggagcugaagcaucugcucagcuccgugaagcacuucgaaaaagucaagauuuuaccaaaagacgguuggacucaacaugagaccgaugggggaucuaaggcuugugccgugucgggcaaagcaucauuuuuccguaacaugguuuggcugacaaagagaggccccaauuaccagguggccaagaggagcuauaacaauaccaguggggagcagaugcuuaucauuuggggaguccaccacccuaaagacgaagcugagcagcgggcauuguaccaaaagguggguacuuacguauccgccucuacaagcacccugaacaaacgcuccacgccagaaaucgcugccagacccgagguuaauggccuagaaucaaggauggaguuuaguuggacucuccuggaugugugggacaccauaaacuucgagagcacagggaaucuugucgcgccugaauauggauuuaagauuucuaaacggggcuccucagguaucaugaagacugaggggacccugggaaacugcgaaacaaaaugucagaccccauugggcgcaauuaacacgacucucccguuccauaaugugcacccccugacaaucggcgagugcccuaaguacgucaagagcgaaaaauuagugcuggccaccgggcuccgcaacguuccacagaucgagagucgaggacuuuuuggugcuauugccggcuucauagaagggggauggcagggcaugguggaugguugguauggguaccaucacucuaaugaccaaggcuccggauaugcagcugauaaggaaagcacucagaaagccuuugacagaaucacaaacaagguaaauucggugauugagaaaaugaacauccaguucgaagcggucggcaaggaguuuucuaaucuggaaaagagguuggagaaccuaaauaaaaagauggaggacggguuccuggauguguggaccuacaacgccgaacuccugguucuuauggagaaugaacggacgcuggacuuccacgauuccaacgugaaaaauuuguaugacaagguccguaugcagcuccgcgauaacgugaaagagcugggaaaugguuguuuugaguucuaccauaagugcgacgaugaauguaugaacucaguaaagaacggcaccuacgacuaucccaaauacgaggaagagaguaaguuaaaaagaaaugaaauaaaggggguuaaacugagcuccaugggaguguaucaaauucuagcaaucuacgcuacagucgccggcucucucagccuggcuaucaugauugccgguaucucauuuuggaugugcaguaacgggucccuucagugcaggguguguauuuga

SEQ ID NO: 129672 - RNA, 1701 nt, Artificial Sequence; identical to SEQ ID NO: 128304
  derived and/or modified CDS sequence (opt3) from hemagglutinin__InfluenzaA__ABO44079

SEQ ID NO: 129673 - RNA, 1689 nt, Artificial Sequence
  derived and/or modified CDS sequence (opt3) from hemagglutinin__InfluenzaA__ABO44090
auggccaucauuuaccugauacuccuuuucaccgcugugagaggcgaccagaucugcauuggguaucacgcaaacaauagcacagagaaggucgauacuauccuggaaaggaacguuacggugacccaugccaaagacauuuuggagaagacacacaauggaaaauuauguaagcugaacgguauacccccucuagaacucggcgauugcuccaucgcgggguggcugcuuggaaauccagagugugaccggcuguugcgcguaccggaauggucuuacaucauggagaaagagaacccccgagauggccucugcuauccugguucauuuaaugacuacgaggaacugaagcaucugcucaguagcgugaagcacuucgaaaaagucaagauuuuaccaaaagaucguuggacucaacauaccacaaccgggggauccagagcuugugccgugucuggcaaccccucguuuuucaggaauaugaucuggcugacuaagaaaggcucaaacuauccuguugcaaaggggagcuacaauaacacaaguggagagcagaugcuuauuaucuggggugugcaccacccaaaugacgagaccgaacagcggacguuguaucagaacgucggcacuuacguguccguaguuaccucuacacugaauaagcgcagcacucccaaaauagccaccagaccuaaggugaacgggcuaggaggcaggauggaguuuuccuggacacuccuggauaugugggacaccauuaacuucgaaucaacggguaaucuuaucgcuccagaguacggguuuaaaauuaguaagcggggaagcucuggcaucaugaaaacugaaggcacacuggagaacugcgagaccaagugucaaacuccguugggggcaaucaauacaacccuccccuuccauaacguccacccucugacgauuggagaaugcccaaaauaugugaaguccgagaaguuagugcuggccaccggucuccgcaaugucccccagauagaaucacgaggccuuuuuggggcuaucgccggauucauugagggcgguuggcaggggaugguugauggcugguacggauaucaucacagcaacgaccagggcaguggguacgcggcagauaaagaaucuacacaaagagccuuugacggaaucacuaauaaggugaacuccguaauagagaaaaugaauacccaguucgaggcuguggguaaggaauuuagcaaccuggagaggcgguuggaaaaucuaaacaaaaagauggaggacggccugcucgaugucuggacauauaaugccgaacugcuugugcugauggagaacgagcguauuuuggacuuccacgauucgaauguuaagaaccucuacgacaaagugcgcaugcagcugagagauaacgucaaggaauuagggaauggauguuucgaguuuuaucauaaaugcgacgaugaauguaugaacucugugaagaauggcacuuacgacuacccuaaauaugaggaggaauccaagcugaacaggaaugagaucaaggguguaaaacuaucaaguauggggguuuaccagauccucgcaauuuaugcuaccguggccggcagccugucccuugcgaucaugauggccggaauuucuuucuggaugugcagcaacggcucauugcaaugccggauauguaucuga

SEQ ID NO: 129674 - RNA, 1689 nt, Artificial Sequence
  derived and/or modified CDS sequence (opt3) from hemagglutinin__InfluenzaA__ABO44101
auggccaucauuuaccugauacuccuuuucaccgcugugagaggcgaccagaucugcauuggguaucacgcaaacaauagcacagagaaggucgauacuauccuggaaaggaacguuacggugacccaugccaaagacauuuuggagaagacacacaauggaaaauuauguaagcugaacgguauacccccucuagaacucggcgauugcuccaucgcgggguggcugcuuggaaauccagagugugaccggcuguugcgcguaccggaauggucuuacaucauggagaaagagaacccccgauauucacucugcuacccuggcaguuuuaaugauuaugaagaacugaagcaucugcucagcuccgugaagcacuucgaaaaagucaagauuuuaccaaaagacgguuggacucaacauaagaccgaugggggaucuaaggcuugugccgugucgggcaaacccucauuuuuccguaacaugguuuggcugacaaagaaaggcccuaauuacccaguggcaaagagaagcuauaacaauaccaguggggagcagaugcuuaucauuuggggaguccaccaccccaacgacgaggccgaacagagggcuuuguaccagaaaguggguacuuacguauccgcaucuacaagcacccugaauaagcgguccacgccugagaucgccgcucgcccagaaguuucaggccuagggaguagaauggaguuuagcuggacucuccuggaugugugggacaccauaucuuucgaauccacaggaaaccuugucgccccggaguauggcuuuaaaauuucaaagagggguagcagugggaucaugaaaacugagggaacccugggcaauugcgaaacaaagugucaaacccccuugggcgcgauuaacacgacucucccuuuccauaacgugcacccacugacaaucggggagugccccaaguacgugaaaucugaaaaguuaguccuggcaaccggacuccggaauguuccucagaucgagucccgcggucuuuuuggcgccauugcuggguucauagaaggaggcuggcaggguaugguggaugggugguauggcuaccaucacagcaacgaccagggaucgggcuaugccgcagauaaagagucuacucaaaaggcuuuugaccgaaucacaaauaaaguaaacuccgugauugagaagaugaauacccaguucgaagccgucgggaaggaguuuucaaaccuggagaaaagauuggagaaucuaaacaagaaaauggaagacggauuccuggauguguggacguacaaugcggagcuccugguucuuauggagaacgaaaggacccuggacuuccacgauaguaaugugaagaacuuguaugacaaaguccggaugcagcuccgugauaaugugaaggagcuggguaacggcuguuuugaguucuaccauaagugcgacgaugaauguaugaauagcguuaaaaacgggacauacgacuauccaaaguacgaggaagaguccaaauuaaagcgcaacgaaaucaaaggaguaaagcugucuagcaugggcguguaucagauacuagccauuuacgcaacugucgcugguucacucagucuggccaucaugaucgcugggauuuccuuuuggaugugcagcaauggcucucuucaaugcagaaucuguauuuga

SEQ ID NO: 129675 - RNA, 1701 nt, Artificial Sequence
  derived and/or modified CDS sequence (opt3) from hemagglutinin__InfluenzaA__ABO44123
augaaggccaaacugcucgugcuucugugcgcuuucaccgcaacagacgccgauacuaucuguauuggcuaccacgcgaacaauagcacggacaccgucgauacaguuuuggagaagaacgugacuguaacccauuccgugaauuuacuggaagacucucacaacgggaaacuaugcagacucaagggaauagcuccccugcagcuugguaauuguucaaucgccggcuggauucuggggaacccugagugcgaaaguuuguuuagcaaaaaguccuggucuuauaucgcagagacaccaaauucggaaaacggaaccuguuacccgggcuauuucgccgauuacgaggagcucagggaacaacugucaagcgucaguuccuuugagcgguucgaaauuuuucccaaggagucuagcuggccuaaucauacugugacaaaagguguuaccgcuuccugcucacacaaggggaaaaguagcuucuaucgcaaccugcucugguuaacgaagaaaaauggaucuuacccaaaccuguccaagucauaugugaauaacaaggagaaagaaguccuuguguuguggggcguacaucaccccagcaauaucggcgaccagcgagcaauauaccacacugagaacgccuacguuaguguggucucuucccauuauaaccguagauuuaccccugaaaucgcuaagaggccaaaagugcgggaucaggaggggcgcauuaauuacuauuggacacugcuagaacccggagacacuaucauuuucgaggccaacgguaaucucaucgcgccuugguacgcauuugcccugagcagaggcuucgggucgggaauaauuaccucuaacgcuuccauggaugagugugacgccaagugccagacaccacaaggcgcaaucaauucaagucuuccguuucagaacgugcaccccgucaccauuggugaauguccuaaauauguuaggagcacgaagcugcggauggugacuggguugcgcaauaucccauccauccagucucgaggacucuucggcgcuauugccggcuuuauagaagggggauggacagguaugaucgauggcugguacggguaucaucaccagaacgaacaaggaagcggcuacgcggccgaccagaaaucaacccagaaugcaauuaacgguaucacuaauaagguaaacagugugauagagaagaugaauacacaguucaccgcugucgggaaagaguucaacaagcuggagagaaggauggagaauuuaaacaaaaagguggaugacggcuuucuggacauuuggacguacaacgccgaacuccuuguucuguuggagaaugaacggacccuagauuuccacgacuccaacgugaaaaaucuguaugagaaggucaagagccaacucaaaaacaaugcuaaggaaaucggaaacggcugcuuugaguucuaccauaaauguaauaacgagugcauggaaucugugaagaaugggacauaugauuaccccaaauauucagaggaaaguaagcugaaccgugagaagaucgacggaguaaaacuugagagcauggguguuuaccagauucuggccaucuauuccacuguggcaucuucguugguccuccuggugagcuuaggcgccauuuccuuuuggaugugcucaaaugggagucugcagugucgcauaugcaucuga

SEQ ID NO: 129676 - RNA, 1701 nt, Artificial Sequence
  derived and/or modified CDS sequence (opt3) from hemagglutinin__InfluenzaA__ABO44134
augaaggccaaacugcucgugcuucugugcgcuuugagcgcaaccgacgccgauacaaucuguauuggcuaccacgcgaacaauuccacugacacggucgauaccguuuuagagaagaacgugacaguaacucauucugugaaucugcuagaagacucacacaacgggaaacucugcagacugaagggaauagcuccccuucagcuggguaaauguaguaucgccggcuggauuuuggggaauccugagugcgaaagccucuucuccaagaagucuuggucguauaucgcagagaccccaaacucagaaaauggaacauguuacccgggcuauuuugccgauuacgaggagcugagggaacaacugagcagugucuccucuuucgagcgguuugaaauuuuccccaaagagcgcagcuggccuaagcauaacgugacccgagguguuacugcuuccugcucacacaaagggaagaguagcuuuuaucguaaucucuuauggcugacagagaaaaacggaucuuacccaaaucuuuccaagucauaugugaacaauaaggaaaaagaggucuuggugcuguggggcguacaucaccccagcaacaucgaagaccagaagaccauauacagaaaagagaaugcauacguuaguguggucucuuccaacuauaacaggcgguucacgccugaaaucgccgagcgcccaaaggugagaggccaggcugggaggauuaauuacuauuggacucuacucgagcccggagauaccaucauuuuugaagccaacgguaaucugaucgcgccuuggcacgcauucgcccuuagccggggcuuugggucgggaauaauuacaucuaacgcuuccauggacgagugugauacuaaaugccagaccccacaaggcgccaucaauucaagucugccguuccagaacauucaucccgugacaaucggugaauguccuaaguacguccgcagcaccaaauugcgaaugguuacggggcucagaaauaucccauccauucagucuaggggacuguuuggcgcaauagcuggcuucaucgaagggggauggacugguaugauugacggcugguauggguaccaccaucagaacgagcaaggaagcggcuaugccgcggaucagaagucaacacagaaugccaucaacgguauaaccaauaaggugaacaguguaauugagaaaaugaauacucaguuuacagcaguggggaaggaguucaacaaauuagaaaagcggauggagaaucugaacaaaaaggucgacgauggcuuccucgacaucuggaccuacaacgcugaacuucugguguugcuagagaaugaacguacgcuggacuuucacgauuccaacguuaagaaucucuacgagaaagucaagagccaacugaaaaacaaugccaaggagaucggaaacggcugcuucgaauuuuaucacaaauguaauaacgagugcauggaaucugugaagaaugggaccuacgacuaucccaaguacucagaggagaguaaacuuaaccgcgaaaagauugauggagugaaacuggagagcauggguguauaucagaucuuggcuauuuacuccacaguugccucuucgcucgugcuguuagucagccugggcgcaauauccuucuggaugugcucaaaugggagucuacaguguagaaucugcauuuga

SEQ ID NO: 129677 - RNA, 1701 nt, Artificial Sequence
  derived and/or modified CDS sequence (opt3) from hemagglutinin__InfluenzaA__ABO52071
augaagaccaucauugcccugagcuacauacucugccuuguguucgcucagaaacugcccggcaacgacaauuccacagcaacuuuguguuuagggcaccaugccgucccuaacggaacgaucguuaagaccauuacaaaugaucaaaucgaggugacuaacgcgaccgaacugguacaaaauucuucaacagguggcauuugcgacaguccacaccagauccuagauggggagaacuguacccucauagacgcucugcuuggagauccgcagugcgacggcuuucagaauaaaaagugggaucuguucguggaaagaagcaaagccuauuccaacuguuaccccuaugacgucccugauuacgcaucuuugaggucgcucguggccucaagcgguacucuggaguuuaauaacgaaaguuucaauuggacagggguuacccagaacggaacguccucugcuugcaagcggcgcagcaauaacuccuuuuucucacgacugaauuggcucacucauuuaaaguuuaaauauccagcacugaacgugaccaugcccaacaaugagaaguucgacaaacuuuacaucuggggcguccaccauccuaguacagauaacgaccagauuagcuuguaugcccaggcuucuggccguaucacuguguccaccaagagaucacaacagacaguaauuccaaauaucgggagcaggccccggguucgcgauauaccuaguagaauuucuaucuacuggaccauugugaaaccaggagacauccugcuaaucaacuccacggguaaucucauugccccgaggggcuacuuuaagauacggagcgggaagucgucuaucaugcgcuccgacgcgcccauuggaaaauguaacucagagugcaucacuccuaauggcaguauaccaaacgauaagcccuuccagaaugucaaccgaauuacauauggugcauguccuagauacgugaaacagaauacccugaaacuugccacugggaugaggaacgugccagaaaagcaaacacggggaaucuuuggcgcuaucgccggcuucauugagaaugggugggaaggaauggucgacgguugguauggcuuucgucaccagaacagcgaggggaucggacaggcagcugaucugaaguccacccaagccgcgauuaaucagauaaacggcaaauugaaccgccucaucgguaagacgaaugagaaguuccaccagauugaaaaagaguucucugaaguugaggggagaauccaggaccuggaaaaguacguggaggauaccaaaaucgacuuauggagcuauaacgccgagcugcucguagcacuugaaaaucaacauacaauugaucugacugacucagagaugaacaaguuguuugaaaggaccaaaaagcagcuacgggagaaugcugaagauaugggcaacggaugcuucaagauauaccacaaaugugacaaugccugcaucggcaguauucgaaacgggacauaugaucaugacguguaccgcgacgaggcucugaauaacagauuucagaucaagggagucgagcucaaauccgguuacaaggauuggauucuguggaucagcuucgccauaucuugcuuucuucuguguguggcauugcucggcuucaucaugugggccugccagaaagggaauauuagguguaacaucugcauuuga

SEQ ID NO: 129678 - RNA, 1701 nt, Artificial Sequence
  derived and/or modified CDS sequence (opt3) from hemagglutinin__InfluenzaA__ABO52225
augaaggccaaacugcucgugcuucugugcgcuuucaccgcaacauacgccgacacuaucuguauuggcuaucacgcgaacaauagcacggauaccgucgacacaguuuuggagaagaacgugacuguaacccauuccgugaauuuacuggaagauucucacaacgggaaacuaugcagacucaagggaacagcuccccugcagcuugguaauuguucagucgccggcuggauacuggggaacccugagugcgaaaguuuguuuagcaaagaguccuggucuuacaucgcagaaaccccaaauccggagaacggaacuuguuaucccggcuacuucgccgacuaugaggaacucaaggagcaacugucgucagugagcaguuuugaaagguucgagauuuuuccuaaggaguccucuuggccaaaucauacaguuaccaaaggugugacggcuagcugcucccacaacgggaagucaaguuucuacaaaaaucugcucugguuaacugaaaagaacggacuguaucccaaucuuagcaaaucuuacgucaacaauaaggagaaggaaguguugguacuguggggcguucaucacccuuccaacaucggcgaucagcgggcaauuuaccacaccgagaacgccuaugugucagucgugagcagucauuacucucgccgauuuacaccagaaaucgcuaaacgucccaaggugagagaccaggaggggaggauaaauuauuacuggacucuacucgagccuggagauaccaucauuuucgaagccaacgguaaucugaucgcgccaugguaugcauuugcccuuucccggggcuucgggagcggaauuaucacaucgaacgcuucuaugggcgagugugacgccaaaugccagaccccgcaaggugcaauaaauuccucacugcccuuucagaacguccacccuguuacgauuggggaauguccaaaguacgugcgcaguacuaaauugagaaugguaacaggacucaggaauauccccagcauucagucccggggccuguucggcgcuaucgccggguuuaucgagggagguuggaccggcaugauugaugggugguauggauaccaucaccagaacgaacaaggcucugguuacgcggccgacaagaaaagcacucagaaugcaauagaugggaucacaaacaaggucaauucagugauugagaagaugaacacccaguucacggcugugggcaaagaguucaauaaguuagaacgccgaauggagaaccugaauaaaaagguugacgauggauuucucgacaucuggaccuauaacgccgaacuucugguguugcuagagaacgaaagaacacuggacuuccacgauaguaaugucaaaaaccucuacgagaaggugaagaaucagcugaaaaacaaugcuaaggagauaggcaacgggugcuuugaguucuaucauaaauguaaugacgaaugcauggaauccguaaagaacggaacuuacgauuauccuaaauacagcgaggagucuaaacuuaagagggaaaagauugacgguguuaagcuggagucaaugggcguguaucaaaucuuggccaucuacaguaccgucgcaagcucccucgugcuguuagucucucugggggccauuucguuuuggaugugcagcaauggaucccuacagugucggaucugcauuuga

SEQ ID NO: 129679 - RNA, 1689 nt, Artificial Sequence
  derived and/or modified CDS sequence (opt3) from hemagglutinin__InfluenzaA__ABO52236
auggccaucauuuaccugauacuccuuuucaccgcugugagaggcgaccagaucugcauuggguaucacgcaaacaauagcacagagaaggucgauacuauccuggaaaggaacguuacggugacccaugccaaagacauuuuggagaagacacacaauggaaaauuauguaagcugaacgguauacccccucuagaacucggcgauugcuccaucgcgggguggcugcuuggaaauccagagugugaccggcuguugucuguaccggaauggucauacaucauggagaaagagaacccccgcgauggccucugcuauccugguaguuuuaaugacuacgaagaacugaagcauuuccugagcuccgugaagcacuuugaaaaagucaagauucucccaaaagaucgauggacucaacauaccacaaccgggggaucucgugcuugugccgugucgggcaaccccucauucuuuagaaauaugguuugguuaacuaagaaaggcagcaacuauccuguggcaaaggggaguuacaauaacacauccggagagcagaugcugaucauuugggguguccaccacccaaaugacgagaccgaacagaggacgcuuuaucagaacgugggcacuuacguaucuguugggaccagcacauugaauaagcgguccacucccgauaucgccacccgcccuaaagugaacggacugggcgguagaauggaguucucauggacacuacucgacaugugggauaccauaaacuuugaaaguacggggaaucugauugcuccagaguacggauucaagaucagcaaaagggggucuuccggcauuaugaagacugaaggcacacuuggaaacugcgagaccaaaugucaaacuccgcugggugcaaucaauacaaccuugcccuuucauaacguccacccucucacgaucggcgagugcccaaaguaugugaaaucagaaaagcugguguuagccaccgggcugcggaaugucccccagauugagagccgcggacucuucggcgcuauagccgguuuuaucgaagggggcuggcagggaaugguugacggcugguacggguaucaucacaguaacgaucagggaucugguuacgcggcagacaaggaguccacacaaaaagccuucgacggcauuacuaauaaggugaacagcguaaucgagaaaaugaauacccaguuugaggcuguggggaaggaguucucgaaccuugaacgaagacuggagaauuugaacaaaaagauggaagauggauuccuagacgucuggacauauaaugccgagcugcucgugcugauggaaaacgagaggacucuugauuuucacgacucuaauguuaagaaccuguacgauaaagugcggaugcaguugcgugacaacgcaaaggagcucggcaaugguuguuucgaauuuuaucauaaaugcgaugacgaguguaugaacuccgucaagaaugggaccuacuacuauccuaaauacgaagaggagucaaagcugaaccgcaaugaaauaaagggcgugaaauuaaguagcaugggaguauaucagauucuggcuaucuacgccacaguugcgggcucccuaucucucgccaucaugauggcagggauuagcuucuggaugugcucaaacggaagucugcaaugcagaaucuguauuuga

SEQ ID NO: 129680 - RNA, 1689 nt, Artificial Sequence
  derived and/or modified CDS sequence (opt3) from hemagglutinin__InfluenzaA__ABO52247
auggccaucauuuaccugauacuccuuuucaccgcugugagaggcgaccagaucugcauuggguaucacgcaaacaauagcacagagaaggucgauacuauccuggaaaggaacguuacggugacccaugccaaagacauuuuggagaagacacacaauggaaaauuauguaagcugaacgguauacccccucuagaacucggcgauugcuccaucgcgggguggcugcuuggaaauccagagugugaccggcuguugcgcguaccggaauggucuuacaucauggagaaagagaacccccgauauucacucugcuacccuggcaguuuuaaugauuaugaagaacugaagcaucugcucagcuccgugaagcacuucgaaaaagucaagauuuuaccaaaagacgguuggacucaacauaagaccgaugggggaucuaaggcuugugccgugucgggcaaacccucauuuuuccguaacaugguuuggcugacaaagaaaggcccuaauuacccaguggcaaagagaagcuauaacaauaccaguggggagcagaugcuuaucauuuggggaguccaccaccccaacgacgaggccgaacagagggcuuuguaccagaaaguggguacuuacguauccgcaucuacaagcacccugaauaagcgguccacgccugagaucgccgcucgcccagaaguuucaggccuagggaguagaauggaguuuagcuggacucuccuggaugugugggacaccauaucuuucgaauccacaggaaaccuugucgccccggaguauggcuuuaaaauuucaaagagggguagcagugggaucaugaaaacugagggaacccugggcaauugcgaaacaaagugucaaacccccuugggcgcgauuaacacgacucucccuuuccauaacgugcacccacugacaaucggggagugccccaaguacgugaaaucugaaaaguuaguccuggcaaccggaccucggaauguuccacagaucgagucccgcggucucuuuggcgccauugcuggguucauagaaggaggcuggcaggguaugguggaugggugguauggcuaccaucacagcaacgaccagggaucgggcuaugccgcagauaaagagucuacucaaaaggcuuuugaccgaaucacaaauaaaguaaacuccgugauugagaagaugaauacccaguucgaagccgucgggaaggaguuuucaaaccuugagaaaagacuggagaauuugaacaagaaaauggaagacggauuccuagauguguggacguacaaugcggagcugcucguucugauggagaacgaaaggacccuugacuuccacgauaguaaugugaagaaccuguaugacaaaguccggaugcaguugcgugauaaugugaaggagcucgguaacggcuguuuugaguucuaccauaagugcgacgaugaauguaugaauagcguuaaaaacgggacauacgacuaucccaaguacgaggaagaguccaaacugaagcgcaacgaaaucaaaggaguaaaguuaucuagcaugggcguguaucagauacuggccauuuacgcaacugucgcugguucacuaagucucgccaucaugaucgcugggauuuccuuuuggaugugcagcaauggcucucugcaaugcagaaucuguauuuga

SEQ ID NO: 129681 - RNA, 1701 nt, Artificial Sequence
  derived and/or modified CDS sequence (opt3) from hemagglutinin__InfluenzaA__ABO52258
augaaggccaaacugcucgugcuucugugcgcuuugagcgcaaccgacgccgauacaaucuguauuggcuaccacgcgaacaauuccacugacacggucgauaccguuuuagagaagaacgugacaguaacucauucugugaaucugcuagaagacucacacaacgggaaacucugcagacugaagggaauagcuccccuucagcuggguaaauguaguaucgccggcuggauuuuggggaauccugagugcgaaagccucuucuccaagaagucuuggucguauaucgcagagaccccaaacucagaaaauggaacauguuacccgggcuauuuugccgauuacgaggagcugagggaacaacugagcagugucuccucuuucgagcgguuugaaauuuuccccaaagagagcuccuggccuaagcauaacgugacccgcgguguuacugcuucaugcagucacaaagggaaguguagcuuuuaucgaaaucucuuauggcugacagagaaaaacggaucuuacccaaaucuuuccaagucauaugugaacaauaaggaaaaagaggucuuggugcuguggggcguacaucaccccagcaacaucgaagaccagaagaccauauaccguaaagagaaugcauacguuaguguggucucuucccacuauaacagaagguucacgccugaaaucgccaagcggccaaaagugcgcgaucaggagggcagaauuaacuacuauuggacucuacucgagcccggggacaccaucauuuuugaagcuaauggaaaccugaucgccccuugguacgcguucgcacuuagcagggguuuuggcucggggauaauuacaucuaaugccuccauggaugagugcgacgcuaagugucagacuccacaaggagccaucaacucaagucugccguuccagaaugugcaucccgucaccauuggcgaaugcccuaaauauguucggagcacaaaguugcgcauggugaccggucuccgaaacaucccauccauccagucuagagggcuguuuggagcaauugcuggcuucauagagggcggguggacgggaaugaucgaugguugguacggcuaucaccaucagaaugaacaagggagcggauacgccgcggaccagaagucaacucagaacgccauuaauggcaucacaaacaaaguaaauagugugauagagaagaugaacacccaguuuacugcagucgguaaagaguucaauaaguuagaaaagaggauggagaaccugaauaagaagguggaugacggguuccucgacauuuggacauacaacgcugaacuucugguuuugcuagagaacgaacggacccuggauuuucacgacuccaaugugaaaaaccucuaugagaaggucaaaagccaacugaagaauaacgccaaagagaucggcaauggauguuucgaauuuuaccacaagugcaacaaugagugcauggaaucugugaagaacggcacguaugauuaccccaaauauucagaggagaguaaacuuaaucgugagaaaaucgacgggguaaagcuggaaagcaugggaguuuaccagauuuuggcuaucuauuccaccguggccucuucgcucguccuguuagugagccugggugcaauuuccuucuggauguguucaaacggcagucuacagugccgcauauguaucuga

SEQ ID NO: 129682 - RNA, 1701 nt, Artificial Sequence
  derived and/or modified CDS sequence (opt3) from hemagglutinin__InfluenzaA__ABO52280
augaaggccagacugcucauccuucugugcgcuuugagcgcaaccgacgccgauacaauuuguauaggcuaccacgcgaacaauuccacugacacgguggauaccgucuuagagaaaaacguuacagugacucauucuguaaaucugcuagaagacucacacaacgggaagcucugcaggcugaaaggaaucgcuccccuucagcuggguaaguguaauauugccggcuggaucuuggggaacccugagugcgaaagucuccugagcaaucgguccuggucuuauauugcagagaccccaaacucggaaaauggaaucuguuacccgggcgauuucgccgacuaugaggagcugcgcgaacaacucucaagcgugaguuccuuugagcgauucgaaauauuucccaaagagucuagcuggccuaagcauaacaucacacguggugucaccguggcuugcucccacgcaaagaaaucaaguuucuacaagaauuuacuguggcuuacugaggccaacggguuguauccaagccugucuaaauccuacguuaaugauagagaaaaggaggugcuaguccucuggggagugcaucaccccucaaacauugaagaccagaggacacuguaucggaaagagaaugcuuacguaagcguugugaguucuaacuacaaccgcagauuuaccccugaaaucgccgagaggccaaagguccggggccagcccggccgcaugaauuauuacuggacgcuucuggagccuggggauaagauuaucuucgaagcgaacggaaauuugauagcaccaugguaugccuuugcucucucccgagguccgggcagcgggauuaucacuucgaacgccucuauggacgagugugauaccaaaugccagacaccccaaggagcaauuaauuccucacugccuuuccagaacauccacccagugacuaucggcgaaugucccaaguacgugagaaguaccaaauuaaggauggucacaggucugcggaauauuccuagcauacagucccgugggcucuuuggagcuaucgccggcuucauugagggcggguggaccggaaugguugacgguugguauggcuaccaucaccagaacgaacaagggucuggauaugcggccgaucaaaagagcacgcagaaugcaaucaacggcauaacuaauaaagugaacucaguaauugagaagaugaauacacaguuuaccgcuguggguaaagaguucaacaaacuugaaaagcgcauggagaaucugaacaagaaggucgacgacggguuuuuggauaucuggacuuacaacgccgaacuacuggugcuccuggagaaugaaagaacacuugacuuccaugauaguaacguuaaaaaucuguacgagaaggugaaaaaccaguugaggaauaacgcuaaggagaucggcaauggaugcuucgaauuuuaucacaagugugacaacgagugcauggaauccgucaaaaauggcaccuacgauuauccaaaguacagcgaggagucuaaacucaaccgggccaagauugacggggugaaacuggaaucaaugggaguauaucagaucuuagcaauuuacaguacgguugccagcucccuggugcuacucgucucucugggugcuauaucguucuggaugugcagcaauggcucccuucagugucgaaucugcauuuga

SEQ ID NO: 129683 - RNA, 1689 nt, Artificial Sequence
  derived and/or modified CDS sequence (opt3) from hemagglutinin__InfluenzaA__ABO52302
auggccaucauuuaccugauacuccuuuucaccgcugugagaggcgaccagaucugcauuggguaucacgcaaacaauagcacagagaaggucgauacuauccuggaaaggaacguuacggugacccaugccaaagacauuuuggagaagacacacaauggaaaauuauguaagcugaacgguauacccccucuagaacucggcaauugcuccaucgcgggguggcugcuuggaaacccagagugugaucggcuguugucuguaccggaauggucauacaucauggagaaagagaauccccgcgacggccucugcuauccugguaguuuuaacgauuacgaagaacugaagcaucugcucagcuccgugaagcacuucgaaaaagucaagauuuuaccaaaagaccgauggacucaacauaccacaaccgggggaucucgugcuugugccgugucgggcaaucccucauuuuucagaaacaugguuuggcugacuaagaaaggcagcaauuauccuguggcaaaggggaguuacaacaauacauccggagagcagaugcuuaucauuugggguguccaccacccaaacgaugagaccgaacagaggacguuguaucagaaugugggcacuuacguaucuguugggaccagcacacugaacaagcgguccacucccgacaucgccacccgcccuaaagugaacggacuaggcgguagaauggaguuuucauggacacuccuggauaugugggacaccauaaauuucgaaaguacggggaaccuuauugcuccagaguacggauuuaagaucagcaaaagggggucuuccggcauuaugaagacugaaggcacacugggaaauugcgagaccaaaugucaaacuccguugggugcaaucaacacaacccuccccuuccauaauguccacccucugacgaucggcgagugcccaaaguaugugaaaucagaaaaguuagugcuggccaccgggcuccggaacgucccccagauugagagccgcggacuuuuuggcgcuauagccgguuucaucgaagggggcuggcagggaaugguugauggcugguacggguaucaucacaguaaugaccagggaucugguuacgcggcagauaaggaguccacacaaaaagccuuugacggcauuacuaacaaggugaauagcguaaucgagaaaaugaacacccaguucgaggcuguggggaaggaguuuucgaaucuggaacgaagauuggagaaccuaaauaaaaagauggaagacggauuccuggaugucuggacauauaacgccgagcuccuggugcuuauggaaaaugagaggacucuggacuuccacgauucuaacguuaagaacuuguacgacaaagugcggaugcagcuccgugauaaugucaaggagcugggcaacgguuguuuugaguucuaucauaaaugcgacgaugaauguaugaacuccgugaagaaugggaccuacgacuacccuaaauaugaagaggagucaaaguuaaaucgcaacgaaauaaagggcguaaaacugaguagcaugggaauuuaccagauccuagcaaucuaugcuacaguugccggcucccucucucuggcgauuaugauggccgggaucagcuuuuggaugugcucaaauggaagucuucaaugcagaauuuguauauga

SEQ ID NO: 129684 - RNA, 1701 nt, Artificial Sequence
  derived and/or modified CDS sequence (opt3) from hemagglutinin__InfluenzaA__ABO52313
augaagaccaucauugcccugagcuacauauucugccucguguuugcucagaaccuucccggcaaugacaacuccacagcaacucuguguuuggggcaccaugccgucccuaauggaacguuaguuaaaaccaucacaaacgaucaaauugaggugacuaaugcgaccgaacugguacagucuucaaguacagguaagaucugcaacaauccacacaggauucuagacggcaucaacuguacccucauagaugcucugcuuggggacccgcauugcgauggauuccagaaugagaaaugggaccuguuuguggaaagaagcaaggccuucuccaacuguuaucccuacgaugucccugacuaugcaucuuugcggucgcucguggccucaagcggcacucuggaguuuaucaaugaagguuucaacuggacagggguuacccagaauggaggcaguaacgcuugcaaacgcggcccagauuccggguuuuucucucgacugaauuggcucuacaagagcggauccacguaucccguguuaaacgucacuaugccuaacaaugacaacuuugauaagcuguacauuuggggugugcaccauccaucaaccgaccaagagcagacaaaucuuuauguacaggcaaguggccguguuacugugagcaccaaaagaucucagcaaacaaucauucccaacgucggguccaggccuugggugcggggauugucaagccgcaucaguauauacuggaccauugugaagccaggcgauauccuggucauuaauucuaacgguaaucuaaucgccccgagagggcacuucaaaaugaggacgggaaaguccagcaucaugcggucggacgcucccauuggcacuuguucuuccgagugcauaacaccuaacggcucaaucccaaaugacaaacccuuucagaacguuaauaagauuaccuacggggccuguccuaaguaugugaaacagaacacucucaagcuggcgacaggaaugcgcaauguaccagaaaaacagacccgagguaucuucggcgcaauagccggguuuauugagaacggaugggaaggcaugaucgaugguugguacggguucagacacaggaauagugagggcacgggacaagcugccgaccuuaagagcacccaggcagcuaucgaucagauuaacggcaaacugaaccgggugaucgagaagacaaaugaaaaauuccaucaaauugagaaggaauuuuccgaggucgaagggcguauacaggacuuggagaaguauguggaggauacuaaaaucgaccucuggucuuacaacgccgaacuguuaguugcgcuggagaaucagcacaccauugaucucacagacagcgaaaugaacaaacuuuucgagaagacucgcagacagcugagggaaaaugccgaggauaugggaaacgguugcuuuaagaucuaucauaaaugugacaaugcaugcaucggcucaauucggaacgggaccuacgaucacgacguguaucgagacgaggcuuugaauaaccgcuuccaaauaaagggagucgaacuaaagaguggcuacaaagauuggauccuguggauuuccuuugccaucagcugcuuccuccugugugugguacuucuggguuuuauuaugugggcuugccagaaggggaauaucagauguaacauaugcaucuga

SEQ ID NO: 129685 - RNA, 1701 nt, Artificial Sequence
  derived and/or modified CDS sequence (opt3) from hemagglutinin__InfluenzaA__ABO52335
augaagaccaucauugcccugagcuacauauucugccucgugcuuggccaggacuuucccagaaacgauaauuccacagcuacucuguguuuggggcaccaugcagucccuaacggaacguuaguuaaaaccaucacaaaugaccaaauugaggugacuaacgccaccgaacugguacagucuucaaguacagguaagaucugcaauaacccacacaggauucuagauggcaucgacuguacccucauagaugcgcugcuuggggacccgcauugcgauggauuccagaaugagacuugggaccuguuuguggaacggagcaaggcuuucuccaacuguuaucccuacgaugucccugacuaugccucuuugcgcucgcucguggcaucaagcggcacacuggaguuuaucaaugaagguuucaccuggacggggguuacucagaacggaggcaguaaugccugcaaacgaggcccagauuccggguuuuucucucgucugaacuggcucuacaaaagcggaaauaccuaucccguguuaaacgucacaaugccuaauaacgacaacuuugauaagcuguacauuuggggugugcaccauccauccacugaccaagaccagaccucacuuuauguacaggcuaguggcagaguuacagugagcaccaagaggucucagcaaacggucauccccaauauugggccucggccaugggugcgcggauuguccucaagaaucagcauauacuggacuauugugaaaccgggcgauauccugcuaauuaacaguaaugguaaccucaucgcacccaggggguacuucaagaugcggacaggaaaaucuuccaucaugcgcagcgacgccccuauuggcaccuguauaucggagugcaucacuccaaauggcucuauucccaacgauaagccuuuucagaaugucaacaaaaucacauauggggcuuguccaaaguacguuaagcagaauacccugaaacuugccacgggaaugcgaaacgugcccgagaagcagaccagagguauauucggcgcgauugcaggguuuaucgaaaauggaugggagggcaugaucgacgguugguauggguucaggcaccaaaacuccgaaggcacaggacaggccgcugaucugaaaucaacucaggccgcaauugaccaaaucaauggcaaguugaaccggguaauugagaaaaccaaugagaaguuccaccagauagaaaaagaguuuagugaaguggaggggcguauccaggaucucgaaaaguacgucgaggacacaaagauugaucuguggagcuauaacgcugaguuacugguggcccucgaaaaccagcauacuaucgaccuuaccgauuccgagaugaauaaacuguucgaaaagacacgcagacaauugagggagaacgcggaagacaugggaaaugguugcuuuaaaaucuaccaccggugugacaacgccugcauuggcucuauacgaaaugggaccuaugaucaugacguuuaccgcgaugaggcacuaaacaauagauuccagaucaagggaguggagcugaaaagcggcuacaaggacuggauucucuggaucucauuugcuauuaguugcuuccugcuuugugucgugcuguuggguuuuaucaugugggccugccagaaggggaacauaagguguaauaucugcauuuga

SEQ ID NO: 129686 - RNA, 1701 nt, Artificial Sequence
  derived and/or modified CDS sequence (opt3) from hemagglutinin__InfluenzaA__ABO52346
augaagaccaucauugcccugagcuacauauucugccucguguuugcucaggaccuucccggcaacgauaauuccacagcaacucuguguuuggggcaccaugccgucccuaacggaacguuaguuaaaaccaucacaaaugaccaaauugaggugacuaacgcgaccgaacugguacagucuucaaguacagguaagaucugcgauaauccacacagaauacuagacggcaucaacuguacccucauagaugcucugcuuggggacccgcauugcgauggauuccagaaugagaaaugggaccuguuuguggaaaggagcaaggccuucuccgauuguuaucccuacgacgucccugauuaugcaucuuugcggucgcucguggccucaagcggcacucuggaguuuaucaacgaagguuucaauuggacagggguuacccagaacggaggcaguuccgcuugcaaacgcggcccagacaauggguuuuucucucgacugaacuggcucuacaagagcggauccacguaucccgugcaaaaugucacuaugccuaacaaugauaacucagacaaguuauacauuuggggugugcaccauccaaguaccgacaaagagcagacagaucuguauguacaggcaagcggcaagguuacugugucuaccaaacguucccagcaaacagucauccccaacguggggucaagaccuugggugaggggacuuagcagucgggucucuauuuacuggaccaucguuaagccaggcgacauauuggugauuaauuccaacgguaaucugaucgccccgcgcggguacuuuaaaaugagaacgggaaagagcucgauuaugaggucugaugcucccaucggcacuuguuccucagagugcaucacaccuaacggcaguauuccaaaugacaagcccuuccagaacguaaauaaaauaaccuauggggccuguccuaaguacgugaaacagaacacucuaaagcucgcgacaggaaugcggaaugucccagaaaaacagacccgcgguaucuuuggcgcaauugccggguucaucgagaacggaugggaaggcaugauagaugguugguauggguuucgacaccaaaauagcgagggcacgggacaggcugccgaccugaaguccacccaggcagcuauugaucaaaucaacggcaaacuuaauagagugaucgagaagacaaacgaaaaguuccaccagauugagaaagaguucucugaaguugaagggaggauccaggaccuggagaaguacguggaggauacuaaaauugacuuguggagcuauaaugccgaacuccuggucgcguuagagaaccagcauaccauagaucugacagacucagaaaugaacaagcucuuugagaaaacucggcgucaacuucgcgaaaaugccgaggacaugggaaacgguugcuucaagaucuaccacaagugugauaaugcaugcauuggcaguaucagaaacgggaccuaugaccaugauguguacagggacgaggcucugaauaaccgguuucagaucaaaggaguagaauugaaguccggcuacaaagauuggauucuauggauuagcuucgccaucucuugcuuucugcucuguguugugcugcuugguuucauuaugugggcuugccagaaggggaauauccgauguaacauuugcaucuga

SEQ ID NO: 129687 - RNA, 1701 nt, Artificial Sequence
  derived and/or modified CDS sequence (opt3) from hemagglutinin__InfluenzaA__ABO52357
augaagaccaucauugcccugagcuacauauucugccucgcucuuggccaggaccugcccgggaacgauaauuccacagcaacuuuguguuuaggacaccaugccgugccuaacgguacgcuggucaaaaccaucacagacgaucaaauugagguuacuaaugcgaccgaacuugugcagucuucaaguacaggcaagaucugcaacaauccacacaggauucucgacgggaucgauuguacccugauagacgcucuacugggagauccgcauugcgacguauuucagaacgagacuugggauuuguucguggaaagaagcaaagccuuuuccaauuguuaucccuacgacgucccugauuaugcaucucuccggucgcugguggccucaagcggcacacuggaguucaucaccgaagguuuuacguggacugggguuacccagaacggaggcaguaaugcuugcaagcgcggcccaggguccggauucuuuucucgacucaacugguuaacaaaaagcgguuccacuuaccccgugcugaaugucaccaugccuaacaaugacaacuucgauaaacuuuauauuuggggcgugcaccauccaucaacaaaucaagagcagaccaguuuguacguacaggcaagcgggcguguuacggugucuacuagaaggucccagcaaacaaucauucccaacaucggaucacggccuuggguccgcggccugagcaguagaauaucuauuuauuggaccaucgugaagccaggugacgugcuagucauuaacuccaaugggaaccucaucgccccgaggggauacuuuaagaugcggacuggcaagagcucgaucaugcgcucugacgcucccauugauacauguauauucgagugcaucaccccuaauggcuccauuccaaacgacaaacccuuucagaauguuaacaagaucacguacggggccuguccuaaauaugugaagcagaauacccugaaacuugcgacaggaaugcgaaacguaccagaaaagcagacuagagguauauucggcgcaauugccggguuuaucgagaauggaugggaaggcaugaucgaugguugguacggguucaggcaccaaaacucagagggcaccggacaggcugccgaccugaagaguacacaggcagcuauugaucaaaucaauggcaaauugaaccgggugauugagaagacuaaugaaaaauuccaccagauagagaaggaauuuagcgaggucgaagggcguauccaggaccucgagaaauauguggaggauaccaagauugaccugugguccuacaacgccgaauuacugguugcgcucgagaaucagcauacaaucgaucuuaccgacucugaaaugaacaagcuguucgagaaaacucgcagacaauugagggaaaacgccgaggauaugggaaaugguugcuuuaagaucuaucacaaaugugacaacgcaugcauugagagcauacggaauggcacguacgaccaugauguguaucgagacgaagcucuaaacaaucgcuuccagaucaagggggucgagcugaaaucaggauacaaggauuggauucucuggaucaguuuugccauuuccugcuuccugcuuugugugguacuguugggcuuuaucaugugggcuugccagagagguaacauaagguguaauaucugcauuuga

SEQ ID NO: 129688 - RNA, 1701 nt, Artificial Sequence
  derived and/or modified CDS sequence (opt3) from hemagglutinin__InfluenzaA__ABO52368
augaagaccaucauugcccugagcuacauauucugccucgcucuuggccaggaccugcccgggaacgauaauuccacagcaacuuuguguuuaggacaccaugccgugccuaacgguacgcuggucaaaaccaucacaaaugaccaaauugagguuacuaacgcgaccgaacuugugcagucuucaaguacaggcaagaucugcaauaacccacacaggauucucgaugggaucaauuguacccugauagacgcucuacugggagauccgcauugcgacguauuucaggaugagacuugggacuuguucguggaaagaagcaaagccuuuuccaacuguuaucccuacgaugucccugacuaugcaucucuccggucgcugguggccucaagcggcacacuggaguucaucaccgaagguuuuacguggacugggguuacccagaauggaggcaguaacgcuugcaagcgcggcccaggguccggauucuuuucucgacucaauugguuaacaaaaagcgguuccacuuaccccgugcugaacgucaccaugccuaauaacgauaauuucgacaaguuguauauuuggggcgugcaccauccaucaacaaaccaagagcagaccaguuuguacguacaggcaagcgggcguguuacggugucuacuagaaggucccagcaaacaaucauucccaacaucggaucacggccuuggguccgcggccugagcaguagaauaucuauuuauuggaccaucgugaagccaggugaugugcuagucauuaauuccaacgggaaucucaucgccccgaggggauacuuuaaaaugcggacuggcaagagcucgaucaugcgcucugacgcucccauugacacauguauauccgagugcaucaccccuaacggcucaauuccaaaugauaaacccuuccagaacguuaauaagaucacguacggggccuguccuaaauaugugaagcagaacacccugaaacuugcgacaggaaugcgaaauguaccagaaaagcagacuagaggucuguuuggcgcaauagccggguucauugagaacggaugggaaggcaugaucgacgguugguacggguuuaggcaccaaaauagugagggcaccggacaggcugccgaucuuaagagcacacaggcagcuaucgaccaaauuaacggcaaacucaaucgggugaucgagaagacuaacgaaaaauuccaccagauugagaaggaguucuccgaagucgaagggcguauacaggaucuggagaaauauguggaggacaccaagaucgauuuauggucuuacaaugccgaacugcucguugcgcuugagaaccagcauacaauugaccugaccgauagcgaaaugaacaaguuguuugagaaaacucgcagacaacuaagggaaaaugccgaggacaugggaaacgguugcuucaagaucuaucacaaaugugauaaugcaugcaucgagucaauucggaacggcacguacgaccaugacguguaucgagaugaagcucugaauaaccgcuuucagauaaagggggucgagcucaaaaguggauacaaggacuggauccuguggauuuccuucgccaucagcugcuuucuucugugugugguauugcucggcuucauuaugugggcuugccagagagguaauaucagguguaacauaugcaucuga

SEQ ID NO: 129689 - RNA, 1701 nt, Artificial Sequence
  derived and/or modified CDS sequence (opt3) from hemagglutinin__InfluenzaA__ABO52797
augaaggccaaacugcucgugcuucugugcgcuuugagcgcaaccgacgccgauacaaucuguauuggcuaccacgcgaacaauuccacugacacggucgauaccguuuuagagaagaacgugacaguaacucauucugugaaucugcuagaagacaaccacaaugggaaacucugcaagcugaaaggaauagcuccccuucagcuggguaaguguucaaucgccggcuggauuuuggggaacccugagugcgaaagucucuucagcaagaaauccuggucuuauaucgcagagaccccaaauucggaaaacggaacauguuacccgggcuauuuugccgauuacgaggagcugagagaacaacugucaagcgucaguuccuucgagagguuugaaauuuuccccaaggagucuagcuggccuaaucauaacgugaccaaagguguuacugcuuccugcucacacaaggggaaaaguagcuuuuaucggaaucucuuauggcugacagagaagaacggaucuuacccaucccuuucaaagagcuaugugaauaacaaagaaaaggaggucuuggugcuguggggcguacaucaccccaguaauaucaaagaccagaagaccauauaccgcaaagaaaacgcauacguuucuguggucuccagccacuauaaccgacguuucacgccugagaucgccaagagaccaaaagugagggaucaggaaggccggauuaauuacuauuggacucuacucgagcccggggacaccaucauuuuugaggcuaacggaaaucugaucgccccuugguacgcguucgcacuuucgcgcgguuuuggcucugggauaauuacauccaacgccucaauggaugaaugugacgcuaagugccagacuccacaaggagccaucaauaguagccugccguuccagaacgugcaucccgucaccauuggcgaguguccuaaguauguuagauccacaaaauugaggauggugaccggucuccggaauaucccaucuauccagagccgcgggcuguuuggagcaauugcuggcuucauagaaggcggguggacgggaaugaucgaugguugguacggcuaucaccaucagaacgagcaagggucaggauacgccgcggaccagaagaguacucaguccgccauuaauggcaucacaaacaaaguaaauagcauaauugaaaagaugaacacccaguuuacugcaguggguaaagaguucaauaaguuagagaagcgaauggaaaaccugaauaaaaaggucgaugacggguuccucgacaucuggacauacaacgcugagcuucugguguugcuagaaaacgagagaacccuggauuuucacgacucuaauguuaaaaaccucuaugaaaaggugaaaucacaacugaagaauaacgccaaggagaucggcaauggaugcuucgaguuuuaccacaaauguaacaaugaaugcauggagagugucaagaacggcacguaugauuaccccaaauauagcgaagaguccaaacuuaauagggagaagauugacggggugaagcuggaaucuaugggaguauaccagaucuuggcuauuuauucgaccguugccagcucccucgugcuguuagucucacugggugcaauaaguuucuggaugugcucuaacggcagccuacagugucggaucugcauuuga

SEQ ID NO: 129690 - RNA, 1698 nt, Artificial Sequence; identical to SEQ ID NO: 128790
  derived and/or modified CDS sequence (opt3) from hemagglutinin__InfluenzaA__ABP49217

SEQ ID NO: 129691 - RNA, 1698 nt, Artificial Sequence
  derived and/or modified CDS sequence (opt3) from hemagglutinin__InfluenzaA__ABP49305
augaaggccaaacugauggugcuccuuugcaccuucacagcuacuuacgcagacacgaucuguauuggcuaucacgccaacaauagcaccgauacagucgacacuguucuggagaagaacgugaccguaacacauuccgugaauuuguuagaagauucucacaacgggaaacugugccuacucaagggaauagcgccccugcagcuugguaauuguucagucgcuggcuggauccuggggaacccugagugcgaauugcucauuaguaaagagagcugguccuacaucguggaaaccccaaauccggagaacggaacuuguuaucccggcuacuuugccgacuaugaggaacugagagagcaacugucuucgguuagcucauucgaaagguuugagauuuucccuaaggagaguuccuggccaaaucauacagugaccggugucucugcaagcugcucccacaacgggaagucaaguuuuuaccggaaucucuuauggcugacgggcaaaaacggacuuuaucccaauuugagcaagucuuacgccaacaauaaagaaaaggaggugcugguacuauggggcguucaucacccuccaaacaucggggaucagcgcgcucucuaccacacugaaaacgcauauguguccgucgugucaagccauuacagucgacguuucacccccgagauagccaaaagaccuaaggugagggaccaggaaggacggaucaauuauuacuggacacugcuugagccaggugauacuauuaucuuugaggcuaacggcaaucugauugccccgugguaugcguucgcauugucucgcggguuuggauccggcaucauaaccagcaacgcccccaugggugaaugugacgcuaagugccagacaccucaaggggccauuaauucgucucucccauuccagaacguccaccccguuaccaucggagaguguccuaaauacgugagauccgcaaagcugaggaugguaacgggcuuacggaauauuccaucaauccagagucgcggccuguuuggggcuaucgccggauucauugaagguggcuggacugggaugguggauggaugguauggcuaccaucaccagaacgagcaagguagcggguacgcggccgaccagaaauccacacagaaugcaauaaacggcaucaccaauaaggucaacucugugauugaaaagaugaauacucaguuuacagcuguuggaaaagaguucaacaaacucgagcgaagaauggaaaaucuuaacaagaagguggaugacggcuuccuggauaucuggaccuauaacgccgaguugcuaguccugcucgaaaaugagaggacgcuggacuuucacgacagcaacgugaaaaaucuuuacgaaaagguaaaaucacaacugaagaacaaugcuaaagagauagggaacggaugcuucgaguuuuaucauaaguguaauaacgaaugcauggagaguguuaagaaugguaccuacgauuaucccaaauacuccgaagagagcaaguugaaccgggagaaaauugacggcgugaagcucgaaucuaugggggucuaucagauccuggccaucuacucaacaguggcaaguagcuuaguccugcuagugucccucggagccauuucuuucuggaugugcucgaauggcagccugcagugucguaucugcauuuga

SEQ ID NO: 129692 - RNA, 1701 nt, Artificial Sequence
  derived and/or modified CDS sequence (opt3) from hemagglutinin__InfluenzaA__ABP49316
augaaggccaaacugcucgugcuucugugcgcuuugagcgcaaccgacgccgauacaaucuguauuggcuaccacgcgaacaauuccacugacacggucgauaccguuuuagagaagaacgugacaguaacucauucugugaaucugcuagaagacucacacaacgggaaacucugcagacugaagggaauagcuccccuucagcuggguaaauguaauaucgccggcuggauuuuggggaacccugagugcgaaagucucuucagcaagaaguccuggucuuauaucgcagagaccccaaauucggaaaacggaacauguuacccgggcuauuuugccgauuacgaggagcugagggaacaacugucaagcgucaguuccuucgagcgguuugaaauuuuccccaaagagcgcucuuggccuaagcauaauaucacccgaggugugacugcugcaugcagccacaaagggaaguccucauuuuaucguaaccucuuauggcugacagagaaaaauggaaguuacccaaaccuuaaaaagagcuauguuaauaacaaggaaaaggagguguugguccuguggggcgugcaucaccccucuaauauagaagaccagaaaacccuauacagaaaggagaacgccuacguauccguugugucaagcaacuauaauaaaagguucacgccugaaaucgcugagcggccaaagguccgcggccaggccgggagaauuaacuacuauuggacucuccuggagcccggagauaccaucauuuuugaagcgaaugguaaccuuaucgcaccuuggcacgccuucgcucugaguaggggcuuugggucuggaauaauuacauccaaugccagcauggacgagugugauacuaaaugccagaccccacaaggcgcaaucaacucgucuuugccguuccagaauauucaucccgugacaaucggugaauguccuaaguacgugcgguccaccaagcuccgcauggucacggggcugcgaaacaucccaucaauucagaguagaggauuauuuggcgcuauagccggcuucaucgaagggggauggacugguaugauugacggcugguauggguaccaccaucagaaugagcaaggaagcggcuaugcggccgaucagaaauccacacagaacgcaaucaaugguauaaccaacaagguuaauucugugauugagaaaaugaacacucaguuuacagcuguagggaaggaguucaauaaacuggaaaagaggauggagaaccucaacaagaaaguggacgauggcuuccuugacaucuggaccuacaaugccgaacuguugguccuacuggagaacgaacggacgcucgacuuucacgauagcaaugugaagaaccuguacgagaaaguuaagucacaacuuaaaaauaacgcuaaggagaucggaaauggcugcuucgaauuuuaucacaaguguaacaaugagugcauggaaagugugaaaaacgggaccuacgacuaucccaaguacuccgaggagagcaaacugaaucgugaaaagauugauggagucaaauuggagucuauggguguguaucagauccucgccauuuacucaacaguagcaaguagccugguuuuacuggugucccuaggcgccauaucuuucuggaugugcucgaacgggagccuccagugucgcaucugcauuuga

SEQ ID NO: 129693 - RNA, 1701 nt, Artificial Sequence
  derived and/or modified CDS sequence (opt3) from hemagglutinin__InfluenzaA__ABP49327
augaaggccagacugcucgugcuucugugcgcuuuggcagccaccgacgcggauacaaucuguauuggcuaccacgcuaacaauagcacugacacggucgauaccguuuuagagaaaaacgugacaguaacucauuccgugaaucugcuagaagacucucacaacgggaagcucugcaggcugaaaggaauagcaccccuucagcugcggaaguguaauaucgccgguuggauuuugggcaacccugagugcgaaucacuccugagugagcgcagcugguccuauaucgucgaaaccccaaauucugagaacgggacauguuacccgggagauuucaccaauuaugaggaacugcgagagcaacucucgucagugagcaguuuugaacguuucgagauuuuucccaaagaguccucuuggccuaagcauaacacuacaagaggcguuaccgccgcuugcagccacgcagguaaguccucauucuacaggaauuuacuguggcuuacggaaaaagacgggaguuauccaaacuugaauaacagcuacgugaauaagaaaggaaaggagguccuggugcuauggggcguacaucaccccucuaacaucaaagaucagcagacucucuaucagaaggaaaacgccuacguuuccguggucucaagcaauuacaaccggcgcuuuaccccugagauagcugaaagaccaaaggugaggggccaagccgggcggaugaauuauuacuggacacugcuuaaacccggagacacuaucauguucgaggcgaacgguaaucugauugcaccuugguaugccuuugcuuugagucgcggcuucgggucuggaaucauuaccuccaacgccagcaugcacgagugugauacaaagugccagaccccacagggcgcaaucaauucgucucucccguuucagaacauacaucccgugacgauuggugaauguccuaaauacguccgauccacuaagcugagaaugguuacaggguuaaggaauaucccaucaauucaaagucggggacuguucggcgcuaucgccggcuuuaucgaagggggauggaccgguaugauugacggcugguauggguaccaccaucagaacgagcagggaagcggcuaugcggccgaucagaaauccacucaaaaugcaauaaacgguaucacaaauaaggugaacucuguaauugagaaaaugaauacccaguucacggcuguggggaaggaauuuaacaaccucgagaagcguauggagaaucuuaacaaaaaggucgacgauggcuuccuggacaucuggaccuacaaugccgaauugcuaauacugcucgagaacgaacgcacacuggacuuccacgauagcaaugugaaaaaccuuuacgagaagguuaaaucacagcugagaaauaacgcuaaggaaauuggaaauggcugcuuugaguucuaucacaaguguaacaaugagugcauggaaagugugaaaaacgggacuuacgacuaucccaaguacuccgaggaaagcaaauugaauagggagaagaucgauggagucaaacucgagucuauggguguguaucaaauccuggccauuuacucaaccguagcaaguagcuuaguucugcuagugucccucggcgccaucucuuuuuggaugugcucgaacgggagccugcagugucggauuugcauauga

SEQ ID NO: 129694 - RNA, 1701 nt, Artificial Sequence
  derived and/or modified CDS sequence (opt3) from hemagglutinin__InfluenzaA__ABP49338
augaaggccaaacugcucgugcuucugugcgcuuugagcgcaaccgacgccgauacaaucuguauuggcuaccacgcgaacaauuccacugacacggucgauaccguuuuagagaagaacgugacaguaacucauucugugaaucugcuagaagacucacacaacgggaaacucugcagacugaagggaauagcuccccuucagcuggguaaauguaguaucgccggcuggauuuuggggaauccugagugcgaaagccucuucuccaagaagucuuggucguauaucgcagagaccccaaacucagaaaauggaacauguuacccgggcuauuuugccgauuacgaggagcugagggaacaacugagcagugucuccucuuucgagcgguuugaaauuuuccccaaagagcgcagcuggccuaagcauaacgugacccgagguguuacugcuuccugcucacacaaagggaagaguagcuuuuaucguaaucucuuauggcugacagagaaaaacggaucuuacccaaaucuuuccaagucauaugugaacaauaaggaaaaagaggucuuggugcuguggggcguacaucaccccagcaacaucgaagaccagaagaccauauacagaaaagagaaugcauacguuaguguggucucuuccaacuauaacaggcgguucacgccugaaaucgccaagcgcccaaaagugagaggccaggaggggaggauuaauuacuauuggacucuacucgagcccggagauaccaucauuuuugaagcuaacgguaaucugaucgccccuugguacgcguucgcacuuagccggggcuuugggucgggaauaauuacaucuaacgccuccauggacgagugugauacuaagugccagaccccacaaggcgcuaucaauucaagucugccguuccagaacgugcaccccgucacaauuggugaauguccuaaauauguucgcagcaccaaguugcgaauggugacggggcucagaaauaucccauccauccagucuaggggacuguuuggcgccauugcaggcuucauagaagggggauggacugguaugaucgacggcugguacggguaucaucaccagaacgaacaaggaagcggcuacgcugccgaucagaagucaacacagaaugcgauuaacgguaucaccaauaaaguaaacagugugauagagaagaugaauacucaguuuacagccgucgggaaagaguucaacaaguuagaaaaacggauggagaaucugaacaagaagguggacgauggcuuccucgacauuuggaccuacaacgcagaacuucugguuuugcuagagaaugaacguacgcuggacuuucaugauuccaacgugaaaaaucucuaugagaaggucaaaagccaacugaagaacaaugcuaaagagaucggaaacggcugcuucgaauuuuaccacaaguguaauaacgagugcauggaaucugugaagaaugggaccuaugacuaccccaaauauucagaggagaguaaacuuaaccgcgagaagaucgauggaguaaagcuggagagcauggguguuuaccagauuuuggccaucuauuccacaguggcuucuucgcucguccuguuagugagccugggcgccauuuccuucuggaugugcucaaaugggagucuacaguguagaauaugcaucuga

SEQ ID NO: 129695 - RNA, 1701 nt, Artificial Sequence
  derived and/or modified CDS sequence (opt3) from hemagglutinin__InfluenzaA__ABP49349
augaaggccaaacugcucgugcuucugugcgcuuugagcgcaaccgacgccgauacaaucuguauuggcuaccacgcgaacaauuccacugacacggucgauaccguuuuagagaagaacgugacaguaacucauucugugaaucugcuagaagacaaccacaaugggaaacucugcaagcugaaaggaauagcuccccuucagcuggguaaguguucaaucgccggcuggauuuuggggaacccugagugcgaaagucucuucagcaagaaauccuggucuuauaucgcagagaccccaaauucggaaaacggaacauguuacccgggcuauuuugccgauuacgaggagcugagagaacaacugucaagcgucaguuccuucgagagguuugaaauuuuccccaaggagucuagcuggccuaaucauaacgugaccaaagguguuacugcuuccugcucacacaaggggaaaaguagcuuuuaucggaaucucuuauggcugacagagaagaacggaucuuacccaaaucuuuccaagucauaugugaacaauaaagaaaaggaggucuuggugcuguggggcauccaucaccccagcaacauagaagaccagaaaaccaucuaccgcaaggagaacgcauacguaaguguugugucuucccacuauaaucgacguuucacgccugaaauugccaaaagaccaaaggucagggaucaggagggccggaucaacuacuauuggacucuacucgagcccggggacaccauuaucuuugaagcuaauggaaaccugauagccccuugguacgcguucgcacuuagccgcgguuuuggcucggggauuaucacaucuaaugccuccauggaugagugugacgcuaaaugccagacuccacugggagccauuaacucaaguuugccguuccaaaaugugcaucccgugaccaucggcgaauguccuaaguaugucagaagcacaaagcucaggaugguuaccggucugcggaacaucccauccauucagucucgcggguuauuuggagcaauagcuggcuucaucgagggcggguggacgggaaugauugaugguugguacggcuaucaccaucagaaugaacaggggagcggauacgccgcggaccaaaaaucaacucagagugccaucaacggcauaacaaauaaggugaacuccauuaucgagaaaaugaauacccaguuuacugcaguagguaaggaguucaacaaacuggaaaagcgaauggagaaucucaacaagaaaguggaugacggguuccuugacaucuggacauacaacgcugaacuguugguccuacuggagaaugaaagaacccucgauuuucacgacagcaacgugaagaaucuguaugagaaaguuaagucucagcuuaaaaacaaugccaaggagauuggcaacggaugcuucgaauuuuaccacaaguguaauaacgagugcauggaaucagugaaaaauggcacguaugauuaccccaaguauagugaggagagcaaacugaacagggaaaagaucgacggggucaaauuggaguccaugggaguguaccaaauucucgcuauauauucuaccguagccucgagccugguuuuacuggugucccuaggugcaaucucauucuggaugugcaguaauggcucucuccagugucggauuugcaucuga

SEQ ID NO: 129696 - RNA, 1701 nt, Artificial Sequence
  derived and/or modified CDS sequence (opt3) from hemagglutinin__InfluenzaA__ABP49360
augaaggccaagcugcucauccuucugugcgcuuucaccgcaacagacgccgauacuauuuguauaggcuaccacgcgaacaauagcacggacaccguggauacagucuuggagaagaacguuacugugacccauuccguaaauuuacuggaagacucucacaacgggaaacuaugcagacucaagggaaucgcuccccugcagcuugguaauuguucaauugccggcuggauccuggggaacccugagugcgaaaguuuguuuagcaaaaaguccuggucuuauauugcagagacaccaaauucggaaaacggaaccuguuacccgggcuauuucgccgauuacgaggagcucagggaacaacugucaagcgugaguuccuuugagcgguucgaaaucuuucccaaggagucuagcuggccuaaucauacugucacaaaaggugugaccgcuuccugcucacacaacgggaagaguagcuucuaucgcaaucugcucugguuaacgaaaaagaacggaucuuacccaaaucuguccaaaucauauguuaacaauaaggagaaggaagugcuugucuuguggggcgugcaucaccccagcaacauaggcgaccagcgagcaaucuaccacacugagaacgccuacguaaguguugugucuucccauuauaaucguagauuuaccccugaaauugcuaaaaggccaaagguccgggaucaggaggggcgcaucaacuacuauuggacacugcuagaacccggagacacuauuaucuucgaggccaaugguaaccucauagcgccuugguacgcauuugcccugagcagaggcuucgggucgggaauuaucaccucuaaugcuuccauggaugagugugacgccaaaugccagacaccacaaggcgcaauuaacucaagucuuccguuucagaaugugcaccccgugaccaucggugaauguccuaaguaugucaggagcacgaaacugcggaugguuacuggguugcgcaacaucccauccauucagucucgaggacucuucggcgcuauagccggcuuuaucgaagggggauggacagguaugauugauggcugguacggguaucaucaccagaaugaacaaggaagcggcuacgcggccgaccagaagucaacccagaacgcaaucaaugguauaacuaacaaagugaauaguguaauugagaagaugaacacacaguucaccgcuguggggaaggaguucaauaaacuggagagaaggauggagaacuuaaacaagaaagucgaugacggcuuucuggacaucuggacguacaaugccgaacuccuugugcuguuggagaacgaacggacccuagauuuccacgacuccaauguuaagaaccuguaugagaaagucaagagccaacucaagaauaacgcuaaagaaaucggaaauggcugcuuugaguucuaccauaaguguaacaaugagugcauggaaucugugaaaaacgggacauaugauuaccccaaguauucagaggaaaguaaacugaaucgugagaagauugacggagugaaacuugagagcauggguguauaccagauccuggccauuuauuccacuguugcaucuucguuggugcuccuggucagcuuaggcgccauauccuuuuggaugugcucaaacgggagucugcagugucgcaucugcauuuga

SEQ ID NO: 129697 - RNA, 1701 nt, Artificial Sequence; identical to SEQ ID NO: 128698
  derived and/or modified CDS sequence (opt3) from hemagglutinin__InfluenzaA__ABP49371

SEQ ID NO: 129698 - RNA, 1701 nt, Artificial Sequence; identical to SEQ ID NO: 129435
  derived and/or modified CDS sequence (opt3) from hemagglutinin__InfluenzaA__ABP49382

SEQ ID NO: 129699 - RNA, 1698 nt, Artificial Sequence
  derived and/or modified CDS sequence (opt3) from hemagglutinin__InfluenzaA__ABP49393
augaaggugaaacugcucguccuucugugcaccuucacagccacuuacgcugacacgaucuguauuggcuaucacgcaaacaauagcaccgauacaguugacacuguguuggagaagaacguaaccgugacacauuccgucaauuuacuggaagauucucacaacgggaaacuaugccuccugaagggaauagcgccccuucagcuggguaauuguucaguggccggcuggaucuuggggaacccugagugcgaacuccugauuaguaaagagagcugguccuacaucguugaaaccccaaauccggagaacggaacuuguuaucccggcuacuuugcugacuaugaggaacugagagagcaacucucuucggugagcucauucgaaagguuugagauuuucccuaaggagaguuccuggccaaaucauacagucaccggugugucugccagcugcucccacaacgggaagucaaguuuuuaccggaauuuacuguggcuuacgggcaaaaacggauuguaucccaaucugagcaagucuuacgcaaacaauaaagaaaaggagguucuaguacucuggggcauccaucacccuccaaacauaggggaucagcgcgcccuguaccacacugaaaacgcuuauguguccgucgugucaagccauuacagucgacguuucacccccgagaucgcaaaaagaccuaaggugagggaccaggaaggacggauuaauuauuacuggacacuucuggagccaggugauacuaucauuuuugaggccaacggcaauuugaucgcuccgcgcuucgccuuugcgcucucuagaggguucggauccggcauaauuaccagcaacgcacccauggacgaaugugaugccaagugccagacaccucaaggugcuaucaauucgucucugccauuucagaacguccaccccguuaccauuggggaguguccuaaauaugugagguccgccaaguuacggaugguaacgggacugcgcaauaucccaucaauccagagucgaggccucuucggcgcaauugcuggguuuauagaaggagguuggacuggcaugguggacgggugguacggauaucaucaccagaacgagcaaggcagcgguuacgccgcggaucagaaauccacacagaaugccaucaacgggauuaccaauaaggucaacucugugaucgaaaagaugaauacucaguucacagcaguuggcaaagaguucaacaaacuugagagaaggauggaaaaucugaacaagaagguggacgauggauuuuuggacauauggaccuacaacgcugagcuacugguccuccuggaaaaugagcggacgcuugacuuccacgauagcaacgugaaaaaucuguaugaaaagguaaaaucacaauugaagaacaaugccaaagagauuggcaacgggugcuuugaguucuaccauaaguguaaugacgaaugcauggagaguguuaagaacggaaccuaugauuaccccaaauauuccgaagagagcaagcucaaucgugagcgcaucgacggugugaaacuggaaucuaugggcgucuaccagaucuuagcuauuuauucaacaguggccaguagccugguccuacucgugucccugggggcaaucucuuuuuggaugugcucgaacggaagccuucaguguagaauuugcauauga

SEQ ID NO: 129700 - RNA, 1701 nt, Artificial Sequence
  derived and/or modified CDS sequence (opt3) from hemagglutinin__InfluenzaA__ABP49404
augaagaccaucauugcccugagcuacacacucugccuuguguucgcucagaaacugcccggcaacgacaauuccacugcaacguuguguuuagggcaccaugccgucccuaacggaaccauaguuaagacaaucacuaaugaucaaauugaggugaccaacgcgacagaacugguacagucuucaaguaccgguggcaucugcgacagcccacaccagauucuagauggggagaauuguacucucaucggagcucugcuuggcgacccgcagugcgaugguuuucaaaacaaaaagugggaccuguucguggaaagauccaaagccuauucuaauuguuaccccuaugaugucccugacuacgcaucguugaggucacucguggccagcagugggacacuggaguuuaacaaugaauccuucaacuggaccggaguuacgcagaauggcacuucuagcgcuugcaagcggcgcuccaacaauucauuuuucagucgacugaacuggcucacccauuuaaaguuuaaauauccagcacugaaugugacaaugcccaacaacgagaaguucgauaaacuuuacauauggggcguccaccauccugggacuuauaaugaccagaucagcuuguacgcccaggcuucuggacguauuaccguguccacaaagagaucacaacagaccguaaucccaaacauugguagcaggccccggguucgcgauaucccuaguagaauaucuauuuacuggacgaucgugaaaccaggcgacauucugcuaaucaauuccacugggaaccucaucgccccgaggggauauuuuaagauucggagcggcaagucgucuauaaugcgcuccgaugcgcccaucgguaaauguaauucagagugcauuacaccuaacgggaguaucccaaaugacaagcccuuccagaacgucaaucgaauaaccuacggagcauguccuagauaugugaaacagaacacucugaaacuugccacaggcaugaggaaugugccagaaaaacaaacccggggcauuuuuggggcuaucgccggauucaucgagaacgguugggaaggcauggucgacgggugguacggauuucgucaccagaauagcgagggcauuggucaggcagcugaucugaaguccacgcaagccgcgaucaaccagauuaaugggaaauugaaccgccucauaggcaagaccaacgagaaguuccaccagaucgaaaaagaguucucugaaguugagggaaggauucaggaccuggaaaaguauguggaggauacaaaaaucgacuuauggagcuacaaugccgagcugcucguagcacuugaaaaccaacauacuaucgaucugaccgacucagagaugaauaaguuguuugaaagaacaaagaagcagcuacgggagaacgcugaagauaugggcaaugggugcuucaagauuuaucacaaaugugacaacgccugcauaggaaguauccgaaaugguacuuacgaucaugacguguaccgcgaugaggcucugaacaauagauuucagauuaagggcgucgagcucaaauccggguauaaggacuggauccuguggauuagcuucgccaucucuugcuuucuucuguguguggcauugcucggauucauaaugugggccugccagaaaggcaacaucagguguaauauuugcaucuga

SEQ ID NO: 129701 - RNA, 1701 nt, Artificial Sequence; identical to SEQ ID NO: 128698
  derived and/or modified CDS sequence (opt3) from hemagglutinin__InfluenzaA__ABP49415

SEQ ID NO: 129702 - RNA, 1701 nt, Artificial Sequence; identical to SEQ ID NO: 128698
  derived and/or modified CDS sequence (opt3) from hemagglutinin__InfluenzaA__ABP49426

SEQ ID NO: 129703 - RNA, 1689 nt, Artificial Sequence
  derived and/or modified CDS sequence (opt3) from hemagglutinin__InfluenzaA__ABP49437
auggccaucauuuaccugauacuccuuuucaccgcugugagaggcgaccagaucugcauuggguaucacgcaaacaauagcacagagaaggucgauacuauccuggaaaggaacguuacggugacccaugccaaagacauuuuggagaagacacacaauggaaaauuauguaagcugaacgguauacccccucuagaacucggcgauugcuccaucgcgggguggcugcuuggaaauccagagugugaccggcuguugucuguaccggaauggucauacaucauggagaaagagaacccccgcgauggccucugcuauccugguaguuuuaaugacuacgaagaacugaagcaucugcucagcuccgugaagcacuucgaaaaagucaagauuuuaccaaaagaucgauggacucaacauaccacaaccgggggaucucgugcuugugccgugucgggcaaccccucauuuuucagaaauaugguuuggcugacuaagaaaggcagcaacuauccuguggcaaaggggaguuacaauaacacauccggagagcagaugcuuaucauuugggguguccaccacccaaaugacgagaccgaacagaggacguuguaucagaacgugggcacuuacguaucuguugggaccagcacacugaauaagcgguccacucccgagaucgccacccgcccuaaagugaacggacuaggcgguagaauggaauuuucauggacacuccuggauaugugggacaccauaaacuucgagaguacggggaaucuuauugcuccagaauacggauuuaagaucagcaaaagggggucuuccggcauuaugaagacugagggcacacuggagaacugcgaaaccaaaugucaaacuccguugggagcaaucaauacaacccuccccuuccauaacguccacccucugacgaucggugagugcccaaaguaugugaaaucagaaaaguuagugcuggccaccggccuccggaaugucccccagauugagagccgcgggcuuuuuggagcuauagccggcuucaucgaagguggguggcagggcaugguugauggaugguacggcuaucaucacaguaacgaccaggggucuggauacgcggcagauaaggaguccacacaaaaagccuuugacgguauuacuaauaaggugaacagcguaaucgagaaaaugaauacccaguucgaagcugugggcaaggaguuuucgaaccuggaacgaagauuggagaaucuaaacaaaaagauggaagacggguuccuggaugucuggacauauaaugccgagcuccuggugcuuauggagaacgaaaggacucuggacuuccacgauucuaauguuaagaacuuguacgacaaagugcggaugcagcuccgugauaacgucaaggagcugggaaauggcuguuuugaguucuaucauaaaugcgacgaugaguguaugaacuccgugaagaaugguaccuacgacuacccuaaauaugaggaagagucaaaguuaaaccgcaaugaaauaaaggggguaaaacugaguagcaugggcguuuaccagauucuagcaaucuaugcuacaguggccggaucccucucucuggcgaucaugauggccggcauuagcuuuuggaugugcucaaacgggagucuucaaugcagaaucuguauuuga

SEQ ID NO: 129704 - RNA, 1701 nt, Artificial Sequence
  derived and/or modified CDS sequence (opt3) from hemagglutinin__InfluenzaA__ABP49448
augaaggccaaacugcucgugcuucugugcgcuuugagcgcaaccgacgccgauacaaucuguauuggcuaccacgcgaacaauuccacugacacggucgauaccguuuuagagaagaacgugacaguaacucauucugugaaucugcuagaagacucacacaacgggaaacucugcagacugaagggaauagcuccccuucagcuggguaaauguaguaucgccggcuggauuuuggggaauccugagugcgaaagccucuucuccaagaagucuuggucguauaucgcagagaccccaaacucagaaaauggaacauguuacccgggcuauuuugccgauuacgaggagcugagggaacaacugagcagugucuccucuuucgagcgguuugaaauuuuccccaaagagcgcagcuggccuaagcauaacgugacccgagguguuacugcuuccugcucacacaaagggaagaguagcuuuuaucguaaucucuuauggcugacagagaaaaacggaucuuacccaaaucuuuccaagucauaugugaacaauaaggaaaaagaggucuuggugcuguggggcguacaucaccccagcaacaucgaagaccagaagaccauauacagaaaagagaaugcauacguuaguguggucucuuccaacuauaacaggcgguucacgccugaaaucagcgagcgcccaaaggugagaggccaggaggggaggauuaauuacuauuggacucuacucgaacccggagauaccaucauuuuugaggccaacgguaaucugaucgcuccuugguacgccuucgcgcuuucgcggggcuuugggucuggaauaauuacauccaacgcaucaauggacgaaugugauacuaaaugccagaccccacaaggcgccaucaauaguagccugccguuccagaacgugcaccccgucacaauuggugaguguccuaaguauguucgcuccaccaaauugcgaauggugacggggcucagaaauaucccaucuauccagagcaggggacuguuuggcgcuauugccggcuucauagaagggggauggacugguaugaucgacggcugguacggguaucaucaccagaacgagcaaggaucaggcuacgcagcugaucagaagaguacacagaaugccauuaacgguaucaccaauaagguaaacuccgugauagagaaaaugaauacucaguuuacagcggucgggaaggaguucaacaaauuagaaaagcggauggaaaaucugaacaaaaagguggacgauggcuuccucgacauuuggaccuacaacgccgagcuucugguuuugcuagaaaaugagcguacgcuggacuuucaugauagcaacgugaagaaucucuaugagaaagucaagucucaacugaaaaacaaugcaaaggaaaucggaaacggcugcuucgaguuuuaccacaaauguaauaacgaaugcauggagucagugaagaaugggaccuaugacuaccccaaguauagugaggaaagcaaacuuaaccgcgagaagaucgauggaguaaaacuggaauccauggguguuuaccagauuuuggcuaucuauucuacaguggccucgagccucguccuguuagugucccugggcgcuauuucauucuggaugugcaguaaugggucucuacaguguagaauaugcaucuga

SEQ ID NO: 129705 - RNA, 1689 nt, Artificial Sequence
  derived and/or modified CDS sequence (opt3) from hemagglutinin__InfluenzaA__ABP49459
auggccaucauuuaccugauacuccuuuucaccgcugugagaggcgaccagaucugcauuggguaucacgcaaacaauagcacagagaaggucgauacuauccuggaaaggaacguuacggugacccaugccaaagacauuuuggagaagacacacaauggaaaauuauguaagcugaacgguauacccccucuagaacucggcgauugcuccaucgcgggguggcugcuuggaaauccagagugugaccggcuguugucuguaccggaauggucauacaucauggagaaagagaacccccgcgauggccucugcuauccugguaguuuuaaugacuacgaagaacugaagcaucugcucagcuccgugaagcacuucgaaaaagucaagauuuuaccaaaagaucgauggacucaacauaccacaaccgggggaucucgugcuugugccgugucgggcaaccccucauuuuucagaaauaugguuuggcugacuaagaaaggcagcaacuauccuguggcaaaggggaguuacaauaacacauccggagagcagaugcuuaucauuugggguguccaccacccaaaugacgagaccgaacagaggacguuguaucagaacgugggcacuuacguaucuguugggacccccacacugaauaagcggagcacuccugauaucgccacccgcccaaaagugaacggacaaggcgguagaauggaguuuuccuggacacuacucgacaugugggauaccauaaacuucgaaucaacggggaaucugauugcuccggaguacggauuuaagaucaguaaaaggggcagcucuggcauuaugaagacugaagggacacuuggaaacugcgagaccaaaugucagacuccccugggugcaaucaauacaaccuugccuuuccauaacguccacccacucacgaucggcgagugccccaaguaugugaaauccgaaaagcugguguuagccaccgggcugcggaaugucccucagauugagucacgcggacucuuuggcgcuauagccgguuucaucgaagggggcuggcagggaaugguugacggcugguacggguaucaucacagcaacgaucaaggaagugguuacgcggcagacaaggagucuacacagaaagccuuugacggcauuacuaauaaggugaacuccguaaucgagaaaaugaauacccaguucgaggcuguggggaaggaguuuagcaaccuugaacgaagacuggagaauuugaacaaaaagauggaagauggauuccuagacgucuggacauauaaugccgagcugcucgugcugauggaaaacgagaggacucuugauuuccacgacucgaauguuaagaaccuguacgauaaagugcggaugcaguugcgugacaacgucaaggagcucggcaaugguuguuuugaguucuaucauaaaugcgaugacgaauguaugaacucugugaagaaugggaccuacgauuacccaaaauaugaagaggaguccaagcugaaccgcaaugaaauaaagggcguaaaauuaucaaguaugggaguuuaccaaauucuggcaaucuaugcuacaguggccggcagccuaucccucgcgaucaugauggccgggauuucuuuuuggaugugcagcaacggaucacugcagugcagaaucuguauuuga

SEQ ID NO: 129706 - RNA, 1689 nt, Artificial Sequence
  derived and/or modified CDS sequence (opt3) from hemagglutinin__InfluenzaA__ABP49470
auggccaucauuuaccugauacuccuuuucaccgcugugagaggcgaccagaucugcauuggguaucacgcaaacaauagcacagagaaggucgauacuauccuggaaaggaacguuacggugacccaugccaaagacauuuuggagaagacacacaauggaaaauuauguaagcugaacgguauacccccucuagaacucggcgauugcuccaucgcgggguggcugcuuggaaauccagagugugaccggcuguugucuguaccggaauggucauacaucauggagaaagagaacccccgcgauggccucugcuauccugguaguuuuaaugacuacgaagaacugaagcaucugcucagcuccgugaagcacuucgaaaaagucaagauuuuaccaaaagaucgauggacucaacauaccacaaccgggggaucucgugcuugugccgugucgggcaaccccucauuuuucagaaauaugguuuggcugacuaagaaaggcagcaacuauccuguggcaaaggggaguuacaauaacacauccggagagcagaugcuuaucauuugggguguccaccacccaaaugacgagaccgaacagaggacguuguaucagaacgugggcacuuacguaucuguuagcaccuccacacugaauaagcggucaacucccgauaucgccacccgcccuaaagugaacgggcuaggaggcagaauggaguuuaguuggacacuccuggacaugugggauaccauaaacuucgaaagcacggguaaucuuauugcuccagaguacggguuuaagaucucuaaaaggggauccucaggcauuaugaagacugaaggcacacuggggaacugcgagaccaaaugucaaacuccguugggagcaaucaauacaacccuccccuuccauaacguccacccucugacgaucggugagugcccaaaguaugugaaaagcgaaaaguuagugcuggccaccggccuccggaaugucccccagauugagagucgcgggcuuuuuggagcuauagccggcuucaucgaagguggguggcagggcaugguugacggaugguacggcuaucaucacucuaacgaucagggguccggauacgcggcagacaaggagagcacacaaaaagccuuugacgguauuacuaauaaggugaacucgguaaucgagaaaaugaauacccaguucgaggcugugggcaaggaguuuucuaaccuggaacgaagauuggagaaucuaaacaaaaagauggaagauggguuccuggacgucuggacauauaaugccgagcuccuggugcuuauggaaaacgagaggacucuggauuuccacgacuccaauguuaagaacuuguacgauaaagugcggaugcagcuccgugacaacgucaaggagcugggaaauggcuguuuugaguucuaucauaaaugcgaugacgaauguaugaacucagugaagaaugguaccuacgauuacccuaaauaugaagaggagaguaaguuaaaccgcaaugaaauaaaggggguaaaacugagcuccaugggcguuuaccagauucuagcaaucuaugcuacaguggccggaucucucagccuggcgaucaugauggccggcauuucauuuuggaugugcaguaacgggucccuucaaugcagaaucuguauuuga

SEQ ID NO: 129707 - RNA, 1701 nt, Artificial Sequence
  derived and/or modified CDS sequence (opt3) from hemagglutinin__InfluenzaA__ABP49492
augaagaccaucauugcccugagcuacauauucugccucguguuugcucagggccuucccgggaacgacaauuccacagcaacucuguguuugggacaccaugccgucccuaacgguacguuaguuaaaaccaucacaaaugaucaaauugaggugacuaacgcgaccgaacugguacagucuucaaguacaggcaagaucugcgacaauccacacagaauuuuggaugggaucaacuguacccucauagacgcucugcuuggagauccgcauugcgacggcuuccagaaugagaaaugggaucuguuuguggaaaggagcaaggccuucuccaacuguuaucccuacgacgucccugauuaugcaucuuugcggucgcucguggccucaagcgguacucuggaguuuaucaaugaaggguucaacuggacaggaguuacccagaauggcggcaguuccucuugcaaacgcgggccagacaacggauuuuucagccgacugaauuggcucuacaaguccgguucaacguaucccgugcaaaacgucacuaugccuaauaacgauaacagugacaaguuauacauuuggggcgugcaccauccaagcaccgauaaagagcagacagaccuguauguacaggcuucugggaagguuacuguguccaccaaacguucacagcaaacagucauccccaaugugggaagcagaccuugggugaggggccuuaguucucgggucuccauuuacuggaccaucguuaagccaggugacauauuggugauuaacagcaaugggaaccugaucgcaccgcgcggauacuuuaaaaugagaacgggcaagucgucuauuaugagguccgaugcccccaucggcacuuguucaagugagugcaucacaccuaaugggagcauuccaaacgacaagcccuuccagaauguaaacaaaauaaccuauggagcuuguccuaaguacgugaaacagaauacucuaaagcucgccacagguaugcggaacgucccagaaaaacagacccgcggcaucuuuggggcgauugcaggauucaucgagaauggcugggaagguaugauagaugggugguauggcuuucgacaccaaaacuccgagggaacgggccaggccgcugaccugaagucuacccaggccgcaauugaucaaaucaaugggaaacuuaacagagugaucgagaagacaaaugaaaaguuccaccagauugagaaagaguucagcgaaguugaaggaaggauccaggaccuggagaaguacguggaggauacuaaaauugacuuguggucauauaacgcugaacuccuggucgccuuagagaaccagcauaccauagaucugacagacagugaaaugaauaagcucuuugagaaaacucggcgucaacuucgcgaaaacgcggaggauauggguaauggcugcuucaagaucuaccacaagugugacaacgccugcauuggguccaucagaaauggaaccuaugaccaugauguguacagggacgaggcacugaacaaucgguuucagaucaaaggcguagaacuaaagagcgguuacaaagauuggauucuauggauaucuuucgcuaucucaugcuuucugcucuguguugugcugcuuggguucauuaugugggccugccagaagggcaacauccgauguaauauuugcaucuga

SEQ ID NO: 129708 - RNA, 1701 nt, Artificial Sequence; identical to SEQ ID NO: 129604
  derived and/or modified CDS sequence (opt3) from hemagglutinin__InfluenzaA__ABP49503

SEQ ID NO: 129709 - RNA, 1701 nt, Artificial Sequence
  derived and/or modified CDS sequence (opt3) from hemagglutinin__InfluenzaA__ABP49514
augaagaccaucauugcccugagcuacauauucuaucucgcucuuggccaggaccugcccgggaacgauaauuccacagcaacuuugugcuuaggacaccaugccgugccuaacgguacgcuggucaaaaccaucacaaaugaccaaauugagguuacuaacgcgaccgaacuugugcagucuucaaguacaggcaagaucuguaauaacccacacaggauucucgaugggaucgacugcacccugauagaugcucuacugggagacccgcauugugauguauuucagaaugagacuugggacuuguucguggaaagaagcaaagccuuuuccaacugcuaccccuaugaugucccugacuacgcaucucuccggucgcugguggccucaagcggcacacuggaguucaucaccgaagguuuuacguggacugggguuacccagaauggaggcaguaacgcuuguaagcgcggcccaggguccggauucuuuucucgacucaauugguuaacaaaaagcgguuccacuuaucccgugcugaacgucaccaugccuaauaacgauaauuucgacaaguuguacauuuggggcgugcaccauccaucaacaaaccaagagcagaccaguuuguauguacaggcaagcgggcguguuacggugucuacuagaaggucccagcaaacaaucauucccaacaucggaucacggccuuggguccgcggccugagcaguagaauaucuauuuacuggaccaucgugaagccaggugaugugcuagucauuaauuccaacgggaaucucaucgccccgaggggauacuuuaaaaugcggacuggcaagagcucgaucaugcgcucugacgcucccauugacacaugcauauccgaguguaucaccccuaacggcucaauuccaaaugauaaacccuuccagaacguuaauaagaucacguauggggccugcccuaaauacgugaagcagaacacccugaaacuugcgacaggaaugcgaaauguaccagaaaagcagacuagaggucuguuuggcgcaauagccggguucauugagaacggaugggaaggcaugaucgacgguugguauggguuuaggcaccaaaauagugagggcaccggacaggcugccgaucuuaagagcacacaggcagcuaucgaccaaauuaacggcaaacucaaucgggugaucgagaagacuaacgaaaaauuccaccagauugagaaggaguucuccgaagucgaagggcguauacaggaucuggagaaauacguggaggacaccaagaucgauuuauggucuuauaaugccgaacugcucguugcgcuugagaaccagcauacaauugaccugaccgauagcgaaaugaacaaguuguuugagaaaacucgcagacaacuaagggaaaaugccgaggacaugggaaacgguuguuucaagaucuaccacaaaugcgauaaugcauguaucgagucaauucggaacggcacguaugaccaugacguguaccgagaugaagcucugaauaaccgcuuucagauaaagggggucgagcucaaaaguggauacaaggacuggauccuguggauuuccuucgccaucagcugcuuucuucugugcgugguauugcucggcuucauuaugugggcuugucagagagguaauaucaggugcaacauauguaucuga

SEQ ID NO: 129710 - RNA, 1701 nt, Artificial Sequence
  derived and/or modified CDS sequence (opt3) from hemagglutinin__InfluenzaA__ABQ01311
augaaggccagacugcucauccuucugugcgcuuugagcgcaaccgacgccgauacaauuuguauaggcuaccacgcgaacaauuccacugacacgguggauaccgucuuagagaaaaacguuacagugacucauucuguaaaucugcuagaagacucacacaacgggaagcucugcaggcugaaaggaaucgcuccccuucagcuggguaaguguaauauugccggcuggaucuuggggaacccugagugcgaaagucuccugagcaaucgguccuggucuuauauugcagagaccccaaacucggaaaauggaacauguuacccgggcgauuucgccgacuaugaggagcugcgcgaacaacucucaagcgugaguuccuuugagcgauucgaaaucuuucccaaagagcguucuuggccuaagcauaacauaaccagaggugucacugcugcaugcagccacgccaagaaauccucauucuacaagaauuuacuguggcuuacagaggcuaacgggaguuauccaaauuugagcaaaucuuacgugaacaauaaggaaaaagagguucuggugcuauggggaguccaucaccccuccaagaucgaagaucagaggacccucuaucggaaggagaacgccuacgugucaguaguuagcaguaacuacaaucgcagauuuacgccugaaauugcggagaggccaaaagugcggggccaggcaggccgcaugaacuauuacuggacucugcuugagcccggggacaagaucauuuucgaagccaauggaaaccugaucgcuccuugguaugccuuugcauugucucgaggucucggcuccgggauaauuaccagcaaugcuucgauggaugagugugacacaaaaugccagacuccacaaggagccaucaacucuucccugccguuccagaauauucaccccgucaccaucggcgaauguccuaaguacgugagaucaacaaaauuaaggauggugaccggucugcggaacaucccaaguauucagagccgugggcucuuuggagcgauagccggcuucaucgagggcggguggacgggaauggucgaugguugguauggcuaccaucaccagaaugaacaaggguccggauaugcagcugaccagaagucuacucagaacgccauuaauggcaucacaaacaaaguuaauagcgugauagagaagaugaacacccaguuuacugcuguagguaaggaguucaauaaacuugaaaagcgcauggagaaccugaacaaaaagguggaugacggguuuuuggacauuuggacauacaaugccgaacuacugguccuccuggagaacgaaagaacccuugauuuccaugacucaaaugugaaaaaccuguacgagaagguuaagaaucaauugaggaacaaugcaaaagagaucggcaacggaugcuucgaauuuuaucacaagugugauaaugagugcauggaaagugugaaaaacggcacguacgacuaucccaaguacuccgaggagagcaaacucaaucgggaaaagaucgauggggucaagcuggagucuaugggaguguaucagauuuuagccaucuacucaaccguagcuaguagccugguucuacucgugucccugggugcgauuucuuucuggaugugcucgaacggcagccuucagugucgaauaugcaucuga

SEQ ID NO: 129711 - RNA, 1701 nt, Artificial Sequence
  derived and/or modified CDS sequence (opt3) from hemagglutinin__InfluenzaA__ABQ01322
augaaggccaaacugcucgugcuucugugcgcuuugagcgcaaccgacgccgauacaaucuguauuggcuaccacgcgaacaauuccacugacacggucgauaccguuuuagagaagaacgugacaguaacucauucugugaaucugcuagaagacucacacaacgggaaacucugcagacugaagggaauagcuccccuucaucuggguaaauguaguaucgccggcuggauuuuggggaauccugagugcgaaagccucuucuccaagaagucuuggucguauaucgcagagaccccaaacucagaaaauggaacauguuacccgggcuauuuugccgauuacgaggagcugagggaacagcugagcagugucuccucuuucgagcgguuugaaauuuuccccaaagagcgcagcuggccuaagcacaacgugacccgagguguuacugcugcaugcucccauaaagggaagucaaguuuuuaucguaaucucuuauggcugacagagaaaaacggaagcuacccaaaucuuucuaaguccuaugugaacaauaaggaaaaagaggucuuggugcuguggggcguacaccaccccucaaacaucgaagaccaaaagaccauauacagaaaagagaaugccuacguuagcguggucaguucuaacuauaacaggcgguucacgccugaaaucgcuaagcgcccaaaagugagaggccaggaggggaggauuaauuacuauuggacucuacucgagcccggagauaccaucauuuuugaagccaacgguaaucugaucgcgccuugguacgcauucgcccuuucccggggcuuugggagcggaauaauuacaucgaacgcuucuauggacgagugugaugccaagugccagacuccacagggcgcaaucaauuccucacugccguuccaaaacgugcaucccgucaccauuggugaauguccuaaauauguucgcaguacaaaguugcgaauggugaccgggcucagaaauaucccaagcauccaguccaggggacuguuuggcgcuauugccggcuucauagaagggggauggacggguaugaucgacggcugguacggguaucaccaucagaacgaacagggaucuggcuacgcggccgaucaaaagagcacucagaaugcaauuaacgguaucacaaauaaaguaaacucagugauagagaagaugaauacccaguuuacugcugucgggaaagaguucaacaaguuagaaaaacggauggagaaucugaacaagaagguggacgauggcuuccucgacauuuggacauacaacgccgaacuucugguuuugcuagagaaugaacguacccuggacuuucacgauaguaacgugaaaaaucucuaugagaaggucaaaucccagcugaagaacaaugcuaaagagaucggaaacggcugcuucgaauuuuaccacaaguguaauaacgagugcauggaaagcgugaagaaugggacguaugacuaccccaaauauucugaggagucaaaacuuaaccgcgagaagaucgauggaguaaagcuggagaguauggguguuuaccaaauuuuggccaucuauagcaccguggcauccucucucguccuguuagugucgcugggcgccauuagcuucuggaugugcuccaaugggucacuacaguguagaauaugcaucuga

SEQ ID NO: 129712 - RNA, 1701 nt, Artificial Sequence; identical to SEQ ID NO: 128698
  derived and/or modified CDS sequence (opt3) from hemagglutinin__InfluenzaA__ABQ01333

SEQ ID NO: 129713 - RNA, 1701 nt, Artificial Sequence
  derived and/or modified CDS sequence (opt3) from hemagglutinin__InfluenzaA__ABQ01344
augaagaccaucauugcccugagcuacauacucugccuuguguucgcucagaaacugcccggcaacgacaauuccacagcaacuuuguguuuagggcaccaugccgucccuaacggaacgcugguuaagaccaucacaaaugaucaaauugaggugacuaacgcgaccgaacuuguacagucuucaaguacagguggcaucugcgacagcccacaccagauucucgauggggagaauuguacccugaucgacgcucuacugggagauccgcauugcgacggcuuucagaacaaagaaugggauuuguucguggagagauccaaggccuauucuaauuguuaccccuaugacgucccugauuacgcaucgcucaggucacugguggccagcagugguacucuggaauuuaacaaugaguccuucaacuggacagggguugcucaaaauggaaccucuagcgcaugcaaacggcgcuccaacaagucauuuuucagucgacucaauugguuacaccagcugaaguauaaauacccagcccuuaacgugacgaugcccaauaacgagaaguuugacaaauuguauauauggggcguccaucacccuagcacugauucugaccagaucucccuguacgcucaggccccaggccgugugaccguaucaacaaagagaagccaacagacuguuauucccaacaucgggaguaggccuugggugcggggagucucuucccgcauuagcaucuacuggaccauagugaaaccaggugauauucuacucaucaauuguacaggcaaccugauugcgccgagaggguauuucaagaucaggucgggaaagucuuccaucaugcggucagacgcaaguauuggcaaaugcaauagcgaauguauaacccccaacgguuccaucccuaaugacaagccauuucagaacgugaaucgcauuacguacggggccugcccccgauaugucaaacagaacacucuuaagcuggcuacaggaaugagaaauguuccugagaaacaaaccaggggcaucuucggcgccauagcaggguuuauugaaaacggaugggaggguaugguggauggcugguacggguuccggcaccagaauagcgagggaacuggccaggcugccgacuugaagucuacacaagcggccaucaaccagaucaaugguaaacucaaccgucugauugggaagaccaaugaaaaguuucaucagaucgagaaagaguucucagaaguagaaggccgcauucaggauuuagagaaguauguggaggacacgaaaauagaucuguggaguuacaacgcagaacuccuugucgcucuggagaaccaacacaccaucgacuugacagauuccgaaaugaauaagcuauucgagagaacuaaaaagcagcugagggaaaacgccgaggacaugggaaauggcuguuuuaagauuuaucauaaaugcgauaacgcuugcaucgggagcauccggaauggaaccuacgaccacgauguguaccgagacgaggcccucaacaaucgcuuccagauuaaggguguugaacugaaaucuggcuauaaggacuggauacuuuggaucucauuugcaauuaguuguuuccuguugugcgugguccuccugggguuuaucaugugggccugucagaaaggaaacauuagaugcaauaucuguauauga

SEQ ID NO: 129714 - RNA, 1689 nt, Artificial Sequence
  derived and/or modified CDS sequence (opt3) from hemagglutinin__InfluenzaA__ABQ01355
auggccaucauuuaccugauacuccuuuucaccgcugugagaggcgaccagaucugcauuggguaucacgcaaacaauagcacagagaaggucgauacuauccuggaaaggaacguuacggugacccaugccaaagacauuuuggagaagacacacaauggaaaauuauguaagcugaacgguauacccccucuagaacucggcgauugcuccaucgcgggguggcugcuuggaaauccagagugugaccggcuguugcgcguaccggaauggucuuacaucauggagaaagagaacccccgagauggccucugcuauccugguucauuuaaugacuacgaagaacugaagcaucugcucaguagcgugaagcacuucgaaaaaguccguauuuuaccaaaggauagauggacucaacauaccacaaccgggggauccagggcuugugccgugucuggcaaccccucguuuuuccggaauaugaucuggcugacuaaaaagggcucaaacuauccuguugcaaaagggagcuacaauaacacaaguggagagcagaugcuuauuaucuggggugugcaccacccaauagacgagaccgaacagcgcacguuguaucagaaugucgagacuuacguguccguaguuaccucuacacugaacaagagaagcacucccaagauugccaccaggccuaaagugaauggccuagggggacggauggaauuuuccuggacacuccuggauaugugggacaccaucaacuucgagucaacgggcaaccuuauugcuccagaauacgguuuuaagaucaguaaacgcgggagcucuggaaucaugaagacugagggcacacuggagaauugcgaaaccaaaugucaaacuccguugggcgcaauuaacacaacccuccccuuccauaauguccacccucugacgauaggggagugcccaaaguaugugaaauccgaaaaguuagugcuggccaccggacuccgaaacgucccccagaucgagucaagaggucuuuuuggcgcuauugccggguucaucgaaggaggcuggcaggguaugguugaugggugguacggcuaucaucacagcaaugaccagggaaguggcuacgcggcagauaaggagucuacacaaagggccuuugacgggauaacuaacaaaguaaauuccgugauugagaagaugaacacccaguucgaagcugugggaaaagaguuuagcaaucuggaacggcguuuggagaaccuaaauaagaaaauggaagacgguuuccuggaugucuggacauauaacgccgagcuccuggugcuuauggagaaugaacgcacucuggacuuccacgauucgaacguuaagaauuuguacgacaaggugagaaugcagcucagggauaacgucaaagagcugggcaacggguguuuugaguucuaucauaagugcgacgaugaguguaugaacucugugaaaaauggaaccuacgacuacccuaaguaugaggaagaguccaaauuaaaucggaacgaaaucaagggcguaaagcugucaaguauggguguuuaccagauccuagcaauuuaugcuacaguggccgggagccucucccuggcgaucaugauggccggcauuucuuuuuggaugugcagcaauggaucacuucaaugccgaauauguaucuga

SEQ ID NO: 129715 - RNA, 1701 nt, Artificial Sequence
  derived and/or modified CDS sequence (opt3) from hemagglutinin__InfluenzaA__ABQ01366
augaagaccaucauugcccugagcuacauauucugccucguguuugcucaggaccuucccggcaacgauaauuccacagcaacucuguguuuggggcaccaugccgucccuaacggaacguuaguuaaaaccaucacaaaugaccaaauugaggugacuaacgcgaccgaacugguacagucuucaaguacagguaagaucugcgauaauccacacaggauucuagacggcaucaacuguacccucauagaugcucugcuuggggacccgcauugcgauggauuccagaaugagaaaugggaccuguuuguggaaagaagcaaggccuucuccaacuguuaucccuacgaugucccugacuaugcaucuuugcggucgcucguggccucaagcggcacucuggaguuuaucaaugaagguuucaacuggacagggguuacccagaauggaggcaguuccgcuugcaaacgcggcccagauaacggguuuuucucucgacugaauuggcucuacaagagcggauccacguaucccgugcaaaacgucacuaugaccaauaacgacaacucagauaaguuauacauuuggggugugcaccauccuaguacagacaaagagcagacugaccuguauguacaggcaagcggcaagguuaccgugucuacaaaacguucccagcaaaccaucauuccaaaugucgggucaagacccugggugaggggacuuagcagucgggugucuaucuacuggacgauagucaagccuggcgauauuuugguuaucaacuccaaugguaaccugauugccccacgcggguacuuuaaaaugagaacuggaaagagcucgaucaugaggucugacgcuccgaucggcacauguuccucagagugcauuacccccaauggcaguauaccuaacgauaagccauuccagaaugugaacaaaaucacuuauggggccugucccaaguacguaaaacagaauacacuaaagcucgcgaccggaaugcggaacgugccugaaaaacagacgcgcgguauuuuuggcgcaaucgccggguucauagagaauggaugggaaggcaugauugacgguugguauggguuucgacaccaaaacagcgagggcaccggacaggcugccgaucugaaguccacacaggcagcuaucgaccaaaucaauggcaaacuuaacagagucauugagaagacuaaugaaaaguuccaccagaucgagaaagaguucucugaaguggaagggaggauucaggaucuggagaaguacguugaggacaccaaaauagauuuguggagcuauaacgccgaacuccugguggcguuagagaaccagcauacaaucgaccugacugauucagaaaugaauaagcucuuugagaaaacccggcgucaacuucgcgaaaacgccgaggacaugggaaaugguugcuucaagauuuaccacaagugugacaacgcaugcaucggcaguaucagaaaugggacauaugaucaugacgucuacagggaugaggcucugaacaaucgguuucagauuaaaggaguggaauugaaguccggcuacaaagacuggauacuauggaucagcuucgccauuucuugcuuucugcucuguguaguucugcuugguuucaucaugugggcuugccagaaggggaacauucgauguaauaucugcauauga

SEQ ID NO: 129716 - RNA, 1701 nt, Artificial Sequence; identical to SEQ ID NO: 129481
  derived and/or modified CDS sequence (opt3) from hemagglutinin__InfluenzaA__ABQ44383

SEQ ID NO: 129717 - RNA, 1701 nt, Artificial Sequence; identical to SEQ ID NO: 128681
  derived and/or modified CDS sequence (opt3) from hemagglutinin__InfluenzaA__ABQ44405

SEQ ID NO: 129718 - RNA, 1701 nt, Artificial Sequence
  derived and/or modified CDS sequence (opt3) from hemagglutinin__InfluenzaA__ABQ44416
augaaggccaaacugcucgugcuucugugcgcuuucaccgcaacagacgccgauacuaucuguauuggcuaccacgcgaacaauagcacggacaccgucgauacaguuuuggagaagaacgugacuguaacccauuccgugaauuuacuggaagacucucacaacgggaaacuaugcagacucaagggaauagcuccccugcagcuugguaauuguucaaucgccggcuggauucuggggaacccugagugcgaaaguuuguuuagcaaaaaguccuggucuuauaucgcagagacaccaaauucggaaaacggaaccuguuacccgggcuauuucgccgauuacgaggagcucagggaacaacugucaagcgucaguuccuuugagcgguucgaaauuuuucccaaggagucuagcuggccuaaucauacugugacaaaagguguuaccgcuuccugcucacacaaggggaaaaguagcuucuaucgcaaccugcucugguuaacggagaagaauggaucuuacccaaaccuguccaaaucauaugugaauaacaaggaaaaggagguccuuguguuguggggcguacaucaccccagcaauaucggcgaccagcgagcaauauaccacacugaaaacgccuacguuaguguggucucuucccauuauaaccguagauuuaccccugagaucgcuaaaaggccaaaggugcgggaucaggaagggcgcauuaauuacuauuggacacugcuagagcccgaggacacuaucauuuucgaagccaacggaaaucucaucgcgccuugguacgcauuugcccugagcagagguuucggcucggggauaauuaccucuaacgcuuccauggaugagugugacgccaaaugccagacaccacaaggagcaaucaauucaagucuuccguuucagaacgugcaccccgucaccauuggcgaauguccuaaguauguuaggagcacgaaacugcggauggugacugguuugcgcaauaucccauccauccagucucgagggcuuuucggagcuauugccggcuuuauagagggcggguggacaggaaugaucgaugguugguacggcuaucaucaccagaacgaacaagggagcggauacgcggccgaccagaagucaacccagaaugcaauuaacggcaucacuaauaaaguaaacagugugauagagaagaugaauacacaguucaccgcugucgguaaggaguucaacaaacuggaaagaaggauggagaauuuaaacaagaaaguggaugacggguuucuggacauuuggacguacaacgccgaacuccuuguucuguuggagaaugaacggacccuagauuuccacgacuccaacgugaagaaucuguaugagaaagucaagagccaacucaagaacaaugcuaaagagaucggcaacggaugcuuugaguucuaccauaaguguaauaacgaaugcauggaaucugugaaaaauggcacauaugauuaccccaaguauucagaggagaguaaacugaaccgugaaaagaucgacgggguaaagcucgagagcaugggaguuuaccagauucuggccaucuauuccacuguggcaucuucguugguccuccuggugagcuuaggugccauuuccuuuuggaugugcucaaauggcagucugcagugucgcauaugcaucuga

SEQ ID NO: 129719 - RNA, 1701 nt, Artificial Sequence; identical to SEQ ID NO: 128304
  derived and/or modified CDS sequence (opt3) from hemagglutinin__InfluenzaA__ABQ44427

SEQ ID NO: 129720 - RNA, 1689 nt, Artificial Sequence
  derived and/or modified CDS sequence (opt3) from hemagglutinin__InfluenzaA__ABQ44438
auggccaucauuuacuucauacugcucuuuaccgcugugagaggcgaccagaucugcauuggguaucacgcaaacaauagcacagagaaggucgauacuauccuugaaaggaacguuacggugacccaugccaaagacauucuggagaagacacacaauggaaaauuguguaaguuaaacgguauacccccucuggaacuaggcgauugcuccaucacuggguggcuccugggaaauccagagugugaccggcuucugcgcguaccggaauggucuuacaucauggagaaagagaacccccgauauucauugugcuacccuggcaguuucaaugauuaugaggaacucaagcaucugcugagcuccgugaagcacuuugaaaaaguccguauucucccaaaggacgguuggacccaacauacaaccucugggggaucgaaagcgugugcugugucaggcaagagcaguuucuuuagaaacaugguuugguuaacuaaaaagggccccaauuacccuguggccaagagguccuauaacaauacaucuggggagcagaugcugaucauuuggggaguccaccacccaaacgaugaggcagaacagagcgcccuuuaccagaaaguggguaccuacguauccgcuucaacgaguacuuugaauaagcggagcacccccgagaucgcagcccgcccugaaguuaacggccuggggucuagaauggaguucuccuggacacuacucgacgugugggauacuauaaauuuugaaucaaccggaaaccuggucgcuccagaguauggcuucaaaauuagcaagagggguaguucugggaucaugaaaacagagggaacccuuggcaacugcgaaacgaagugucaaacuccgcugggcgccauuaauacaaccuugcccuuucauaacgugcacccucucacuaucggggagugcccaaaauacgugaaguccgaaaagcuggucuuagcgacaggacugcggaauguuccccagaucgagagccgcggucucuucggcgcaauugccggguuuauagaaggaggcuggcaggguaugguggacgggugguauggcuaccaucacucgaacgaucagggaucuggcuaugcugccgacaaagaguccacccaaaaggcauucgaucgaaucacgaauaaaguaaacucagugauugagaagaugaauacccaguuugaagcugucgggaaagaguucaguaaccuugaaaagagacuggagaauuugaacaagaaaauggaagacggauuccuagacguguggacauacaaugccgagcugcucguucugauggagaacgaaaggacucuugauuuucacgacagcaaugugaagaaccuguauaauaaaguccggaugcaguugcgugauaacgugaaggagcucgguaacggcuguuucgaauuuuaccauaaaugcgacgaugaguguauguccucuguaaagaaugggaccuacgacuauccuaaguacgaggaagagagcaaacugaagcgcaacgaaaucaaaggaguuaaguuaucaaguaugggcguguaucagauacuggcgauuuacgccacagucgcagguucccuaagccucgcuaucaugaucgccgggauuucucuguggaugugcucaaauggcagucuucaaugcagaaucuguauuuga

SEQ ID NO: 129721 - RNA, 1689 nt, Artificial Sequence
  derived and/or modified CDS sequence (opt3) from hemagglutinin__InfluenzaA__ABQ44460
auggccaucauuuaccugauacuccuuuucaccgcugugagaggcgaccagaucugcauuggguaucacgcaaacaauagcacagagaaggucgauacuauccuggaaaggaacguuacggugacccaugccaaagacauuuuggagaagacacacaauggaaaauuauguaagcugaacgguauacccccucuagaacucggcgauugcuccaucgcgggguggcugcuuggaaauccagagugugaccggcuguugucuguaccggaauggucauacaucauggagaaagagaacccccgcgauggccucugcuauccugguaguuuuaaugacuacgaagaacugaagcaucugcucagcuccgugaagcacuucgaaaaagucaagauuuuaccaaaagaucgauggacucaacauaccacaaccgggggaucucgugcuugugccgugucgggcaaccccucauuuuucagaaauaugaucuggcugacuaagaaaggcagcaacuauccuguugcaaaggggaguuacaauaacacauccggagagcagaugcuuauuaucuggggugugcaccacccaaaugacgagaccgaacagaggacguuguaucagaacgucggcacuuacgugucuguagggaccagcacacugaauaagcgguccacucccgauauagccacccgcccuaaaguuaacggacuaggcucaagaauggaguuuaguuggacacuccuggacaugugggauaccauuaacuucgaaagcacggguaaucuuaucgcuccagaguacggguuuaagauuucuaaaaggggauccucaggcaucaugaagacugaaggcacacuggggaacugcgagaccaaaugucaaacuccguugggagcaaucaauacaacccuccccuuccauaacgugcacccucugacgauuggugagugcccaaaguaugucaaaagcgaaaaguuagugcuggccaccggccuccggaaugugccccagauagagagucgcgggcuuuuuggagcuaucgccggcuucauugaagguggguggcagggcauggucgacggaugguacggcuaucaucacucuaacgaucagggguccggauacgcggcagacaaggagagcacacaaaaagccuuugacgguaucacuaauaagguuaacucggugauagagaaaaugaauacccaguucgaggcuguaggcaaggaguuuucuaaccuggaacgaagauuggagaaucuaaacaaaaagauggaagauggguuccuggacguguggacauauaaugccgagcuccugguccuuauggaaaacgagaggacucuggauuuccacgacuccaaugugaagaacuuguacgauaaaguucggaugcagcuccgugacaacgugaaggagcugggaaauggcuguuuugaguucuaucauaaaugcgaugacgaauguaugaacucagucaagaaugguaccuacgauuacccuaaauaugaagaggagaguaaguuaaaccgcaaugaaauuaagggggugaaacugagcuccaugggcguauaccagauccuagcaaucuaugcuacaguugccggaucucucagccuggcgauuaugauggccggcaucucauuuuggaugugcaguaacgggucccuucaaugcagaauuuguauauga

SEQ ID NO: 129722 - RNA, 1701 nt, Artificial Sequence
  derived and/or modified CDS sequence (opt3) from hemagglutinin__InfluenzaA__ABQ44471
augaaggccagacugcucauccuucugugcgcuuugagcgcaaccgacgccgauacaauuuguauaggcuaccacgcgaacaauuccacugacacgguggauaccgucuuagagaaaaacguuacagugacucauucuguaaaucugcuagaagacucacacaacgggaagcucugcaggcugaaaggaaucgcuccccuucagcuggguaaguguaauauugccggcuggaucuuggggaacccugagugcgaaagucuccugagcaaucgguccuggucuuauauugcagagaccccaaacucggaaaauggaacauguuacccgggcgauuucgccgacuaugaggagcugcgcgaacaacucucaagcgugaguuccuuugagcgauucgaaaucuuucccaaagagcguucuuggccuaagcauaacauaaccagaggugucacugcugcaugcagccacgccaagaaauccucauucuacaagaauuuacuguggcuuacagaggcuaacgggaguuauccaaauuugagcaaaucuuacgugaacaauaaggaaaaagagguucuggugcuauggggaguccaucaccccuccaacaucgaagaucagaggacccucuaucggaaggagaacgccuacgugucaguaguuagcaguaauuacaaccgcagauuuacgccugaaauugcggagaggccaaaggugcggggccaggcaggccgcaugaauuauuacuggacucugcuugagcccggggacaaaaucauuuucgaagccaacggaaaucugaucgcuccuugguaugccuuugcauugucucgaggucucggcuccgggauaauuaccagcaacgcuucgauggaugagugugacacaaagugccagacuccacaaggagccaucaauaacucucugccguuccagaauauucaccccgucaccaucggcgaauguccuaaauacgugagauccacaaaguuaaggauggugaccggucugcggaacaucccaucaauucagagucgugggcucuuuggagcgauagccggcuucaucgagggcggguggacgggaauggucgaugguugguauggcuaccaucaccagaaugaacaagggagcggauaugcagcugaccagaaauccacucagaacgccauuaauggcaucacaaacaagguuaauucugugauagagaaaaugaacacccaguuuacugcuguagguaaggaguucaacaaacuugaaaaacgcauggagaaucugaacaagaaaguggaugacggguuuuuggacauuuggacauacaaugccgaacuacugguccuccuggagaacgaaagaacccuugauuuccaugacagcaaugugaagaaccuguacgagaaaguuaagaaucaauugaggaacaaugcaaaggagaucggcaacggaugcuucgaauuuuaucacaaaugugauaaugagugcauggaaucagugaagaacggcacguacgacuaucccaaauacagugaggaguccaagcucaaucgggaaaagaucgauggggucaagcuggagagcaugggaguguaucagauuuuagccaucuacucuaccguagcuucaagucugguucuacucgugagccugggugcgauuuccuucuggaugugcucuaacggcucgcuucagugucgaauaugcaucuga

SEQ ID NO: 129723 - RNA, 1701 nt, Artificial Sequence
  derived and/or modified CDS sequence (opt3) from hemagglutinin__InfluenzaA__ABR15797
augaagaccaucauugcccugagcuacauauucugccucgcucuuggccaggaccugcccgggaacgauaauuccacagcaacuuuguguuuaggacaccaugccgugccuaacgguacgcuggucaaaaccaucacaaaugaccaaauugagguuacuaacgcgaccgaacuugugcagucuucaaguacaggcaagaucugcaauaacccacacaggauucucgaugggaucgacuguacccugauagaugcucuacugggagacccgcauugcgauguauuucagaaugagacuugggacuuguucguggaaagaagcaaagccuuuuccaacuguuaucccuacgaugucccugacuaugcaucucuccggucgcugguggccucaagcggcacacuggaguucaucaccgaagguuuuacguggacugggguuacccagaauggaggcaguaacgcuugcaagcgcggcccaggguccggauucuuuucucgacucaauugguuaacaaaaagcgguuccacuuaccccgugcugaacgucaccaugccuaauaacgauaauuucgacaaguuguauauuuggggcgugcaccauccaucaacaaaccaagagcagaccaguuuguacguacaggcaagcgggcguguuacggugucuacuagaaggucccagcaaacaaucauucccaacaucggaucacggccuuggguccgcggccugagcaguagaauaucuauuuauuggaccaucgugaagccaggugaugugcuagucauuaauuccaacgggaaucucaucgccccgaggggauacuuuaaaaugcggacuggcaagagcucgaucaugcgcucugacgcucccauugacacauguauauccgagugcaucaccccuaacggcucaauuccaaaugauaaacccuuccagaacguuaauaagaucacguacggggccuguccuaaauaugugaagcagaacacccugaaacuugcgacaggaaugcgaaauguaccagaaaagcagacuagaggucuguuuggcgcaauagccggguucauugagaacggaugggaaggcaugaucgacgguugguacggguuuaggcaccaaaauagugagggcaccggacaggcugccgaucuuaagagcacacaggcagcuaucgaccaaauuaacggcaaacucaaucgggugaucgagaagacuaacgaaaaauuccaccagauugagaaggaguucuccgaagucgaagggcguauacaggaucuggagaaauauguggaggacaccaagaucgauuuauggucuuacaaugccgaacugcucguugcgcuugagaaccagcauacaauugaccugaccgauagcgaaaugaacaaguuguuugagaaaacucgcagacaacuaagggaaaaugccgaggacaugggaaacgguugcuucaagaucuaucacaaaugugauaaugcaugcaucgagucaauucggaacggcacguacgaccaugacguguaucgagaugaagcucugaauaaccgcuuucagauaaagggggucgagcucaaaaguggauacaaggacuggauccuguggauuuccuucgccaucagcugcuuucuucugugugugguauugcucggcuucauuaugugggcuugccagagagguaauaucagguguaacauaugcaucuga

SEQ ID NO: 129724 - RNA, 1701 nt, Artificial Sequence
  derived and/or modified CDS sequence (opt3) from hemagglutinin__InfluenzaA__ABR15808
augaaggccagacugcucauccuucugugcgcuuugagcgcaaccgacgccgauacaauuuguauaggcuaccacgcgaacaauuccacugacacgguggauaccgucuuagagaaaaacguuacagugacucauucuguaaaucugcuagaagacucacacaacgggaagcucugcaggcugaaaggaaucgcuccccuucagcuggguaaguguaauauugccggcuggaucuuggggaacccugagugcgaaagucuccugagcaaucgguccuggucuuauauugcagagaccccaaacucggaaaauggaacauguuacccgggcgauuucgccgacuaugaggagcugcgcgaacaacucucaagcgugaguuccuuugagcgauucgaaaucuuucccaaagagcguucuuggccuaagcauaacauaaccagaggugucacugcugcaugcagccacgccaagaaauccucauucuacaagaauuuacuguggcuuacagaggcuaacgggaguuauccaaauuugagcaaaucuuacgugaacaauaaggaaaaagagguucuggugcuauggggaguccaucaccccuccaacaucgaagaucagaggacccucuaucggaaggagaacgccuacgugucaguaguuagcaguaauuacaaccgcagauuuacgccugaaauugcggagaggccaaaggugcggggccaggcaggccgcaugaauuauuacuggacucugcuugagcccggggacaaaaucauuuucgaagccaacggaaaucugaucgcuccuugguaugccuuugcauugucucgaggucucggcuccgggauaauuaccagcaacgcuucgauggaugagugugacacaaagugccagacuccacaaggagccaucaauucuucccugccguuccagaacauucaccccgucaccaucggcgaauguccuaaauacgugagaucaacaaaguuaaggauggugaccggucugcggaauaucccaaguauucagagccgugggcucuuuggagcgauagccggcuucaucgagggcggguggacgggaauggucgaugguugguauggcuaccaucaccagaacgaacaaggguccggauaugcagcugaccagaaaucuacucagaaugccauuaacggcaucacaaauaagguuaacagcgugauagagaaaaugaauacccaguuuacugcuguagguaaggaguucaacaaacuugaaaaacgcauggagaaccugaauaagaaaguggaugacggguuuuuggacauuuggacauacaacgccgaacuacugguccuccuggagaaugaaagaacccuugauuuccaugacucaaacgugaagaaucuguacgagaaaguuaagaaccaauugaggaauaacgcaaaggagaucggcaauggaugcuucgaauuuuaucacaaaugugauaacgagugcauggaaagugugaagaauggcacguacgacuaucccaaauacuccgaggagagcaagcucaaccgggaaaagaucgauggggucaagcuggagucuaugggaguguaucagauuuuagccaucuacucaaccguagcuaguagccugguucuacucgugucccugggugcgauuucuuucuggaugugcucgaauggcagccuucagugucgaauaugcaucuga

SEQ ID NO: 129725 - RNA, 1698 nt, Artificial Sequence; identical to SEQ ID NO: 128790
  derived and/or modified CDS sequence (opt3) from hemagglutinin__InfluenzaA__ABR15885

SEQ ID NO: 129726 - RNA, 1698 nt, Artificial Sequence
  derived and/or modified CDS sequence (opt3) from hemagglutinin__InfluenzaA__ABR15896
augaaggccaaacugcucgugcuucugugcaccuucacagcuacuuacgcagacacgaucuguauuggcuaucacgccaacaauagcaccgauacagucgacacuguuuuggagaagaacgugaccguaacacauuccgugaauuuacuggaagauucucacaacgggaaacuaugccuccugaagggaauagcgccccuucagcuggguaauuguucagucgcuggcuggaucuuggggaacccugagugcgaacuccugauuaguaaagagagcugguccuacaucguggaagccccaaauccggagaacggaaccuguuaucccggcuacuuugcagacuaugaggaacugagagagcaacucucuucgguuagcucauucgaaagguuugagauuuucccuaaggagaguuccuggccaaaucauacugugacaggugucucugccagcugcucccacaacgggaagucaaguuuuuaccggaauuuacuguggcuuaccggaaagaacggcuuguaucccaaucugagcaugucuuacgugaacaauaaggaaaaagagguucuaguacucuggggcgugcaucacccuccaaacaucggggaucagcgcgcucuguaccacacggaaaacgcauaugucuccguggugucaagccauuacagucgacguuucacucccgagauagccaagagaccuaaagucagggaccaggaaggacggaucaauuauuacuggacccuucuggagccaggugauacaauuaucuuugaggcuaacggcaauuugauugccccgugguaugcguucgcacucucucgcggguuuggauccggcaucauaacuagcaacgcccccauggacgaaugugaugcuaagugccagaccccucaaggugccauuaauucgucucugccauuccagaacguucaccccgugacaaucggggaguguccuaaguacguaagauccgcaaaauuaaggauggugaccggacugcggaauauuccaucaauccagagucgcggccucuuuggcgcuaucgccggguucauugaaggagguuggacgggcauggucgacgggugguauggauaccaucaccagaacgagcaaggcagcgguuacgcggccgaucagaaguccacucagaaugcaauaaacgggaucacaaauaaagugaacucuguuauugaaaagaugaauacccaguuuacugcugugggcaaagaguucaacaaacuugagcgaagaauggaaaaucugaacaaaaaggucgacgauggauucuuggacaucuggacauauaacgccgagcuacuggugcuccuggaaaaugagaggacccuugacuuucacgauagcaacguaaagaaucuguacgaaaaaguuaagucacaauugaaaaacaaugcuaaggagauaggcaacgggugcuucgaguuuuaucauaaauguaauaacgaaugcauggagagugugaagaauggaacguacgacuaucccaaguacuccgaagagagcaaacucaaccgggagaagauugauggugucaaacuggaaucuaugggcguguaucagaucuuagccaucuacucaaccgucgcaaguagccuggugcuacucguuucccugggggccauuucuuucuggaugugcucgaauggaagccuucagugucguaucugcauuuga

SEQ ID NO: 129727 - RNA, 1698 nt, Artificial Sequence; identical to SEQ ID NO: 128789
  derived and/or modified CDS sequence (opt3) from hemagglutinin__InfluenzaA__ABR15907

SEQ ID NO: 129728 - RNA, 1698 nt, Artificial Sequence; identical to SEQ ID NO: 128790
  derived and/or modified CDS sequence (opt3) from hemagglutinin__InfluenzaA__ABR15918

SEQ ID NO: 129729 - RNA, 1701 nt, Artificial Sequence
  derived and/or modified CDS sequence (opt3) from hemagglutinin__InfluenzaA__ABR15929
augaagaccaucauugcccugagcuacauacucugccuuguguucgcucagaaacugcccggcaacgacaauuccacagcaacuuuguguuuagggcaccaugccgucccuaacggaacgcugguuaagaccaucacaaaugaucaaauugaggugacuaacgcgaccgaauugguacagucuucaaguacagguagaaucugcgacagcccacaccagauucucgauggcgagaauuguacccugaucgacgcccuucugggggauccgcauugcgacggauuucagaacaaagaaugggauuuguucguggagagguccaaggcuuauucuaauuguuaccccuaugacgucccugauuacgugucgcuccggucacugguugcaagcaguggcacucuggaauuuaacaaugaguccuucaacuggacagguguggcccaaaaugggaccucuagcgcuugcaaacgccgauccgacaagucauuuuucagucgucucaacugguuacaccagcugaaguauaaauacccagcacuuaaugucacgaugcccaacaaugagaaguuugauaaauuguauauauggggagugcaucacccuggcacugacagcgaucagaucucucuguacgcccaggcuuccggcagaguaaccguuucaacaaagaggagccaacagacugugauuccaaacaucgggagucggcccuggguccgcggaauuucuuccagaaucagcauauacuggaccauugugaaaccuggugacauccuacucauuaacucgacaggcaaucugaucgccccaaggggguauuucaagauccggucuggaaaguccucaauuaugcgcagugacgcgccgauaggcaaauguaacagcgaaugcaucacccccaaugguuccauuccuaacgauaagccauuucagaaugugaaccgaaucacguacgggcccuguccuagauaugucaaacagaauacucuuaagcuggcaacaggaaugaggaacguuccagagaaacaaacccggggcauauucggcgccauugcuggguuuaucgaaaauggaugggaggguaugauggacggcugguacggguuccgucaccagaacucugagggaacuggccaggccgcagaucuaaagagcacacaagcugccaucaaucagauuaacgguaaacucaaucgccugaucgaaaagaccaacgagaaguuucaucagauugaaaaagaguucucagaaguggaggggagaauacaggacuuagagaaguauguagaagauacgaaaaucgaccuguggaguuacaaugcggagcuccuuguggcccuggaaaaccaacacaccauugauuugacagacuccgagaugaacaagcuauucgaaaggacuaaaaagcagcugcgggagaaugcagaggauaugggcaacggaugcuuuaagaucuaucauaaauguaauaacgcuugcaucggcagcauucgaaaugggaccuacgaccacgaugucuaccgcgacgaagcccucaacaauagauuccagauaaagggaguggagcugaaaucugguuauaaggacuggauccuuuggauuucauuugcuaucaguugcuuccuguuguguauuguucuccugggcuuuaucaugugggccugccagaaagggaacauaagguguaauaucugcauuuga

SEQ ID NO: 129730 - RNA, 1701 nt, Artificial Sequence
  derived and/or modified CDS sequence (opt3) from hemagglutinin__InfluenzaA__ABR15940
augaagaccaucauugcccugagcuacauacucugccuuguguucgcucagaaacugcccggcaacgacaauuccacagcaacuuuguguuuagggcaccaugccgucccuaacggaacgcugguuaagaccaucacaaaugaucaaauugaggugacuaacgcgaccgaacuuguacagucuucaaguacagguagaaucugcgacagcccacaccagauucucgauggcgagaauuguacccugaucgacgcucuacugggggauccgcauugcgacggauuucagaacaaagaaugggauuuguucguggagagguccaaggccuauucuaauuguuaccccuaugacgucccugauuacgugucgcuccggucacugguugcaagcaguggcacucuggaauuuaacaaugaguccuucaacuggacagguguggcccaaaaugggaccucuagcgcuugcaaacgccgauccgacaagucauuuuucagucgucucaacugguuacaccagcugaaguauaaauacccagcacuuaaugucacgaugcccaacaaugagaaguuugauaaauuguauauauggggagugcaucacccuggcacugacagcgaucagaucucucuguacgcccaggcuuccggcagaguaaccguuucaacaaagaggagccaacagacugugauuccaaacaucgggagucggcccuggguccgcggagugucuuccagaauuagcaucuacuggaccauagugaaaccuggugacauucuacucaucaacucgacaggcaaucugauugccccaaggggguauuucaagauccggucuggaaaguccucaaucaugcgcagugacgcgccgauuggcaaauguaacagcgaaugcauaacccccaaugguuccaucucuaacgauaagccuuuucagaaugucaaccgaauuacguacggggcauguccaagauauguuaaacagaauacucuuaagcuggccacaggaaugaggaacgugcccgagaaacaaacccggggcaucuucggcgcuauagccggguuuauugaaaauggaugggaggguaugauggacggcugguacggguuccgucaccagaacagcgagggaacuggccaggcagcugauuugaagucaacacaagccgcgaucaaucagaucaacgguaaacucaaucgccugauugaaaagaccaacgagaaguuucaucagaucgaaaaagaguucagugaaguagaggggaggauucaggacuuagagaaguauguggaagauacgaaaauagaccugugguccuacaaugccgagcuccuugucgcacuggaaaaccaacacaccaucgauuugacagacagcgagaugaacaagcuauucgaaagaacuaaaaagcagcugcgggagaaugcugaggauaugggcaacggaugcuuuaagauuuaucauaaaugugacaaugccugcaucggcucuauccgaaacgggaccuacgaucacgacguguaccgcgacgaagcucucaauaacagauuccagauuaagggaguugagcugaaaucagguuauaaggauugggugcuuuggauaaguuuugccaucagcugcuuccuguuguguauuguccuccugggcuuuaucaugugggcaugccagaaagggaauauuagguguaacaucugcauauga

SEQ ID NO: 129731 - RNA, 1701 nt, Artificial Sequence; identical to SEQ ID NO: 128610
  derived and/or modified CDS sequence (opt3) from hemagglutinin__InfluenzaA__ABR15951

SEQ ID NO: 129732 - RNA, 1701 nt, Artificial Sequence
  derived and/or modified CDS sequence (opt3) from hemagglutinin__InfluenzaA__ABR15962
augaagaccaucauugcccugagcuacauacucugccuuguguucgcucagaaacugcccggcaacgacaauuccacagcaacuuuguguuuagggcaccaugccgucccuaacggaacgcugguuaagaccaucacaaaugaucaaauugaggugacuaacgcgaccgaacuuguacagucuucaaguacagguagaaucugcgacagcccacaccagauucucgauggcgagaauuguacccugaucgacgcucuacugggggauccgcauugcgacggauuucagaacaaagaaugggauuuguucguggagaggucccgggccuauucuaauuguuaccccuaugacgucccugauuacgugucgcuccgcucacugguugcaagcaguggcacucuggaauuuaacaaugaguccuucaacuggacagguguggcccaaaaugggaccucuagcgcuugcaagcgacguuccgacaaaucauuuuucaguagacucaacugguuacaccagcugaaguauaaguacccagcacuuaaugucacgaugcccaacaaugagaaauuugauaaguuguauauauggggagugcaucacccuggcacugacagcgaucagaucucucuguacgcccaggcuuccggcaggguaaccguuucaacaaaacggagccaacagacugugauuccaaacaucgggagucgccccugggucagaggagugucuuccauuaucagcauauacuggaccauugugaagccuggugacauccuacucauuaacucgacaggcaaucugaucgccccaaggggguauuucaaaauccggucuggaaaguccucaauuaugcgcagugacgcgccgauaggcaaguguaacagcgaaugcaucacccccaaugguuccauuccuaacgauaaaccauuucagaaugucaaccgaaucacguacgggcccuguccuagauauguuaagcagaauacucuuaaacuggcaacaggaaugaggaacgugccagagaagcaaacccggggcauauucggcgccauugcuggguuuaucgaaaauggaugggaggguaugauggacggcugguacggguuccgucaccagaacucugagggaacuggccaggccgcagauuugaaaagcacacaagcugccaucaaucagauuaacgguaagcucaaucgccugaucgagaaaaccaacgaaaaguuucaucagauugaaaaggaguucucagaaguagaggggagaauacaggacuuagagaaauauguggaagauacgaagaucgaccuguggaguuacaaugcggagcuccuugucgcccuggaaaaccaacacaccauugauuugacagacuccgagaugaacaaacuauucgaaaggacuaagaaacagcugcgggagaaugcagaggauaugggcaacggaugcuuuaagaucuaucauaagugugacaaugcuugcaucggcagcauucgaaacgggaccuacgaucacgacguguaccgcgacgaagcccucaauaacagauuccagauaaaaggaguugagcugaagucugguuauaaagauuggauccuuuggauuucauuugcuaucaguugcuuccuguuguguauugugcuccugggcuuuaucaugugggccugccagaaggggaauauaagguguaacaucugcauuuga

SEQ ID NO: 129733 - RNA, 1701 nt, Artificial Sequence
  derived and/or modified CDS sequence (opt3) from hemagglutinin__InfluenzaA__ABR22241
augaagaccaucauugcccugagcuacauacucugccuugcuuucgcacagaaacugcccggcaacgacaauuccacagccacuuuguguuuagggcaccaugcggugccuaacggaacgcuggucaagaccaucacaaaugaucaaauugagguuacuaacgcuaccgagcuagugcagucuucaaguacagguagaaucugcgacagcccacaccagauucucgauggcgaaaauuguacccugaucgacgcccuucugggggauccgcauugcgacggauuucagaacaaagaaugggauuuguucguagagagguccaaggcauauucuaauuguuaccccuaugacgugccugauuacgccucgcuccggucacuggucgcuagcaguggcacucuggaauuuaacaaugaguccuucaacuggacagguguggcacaaaaugggaccucuagcgccugcaaacgccgauccauaaagucauuuuucagucgucucaacugguuacaccagcuggaguauagauacccagcucuuaauguuacgaugcccaacaaugacaaguuugauaaauuguauaucuggggagugcaucacccuagcacugacucugaucagauuuccgucuacgcccaggcgucaggcagggugaccguaagcacaaagcggagucaacagacuguuaucccaaacauuggcucucgccccugggugagagggaucuccagcaggauaucgauuuacuggaccaucgucaaaccuggagacauucugcuaaucaacucuacagguaaucucaucgcaccacggggcuauuucaagauucgcuccgggaaaucaaguauaaugcgaagcgacgccccgaucggaaaguguaacuccgaaugcauuacccccaauggcucuaucccuaacgauaagccauuucagaaugugaacagaauaacguacggugcuugucccagguaugugaaacagaauacucugaaacuugccacagggaugcggaacgucccugagaaacaaacccguggaauuuucggcgcaaucgcuggcuuuaucgaaaaugggugggagggaaugauggacgguugguacggcuuccgccaccagaacagcgaggggacuggacaggccgcggaucugaagucaacacaagccgcaauuaaucagaucaacggcaaauugaauaagcucauugaaaagaccaacgagaaguuucaucagauagaaaaggaguucagugaaguugaggguagaauccaggaccuggagaaauauguggaagauacgaagauugacuuaugguccuacaaugcugagcugcucguagcccuugaaaaccaaaacaccaucgaucugacagacagcgagaugaauaaauuguucgaaaggacucggaagcagcuacgagagaacgcugaggauauggggaauggcugcuuuaaaaucuaucacaagugugacaacgccugcauuggaucuauacgcaauggcaccuacgaucaugacguguacagagacgaagcacugaacaauagguuccagaucaagggggucgagcucaaaucaggauauaaggauuggauucuguggaucaguuuugccauuagcugcuuccuucugugugugguuuugcucgguuuuaucaugugggcuugccagaaaggcaacauacgguguaauaucugcauuuga

SEQ ID NO: 129734 - RNA, 1701 nt, Artificial Sequence; identical to SEQ ID NO: 128698
  derived and/or modified CDS sequence (opt3) from hemagglutinin__InfluenzaA__ABR28515

SEQ ID NO: 129735 - RNA, 1701 nt, Artificial Sequence
  derived and/or modified CDS sequence (opt3) from hemagglutinin__InfluenzaA__ABR28592
augaagaccaucauugcccugagcuacguguucugccucgucuuugcucaggaccuucccggcaacgauaauuccacagcaacucuguguuuggggcaccaugccguuccuaacggaacguuagugaaaaccauaacaaaugaccaaaucgagguaacuaacgcgaccgaacuggugcagucuucaaguacagguaagauuugcgauaauccacacagaauccuagacggcauuaacuguacccucaucgaugcucugcuuggggacccgcauugcgauggauuccagaaugagaaaugggaccuguuugucgaaaggagcaaggccuucuccaacuguuaucccuacgaugugccugacuaugcaucuuugcggucgcucguugccucaagcggcacucuggaguuuauaaaugaagguuucaacuggacaggggugacccagaauggaggcaguuccgcuugcaaacgcggcccagauaacggguuuuucucucgacugaauuggcucuacaagagcggauccacguaucccguccaaaacgugacuaugccuaauaacgacaacucagauaaguuauacaucugggguguacaccauccaaguaccgacaaagagcagacagaccuguauguucaggcaagcggcaaggugacugucucuaccaaacguucccagcaaacagugauucccaauguggggucaagaccuugggucaggggacuuagcagucggguuucuaucuacuggaccauugugaagccaggcgauaucuugguaauaaacuccaaugguaaccugauugccccgcgcggguacuuuaaaaugagaacgggaaagagcucgaucaugaggucugacgcucccauuggcacuuguuccucagagugcaucacaccuaauggcaguaucccaaacgauaagcccuuccagaaugugaacaaaauuaccuauggggccuguccuaaguacgucaaacagaauacucuaaagcucgcgacaggaaugcggaacgugccagaaaaacagacccgcgguauauuuggcgcaaucgccggguucauugagaauggaugggaaggcaugaucgacgguugguauggguuucgacaccaaaacagcgagggcacgggacaggcugccgaucugaaguccacccaggcagcuauagaccaaauuaauggcaaacuuaacagaguuaucgagaagacaaaugaaaaguuccaccagaucgagaaagaguucucugaaguggaagggaggauucaggaucuggagaaguacgucgaggacacuaaaaucgauuuguggagcuauaacgccgaacuccugguggcguuagagaaccagcauaccauugaccugacagauucagaaaugaauaagcucuuugagaaaacucggcgucaacuucgcgaaaacgccgaggacaugggaaaugguugcuucaagauauaccacaagugugacaacgcaugcaucggcaguauuagaaaugggaccuaugaucaugacguauacagggaugaggcucugaacaaucgguuucagaucaaaggaguugaauugaaguccggcuacaaagacuggauccuauggauuagcuucgccauaucuugcuuucugcucugugugguccugcuugguuucaucaugugggcuugccagaaggggaacauucgauguaauaucugcauuuga

SEQ ID NO: 129736 - RNA, 1698 nt, Artificial Sequence; identical to SEQ ID NO: 128790
  derived and/or modified CDS sequence (opt3) from hemagglutinin__InfluenzaA__ABR28768

SEQ ID NO: 129737 - RNA, 1698 nt, Artificial Sequence; identical to SEQ ID NO: 128790
  derived and/or modified CDS sequence (opt3) from hemagglutinin__InfluenzaA__ABR28779

SEQ ID NO: 129738 - RNA, 1701 nt, Artificial Sequence; identical to SEQ ID NO: 129481
  derived and/or modified CDS sequence (opt3) from hemagglutinin__InfluenzaA__ABR28790

SEQ ID NO: 129739 - RNA, 1698 nt, Artificial Sequence; identical to SEQ ID NO: 128790
  derived and/or modified CDS sequence (opt3) from hemagglutinin__InfluenzaA__ABR28801

SEQ ID NO: 129740 - RNA, 1701 nt, Artificial Sequence; identical to SEQ ID NO: 128698
  derived and/or modified CDS sequence (opt3) from hemagglutinin__InfluenzaA__ABR28812

SEQ ID NO: 129741 - RNA, 1701 nt, Artificial Sequence
  derived and/or modified CDS sequence (opt3) from hemagglutinin__InfluenzaA__ABR28823
augaagaccaucauugcccugagcuacauacucugccuuguguucgcucagaaacugcccggcaacgacaauuccacagcaacuuuguguuuagggcaccaugccgucccuaacggaacgcugguuaagaccaucacaaaugaucaaauugaggugacuaacgcgaccgaauugguacagucuucaaguacagguagaaucugcgacagcccacaccagauucucgauggcgagaauuguacccugaucgacgcccuucugggggauccgcauugcgacggauuucagaacaaagaaugggauuuguucguggagagguccaaggcuuauucuaauuguuaccccuaugacgucccugauuacgugucgcuccggucacugguugcaagcaguggcacucuggaauuuaacaaugaguccuucaacuggacagguguggcccaaaaugggaccucuagcgcuugcaaacgccgauccgacaagucauuuuucagucgucucaacugguuacaccagcugaaguauaaauacccagcacuuaaugucacgaugcccaacaaugagaaguuugauaaauuguauauauggggagugcaucacccuggcacugacagcgaucagaucucucuguacgcccaggcuuccggcagaguaaccguuucaacaaagaggagccaacagacugugauuccaaacaucgggagucggcccuggguccgcggaauuucuuccagaaucagcauauacuggaccauugugaaaccuggugacauccuacucauuaacucgacaggcaaucugaucgccccaaggggguauuucaagauccggucuggaaaguccucaauuaugcgcagugacgcgccgauaggcaaauguaacagcgaaugcaucacccccaaugguuccauuccuaacgauaagccauuucagaaugugaaccgaaucacguacgggcccuguccuagauaugucaaacagaauacucuuaagcuggcaacaggaaugaggaacguuccagagaaacaaacccggggcauauucggcgccauugcuggguuuaucgaaaauggaugggaggguaugauggacggcugguacggguuccgucaccagaacucugagggaacuggccaggccgcagaucuaaagagcacacaagcugccaucaaucagauuaacgguaaacucaaucgccugaucgaaaagaccaacgagaaguuucaucagauugaaaaagaguucucagaaguggaggggagaauacaggacuuagagaaguauguagaagauacgaaaaucgaccuguggaguuacaaugcggagcuccuuguggcccuggaaaaccaacacaccauugauuugacagacuccgagaugaacaagcuauucgaaaggacuaaaaagcagcugcgggagaaugcagaggauaugggcaacggaugcuuuaagaucuaucauaaaugugacaaugcuugcaucggcagcauucgaaacgggaccuacgaucacgacgucuaccgcgacgaagcccucaauaacagauuccagauaaagggaguggagcugaaaucugguuauaaggauuggauccuuuggauuucauuugcuaucaguugcuuccuguuguguauuguucuccugggcuuuaucaugugggccugccagaaagggaauauaagguguaacaucugcauuuga

SEQ ID NO: 129742 - RNA, 1698 nt, Artificial Sequence; identical to SEQ ID NO: 128918
  derived and/or modified CDS sequence (opt3) from hemagglutinin__InfluenzaA__ABR28834

SEQ ID NO: 129743 - RNA, 1698 nt, Artificial Sequence; identical to SEQ ID NO: 128889
  derived and/or modified CDS sequence (opt3) from hemagglutinin__InfluenzaA__ABR28845

SEQ ID NO: 129744 - RNA, 1701 nt, Artificial Sequence
  derived and/or modified CDS sequence (opt3) from hemagglutinin__InfluenzaA__ABR28856
augaagaccaucauugcccugagcuacauacucugccuuguguucgcucagaaacugcccggcaacgacaauuccacagcaacuuuguguuuagggcaccaugccgucccuaacggaacgcugguuaagaccaucacaaaugaucaaauugaggugacuaacgcgaccgaacuuguacagucuucaaguacagguagaaucugcgacagcccacaccagauucucgauggcgagaauuguacccugaucgacgcucuacugggggauccgcauugcgacggauuucagaacaaagaaugggauuuguucguggagagguccaaggccuauucuaauuguuaccccuaugacgucccugauuacgugucgcuccggucacugguugcaagcaguggcacucuggaauuuaacaaugaguccuucaacuggacagguguggcccaaaaugggaccucuagcgcuugcaaacgccgauccgacaagucauuuuucagucgucucaacugguuacaccagcugaaguauaaauacccagcacuuaaugucauaaugcccaacaaugagaaguuugauaaauuguauaucuggggagugcaucacccuggcacggacagcgaucagauuucucuguacgcccaggcuuccggcagaguaacuguuucaaccaagaggagccaacagacagugaucccaaacauugggagucggcccuggguccgcggagugucuuccagaaucagcauauacuggacuauugugaaaccuggugacauccuacucauuaacucgaccggcaaucugaucgccccaaggggguauuucaagauccggucuggaaaguccucaauuaugcgcagugacgcgccgauaggcaaauguaacagcgaaugcaucacacccaaugguuccauuccuaacgauaagccauuucagaaugucaaccgaaucaccuacggggcaugucccagauauguuaaacagaagacgcuuaaacuggccacuggaaugaggaaugugccugagaagcaaacacggggcauauucggcgcuauugccggguuuaucgaaaacggaugggaggguaugauggacggcugguacggguuccgucaccaaaauucugagggaaccggccaggcagcugauuugaaaagcacucaggccgcgaucaaccagauuaaugguaagcucaaccgccugaucgaaaagacaaaugagaaauuucaucagauugaaaaggaguucucagaaguagaggggagaauacaggacuuagagaaauauguggaagauaccaagaucgaccuguggaguuacaacgccgagcuccuugucgcacuggaaaaucaacacacgauugauuugaccgacuccgagaugaacaaacuauucgaaaggacaaagaagcagcugcgggagaacgcugaggauaugggcaauggaugcuuuaaaaucuaucauaagugugacaacgccugcaucggcagcauucgaaaugggacuuacgaucacgacguguaccgcgacgaagcucucaacaauagauuccagauaaaaggaguugagcugaagucugguuauaaagauuggauccuuuggauuucauuugccaucaguugcuuccuguuguguauugugcuccugggcuuuaucaugugggcaugccagaaggggaacauaagguguaauaucugcauuuga

SEQ ID NO: 129745 - RNA, 1701 nt, Artificial Sequence; identical to SEQ ID NO: 128655
  derived and/or modified CDS sequence (opt3) from hemagglutinin__InfluenzaA__ABR28867

SEQ ID NO: 129746 - RNA, 1701 nt, Artificial Sequence; identical to SEQ ID NO: 128610
  derived and/or modified CDS sequence (opt3) from hemagglutinin__InfluenzaA__ABR28878

SEQ ID NO: 129747 - RNA, 1698 nt, Artificial Sequence; identical to SEQ ID NO: 129252
  derived and/or modified CDS sequence (opt3) from hemagglutinin__InfluenzaA__ABR28900

SEQ ID NO: 129748 - RNA, 1701 nt, Artificial Sequence
  derived and/or modified CDS sequence (opt3) from hemagglutinin__InfluenzaA__ABR28922
augaagaccaucauugcccugagcuacauacucugccuuguguucgcucagaaacugcccggcaacgacaauuccacagcaacuuuguguuuagggcaccaugccgucccuaacggaacgaucguuaagaccauuacaaaugaucaaaucgaggugacuaacgcgaccgaacugguacagucuucaaguacagguggcauuugcgacagcccacaccagauccuagauggggagaauuguacccucauagacgcucugcuuggagauccgcagugcgacggcuuucaaaacaaaaagugggaucuguucguggaaagauccaaagccuauucuaauuguuaccccuaugacgucccugauuacgcaucguugaggucacucguggccagcagugguacucuggaguuuaacaaugaauccuucaacuggacagggguuacccagaauggaacgucuagcgcuugcaagcggcgcuccaacaauucauuuuucagucgacugaacuggcucacucauuuaaaguuuaaauauccagcacugaaugugaccaugcccaacaacgagaaguucgacaaacuuuacaucuggggcguccaccauccuggcacagauaaugaccagauuagcuuguaugcccaggcuucugggcguaucacuguguccaccaagagaucacaacagacaguaauuccaaacaucggaagcaggccccggguucgcgauauaccuaguagagugucuauuuacuggaccaucgucaaaccaggugacauucugcuaaucaauuccacgggcaaccucaucgccccgaggggguacuuuaagauucggagcggaaagucgucuauaaugcgcuccgacgcgcccaucggcaaauguaauucagagugcauuacuccuaacgguaguaucccaaaugauaagcccuuccagaacgugaaucgaauaacauauggggcauguccuagauacgugaaacagaacacccugaaacuugccacuggaaugaggaaugucccagaaaagcaaacacggggcauuuuuggcgcuaucgccggguucaucgagaacggaugggaagguaugguugacggcugguauggguuucgucaccagaauagcgagggaauuggccaggcagcugaucugaaguccacccaagccgcgaucaaccagauuaaugguaaauugaaccgccucauagggaagacgaacgagaaguuccaccagaucgaaaaagaguucucugaaguggagggcaggauucaggaccuggaaaaguacguagaggauaccaaaaucgacuuauggagcuauaaugccgagcugcucguggcacuugaaaaccaacauacaaucgaucugacugacucagagaugaauaaguuguuugaaagaaccaaaaagcagcuacgggagaacgcugaagauaugggaaauggcugcuucaagauuuaccacaaaugugacaacgccugcauagggaguauccgaaauggaacauaugaucaugacgucuaccgcgacgaggcucugaacaauagauuucagauuaaggguguggagcucaaauccggcuacaaggauuggauccuguggauuagcuucgccaucucuugcuuucuucuguguguugcauugcucggguucauaaugugggccugccagaaaggaaacaucagguguaauauuugcaucuga

SEQ ID NO: 129749 - RNA, 1701 nt, Artificial Sequence; identical to SEQ ID NO: 129629
  derived and/or modified CDS sequence (opt3) from hemagglutinin__InfluenzaA__ABR88080

SEQ ID NO: 129750 - RNA, 1701 nt, Artificial Sequence
  derived and/or modified CDS sequence (opt3) from hemagglutinin__InfluenzaA__ABS00315
augaaggccaaacugcucgugcuucugugcgcuuucaccgcaacagacgccgauacuaucuguauuggcuaccacgcgaacaauagcacggacaccgucgauacaguuuuggagaagaacgugacuguaacccauuccgugaauuuacuggaagacucucacaacgggaaacuaugcagacucaagggaauagcuccccugcagcuugguaauuguucagucgccggcuggauccuggggaacccugagugcgaaaguuuguuuagcaaaaaguccuggucuuauauugcagagacaccaaauucggaaaacggaaccuguuacccgggcuauuucgccgauuacgaggagcucagggaacaacugucaagcgugaguuccuuugagcgguucgaaaucuuucccaaggagucuagcuggccuaaucauacuguuacaaaagguguguccgcuucaugcagucacaaggggcgcagcucuuucuaucgaaaccugcucugguuaaccgagaaaaauggauccuacccaaaccugucaaagagcuaugucaauaacaaagaacgugaggugcuuguauuguggggcguucaucaccccaguaauauuggcgaacagagagcaaucuaccacacggagaacgccuacgugucugucguguccagccauuauaacaggcgguuuacuccugaaauagcuaagcgcccaaaggugagagggcaggagggaaggaucaauuacuauuggacccugcuagagcccggugacacaauuaucuucgaagccaacggcaaucucauugcgccuugguacgcauuugcccugucgcggggguucggaucuggcaucauaacuuccaacgcuucaauggaugagugugacgccaaaugccagaccccacaaggugcaauuaauaguagccuuccguuucagaacguccaccccguuacaaucggggaauguccuaaguaugugcgcuccaccaaacugcgaaugguaacgggauugagaaauauuccaucuauccagagcaggggccucuucggcgcuaucgccggguuuauugagggagguuggacuggcaugauagaugggugguacggauaucaucaccagaacgaacaaggcucagguuacgcggccgaccagaagaguacacagaaugcaaucaacgggauuaccaauaaagugaacuccgucaucgagaagaugaauacucaguucacagcugugggcaaagaguucaacaagcuggaacggcguauggagaauuuaaacaagaaaguugaugacggauuucuggauauauggaccuacaacgccgaacuccuugugcuguuggagaaugaacgcacgcuagacuuccacgacagcaacgucaagaaucuguaugagaaagugaagucucaacucaaaaacaaugcuaaggagauuggcaacgggugcuuugaguucuaccauaaguguaauaacgaaugcauggaaucaguuaaaaauggaaccuaugauuaccccaaguauagugaggagagcaaacugaacagagaaaagaucgacgguguaaaacuugaguccaugggcguguaccagauccuggccauuuauucuacagucgcaucgagcuuggugcuccuggucuccuuaggggccaucucauuuuggaugugcaguaauggaucucugcaguguaggauuugcauauga

SEQ ID NO: 129751 - RNA, 1701 nt, Artificial Sequence
  derived and/or modified CDS sequence (opt3) from hemagglutinin__InfluenzaA__ABS00326
augaaggccaaacugcucgugcuucugugcgcuuucaccgcaacagacgccgauacuaucuguauuggcuaccacgcgaacaauagcacggacaccgucgauacaguuuuggagaagaacgugacuguaacccauuccgugaauuuacuggaagacucucacaacgggaaacuaugcagacucaagggaauagcuccccugcagcuugguaauuguucagucgccggcuggauccuggggaacccugagugcgaaaguuuguuuagcaaaaaguccuggucuuauauugcagagacaccaaauucggaaaacggaaccuguuacccgggcuauuucgccgauuacgaggagcucagggaacaacugucaagcgugaguuccuuugagcgguucgaaaucuuucccaaggagucuagcuggccuaaucauacuguuacaaaagguguguccgcuucaugcagucacaaggggcgcagcucuuucuaucgaaaccugcucugguuaaccgagaaaaauggauccuacccaaaccugucaaagagcuaugucaauaacaaagaaaaggaggugcuuguauuguggggcguucaucaccccaguaauauuggcgaacagcgugcaaucuaccacacggagaacgccuacgugucugucguguccagccauuauaacagaagguuuacuccugaaauagcuaagcggccaaaagugcgcgggcaggagggaagaaucaauuacuauuggacccugcuagagcccggugacacaauuaucuucgaagccaacggcaaucucauugcgccuugguacgcauuugcccugucgaggggguucggaucuggcaucauaacuuccaacgcuucaauggaugagugugacgccaagugccagaccccacaaggugcaauuaauaguagccuuccguuucagaacguccaccccguuacaaucggggaauguccuaaauaugugcgguccaccaagcugcgcaugguaacgggauugcgaaauauuccaucuauccagagcagaggccucuucggcgcuaucgccggguuuauugagggagguuggacuggcaugauagaugggugguacggauaucaucaccagaacgaacaaggcucagguuacgcggccgaccagaaaaguacacagaaugcaaucaacgggauuaccaauaaggugaacuccgucaucgagaaaaugaauacucaguucacagcugugggcaaggaguucaacaagcuggaaaggcggauggagaauuuaaacaaaaagguugaugacggauuucuggauauauggaccuacaacgccgaacuccuugugcuguuggagaaugaacguacgcuagacuuccacgacagcaacgucaaaaaucuguaugagaaggugaaaucucaacucaagaacaaugcuaaggagauuggcaacgggugcuuugaguucuaccauaaauguaauaacgaaugcauggaaucaguaaagaauggaaccuaugauuaccccaaauauagugaggagagcaagcugaaccgcgaaaagaucgacgguguuaaacuugaguccaugggcguguaccagauccuggccauuuauucuacagucgcaucgagcuuggugcuccuggucuccuuaggggccaucucauuuuggaugugcaguaauggaucucugcaguguagaauuugcauauga

SEQ ID NO: 129752 - RNA, 1701 nt, Artificial Sequence; identical to SEQ ID NO: 129688
  derived and/or modified CDS sequence (opt3) from hemagglutinin__InfluenzaA__ABS49899

SEQ ID NO: 129753 - RNA, 1701 nt, Artificial Sequence
  derived and/or modified CDS sequence (opt3) from hemagglutinin__InfluenzaA__ABS49910
augaagaccaucauugcccugagcuacauauucugccucgcucuuggccaggaccugcccgggaacgauaauuccacagcaacuuuguguuuaggacaccaugccgugccuaacgguacgcuggucaaaaccaucacaaaugaccaaauugagguuacuaacgcgaccgaacuugugcagucuucaaguacaggcaagaucugcaauaacccacacaggauucucgaugggaucaauuguacccugauagacgcucuacugggagauccgcauugcgacguauuucaggaugagacuugggacuuguucguggaaagaagcaaagccuuuuccaacuguuaucccuacgaugucccugacuaugcaucucuccggucgcugguggccucaagcggcacacuggaguucaucaccgaagguuuuacguggacugggguuacccagaauggaggcaguaacgcuugcaagcgcggcccaggguccggauucuuuucucgacucaauugguuaacaaaaagcgguuccacuuaccccgugcugaacgucaccaugccuaauaacgauaauuucgacaaguuguauauuuggggcgugcaccauccaucaacaaaccaagagcagaccaguuuguacguacaggcaagcgggcguguuacggugucuacuagaaggucccagcaaacaaucauucccaacaucggaucacggccuuggguccgcggccugagcaguagaauaucuauuuauuggaccaucgugaagccaggugaugugcuagucauuaauuccaacgggaaucucaucgccccgaggggauacuuuaaaaugcggacuggcaagagcucgaucaugcgcucugacgcucccauugacacauguauauccgagugcaucaccccuaacggcucaauuccaaaugauaaacccuuccagaacguuaauaagaucacguacggggccuguccuaaauaugugaagcagaacacccugaaacuugcgacaggaaugcgaaauguaccagaaaagcagacuagaggucuguuuggcgcaauagccggguucauugagaacggaugggaaggcaugaucgacgguugguacggguuuaggcaccaaaauagugagggcaccggacaggcugccgaucuuaagagcacacaggcagcuaucgaccaaauuaacggcaaacucaaucgggugaucgagaagacuaacgaaaaauuccaccagauugagaaggaguucuccgaagucgaagggcguauacaggaucuggagaaauauguggaggacaccaagaucgauuuauggucuuacaaugccgaacugcucguugcgcuugagaaccagcauacaauugaccugaccgauagcgaaaugaacaaguuguuugagaaaacucgcagacaaaugagggaaaaugccgaggacaugggaaacgguugcuucaagaucuaucacaaaugugauaaugcaugcaucgagucaauucggaacggcacguacgaccaugacguguaucgagaugaagcucuaaauaaccgcuuucagauaaagggggucgagcugaaaaguggauacaaggacuggauccucuggauuuccuucgccaucagcugcuuucugcuuugugugguacuguugggcuucauuaugugggcuugccagagagguaauaucagguguaacauaugcaucuga

SEQ ID NO: 129754 - RNA, 1701 nt, Artificial Sequence; identical to SEQ ID NO: 128698
  derived and/or modified CDS sequence (opt3) from hemagglutinin__InfluenzaA__ABS49965

SEQ ID NO: 129755 - RNA, 1698 nt, Artificial Sequence
  derived and/or modified CDS sequence (opt3) from hemagglutinin__InfluenzaA__ABS49976
augaaggugaaacugcucguccuucugugcaccuucacagccacuuacgcugacacgaucuguauuggcuaucacgcaaacaauagcaccgauacaguugacacuguguuggagaagaacguaaccgugacacauuccgucaauuuacuggaagauucucacaacgggaaacuaugccuccugaagggaauagcgccccuucagcuggguaauuguucaguggccggcuggaucuuggggaacccugagugcgaacuccugauuaguaaagagagcugguccuacaucguugaaaccccaaauccggagaacggaacuuguuaucccggcuacuuugcugacuaugaggaacugagagagcaacucucuucggugagcucauucgaaagguuugagauuuucccuaaggagaguuccuggccaaaucauacagucaccggugugucugccagcugcucccacaacgggaagucaaguuuuuaccggaauuuacuguggcuuacgggcaaaaacggauuguaucccaaucugagcaagucuuacgcaaacaauaaagaaaaggaggugcuaguucucuggggcgugcaucacccuccaaacaucgggaaccagcgcgcccuguaccacacugaaaaugcuuaugucuccguggugucaagccauuacagucgacguuucacccccgagauagcaaaaagaccuaaggucagggaucaggaaggacggaucaacuauuacuggacacuucuggagccaggugacacuauuaucuuugaggccaauggcaacuugauugcuccgcgcuaugccuucgcgcucucuagaggguuuggauccggcaucauaaccagcaaugcacccauggaugaaugugacgccaagugccagacaccucaaggugcuauuaacucgucucugccauuccagaauguucaccccgugaccaucggggaguguccuaaauacguaagguccgccaaguuacggauggugacgggacugcgcaacauuccaucaauccagagucgaggccucuuuggcgcaaucgcuggguucauugaaggagguuggacuggcauggucgaugggugguauggauaccaucaccagaaugagcaaggcagcgguuacgccgcggaccagaaauccacacagaacgccauaaaugggaucaccaacaagguaaauucuguuauugaaaagaugaacacucaguuuacagcagugggcaaagaguucaauaaacuugagagaaggauggaaaaccugaacaagaaggucgaugacggauucuuggauaucuggaccuauaaugcugagcuacuggugcuccuggaaaacgagcggacgcuugacuuucacaauagcaacguuaaaaaucuguacgaaaagguaaaaucacaauugaagaacaaugccaaagagauaggcaacgggugcuucgaguuuuaucauaaguguaauaacgaaugcauggagagugugaagaauggaaccuacgacuaucccaaauacuccgaagagagcaagcucaaccgugagaaaauugauggugucaagcuggaaucuaugggcguguaucagaucuuagcuaucuacucaacagucgccaguagccuggugcuacucguuucccugggggcaauuucuuucuggaugugcucgaauggaagccuucagugucgcaucugcauuuga

SEQ ID NO: 129756 - RNA, 1698 nt, Artificial Sequence
  derived and/or modified CDS sequence (opt3) from hemagglutinin__InfluenzaA__ABS49987
augaaggugaaacugcucguccuucugugcaccuucacagccacuuacgcugacacgaucuguauuggcuaucacgcaaacaauagcaccgauacaguugacacuguguuggagaagaacguaaccgugacacauuccgucaauuuacuggaagauucucacaacgggaaacuaugccuccugaagggaauagcgccccuucagcuggguaauuguucaguggccggcuggaucuuggggaacccugagugcgaacuccugauuaguaaagagagcugguccuacaucguugaaaccccaaauccggagaacggaacuuguuaucccggcuacuuugcugacuaugaggaacugagagagcaacucucuucggugagcucauucgaaagguuugagauuuucccuaaggagaguuccuggccaaaucauacagucaccggugugucugccagcugcucccacaacgggaagucaaguuuuuaccggaauuuacuguggcuuacgggcaaaaacggauuguaucccaaucugagcaagucuuacgcaaacaauaaagaaaaggagguucuaguacucuggggcgugcaucacccuccaaacaucggggaucagcgcgcccuguaccacacugaaaacgcuuaugucuccguggugucaagccauuacagucgacguuucacccccgagauagcaaaaagaccuaaggucagggaccaggaaggacggaucaauuauuacuggacacuucuggagccaggugauacuauuaucuuugaggccaacggcaauuugauugcuccgcgcuaugccuucgcgcucucuagaggguuuggauccggcaucauaaccagcaacgcacccauggacgaaugugaugccaagugccagacaccucaaggugcuauuaauucgucucugccauuccagaacguucaccccgugaccaucggggaguguccuaaauacguaagguccgccaaguuacggauggugacgggacugcgcaauauuccaucaauccagagucgaggccucuuuggcgcaaucgcuggguucauugaaggagguuggacuggcauggucgacgggugguauggauaccaucaccagaacgagcaaggcagcgguuacgccgcggaucagaaauccacacagaaugccauaaacgggaucaccaauaaggugaacucuguuauugaaaagaugaauacucaguuuacagcagugggcaaagaguucaacaaacuugagagaaggauggaaaaucugaacaagaaggucgacgauggauucuuggacaucuggaccuauaacgcugagcuacuggugcuccuggaaaaugagcggacgcuugacuuucacgauagcaacaugaaaaaucuguacgaaaagguaaaaucacaauugaagaacaaugccaaagagauaggcaacgggugcuucgaguuuuaucauaaguguaauaacgaaugcauggagaguguuaagaauggaaccuacgacuaucccaaauacuccgaagagagcaagcucaaccgugagaaaauugauggugugaagcuggaaucuaugggcgucuaucagaucuuagcuaucuacucaacaguggccaguagccugguccuacucgugucccugggggcaauuucuuucuggaugugcucgaauggaagccuucagugucgcaucugcauuuga

SEQ ID NO: 129757 - RNA, 1701 nt, Artificial Sequence
  derived and/or modified CDS sequence (opt3) from hemagglutinin__InfluenzaA__ABS49998
augaagaccaucauugcccugagcuacauacucugccuuguguucgcucagaaacugcccggcaacgacaauuccacagcaacuuuguguuuagggcaccaugccgucccuaacggaacgcugguuaagaccaucacaaaugaucaaauugaggugacuaacgcgaccgaacuuguacagucuucaaguacagguggcaucugcgacagcccacaccagauucucgauggggagaauuguacccugaucgacgcucuacugggagauccgcauugcgacggcuuucagaacaaagaaugggauuuguucguggagagauccaaggccuauucuaauuguuaccccuaugacgucccugauuacgcaucgcucaggucacugguggccagcagugguacucuggaauuuaacaaugaguccuucaacuggacagggguugcucaaaauggaaccucuagcgcaugcaaacggcgcuccaacaagucauuuuucagucgacucaauugguuacaccagcugaaguauaaauacccagcccuuaacgugauaaugcccaauaacgagaaguuugacaaauuguauaucuggggcguccaucacccuagcacggauucugaccagauuucccuguacgcucaggccccaggccgugugacuguaucaaccaagagaagccaacagacaguuauccccaacauugggaguaggccuugggugcggggagucucuucccgcaucagcauauacuggacuauugugaaaccaggugauauccuacucauuaauuguaccggcaaccugaucgcgccgagaggguauuucaagaucaggucgggaaagucuuccauuaugcggucagacgcaaguauaggcaaaugcaauagcgaauguaucacacccaacgguuccauuccuaaugacaagccauuucagaacgugaaucgcaucaccuacggggccugcccccgauaugucaaacagaacacgcuuaagcuggcuacuggaaugagaaauguuccugagaaacaaacaaggggcauauucggcgccauugcaggguuuaucgaaaacggaugggaggguaugguggauggcugguacggguuccggcaccaaaauucugagggaaccggccaggcugccgacuugaaaagcacucaggcggccaucaaccagauuaaugguaaacucaaccgucugaucgaaaagacaaaugagaaguuucaucagauugaaaaagaguucucagaaguagaggggcgcauacaggauuuagagaaguauguggaagacaccaaaaucgaucuguggaguuacaacgcagagcuccuugucgcucuggaaaaccaacacacgauugacuugaccgauuccgagaugaauaagcuauucgaaagaacaaagaagcagcugagggagaacgccgaggacaugggcaauggauguuuuaagaucuaucauaaaugcgauaacgcuugcaucggcagcauucggaaugggacuuacgaccacgauguguaccgagacgaagcccucaacaaucgcuuccagauaaagggaguugagcugaaaucugguuauaaggacuggauccuuuggauuucauuugcaaucaguuguuuccuguugugcgugguccuccugggcuuuauuaugugggccugucagaaagggaacaucagaugcaauauauguaucuga

SEQ ID NO: 129758 - RNA, 1701 nt, Artificial Sequence
  derived and/or modified CDS sequence (opt3) from hemagglutinin__InfluenzaA__ABS50009
augaagaccaucauugcccugagcuacauacucugccuuguguucgcucagaaacugcccggcaacgacaauuccacagcaacuuuguguuuagggcaccaugccgucccuaacggaacgcugguuaagaccaucacaaaugaucaaauugaggugacuaacgcgaccgaacuuguacagucuucaaguacagguggcaucugcgacagcccacaccagauucucgauggggagaauuguacccugaucgacgcucuacugggagauccgcauugcgacggcuuucagaacaaagaaugggauuuguucguggagagauccaaggccuauucuaauuguuaccccuaugacgucccugauuacgcaucgcucaggucacugguggccagcagugguacucuggaauuuaacaaugaguccuucaacuggacagggguugcucaaaauggaaccucuagcgcaugcaaacggcgcuccaacaagucauuuuucagucgacucaauugguuacaccagcugaaguauaaauacccagcccuuaacgugacgaugcccaauaacgagaaguuugacaaauuguauauauggggcguccaucacccuagcacugauucugaccagaucucccuguacgcucaggccccaggccgugugaccguaucaacaaagagaagccaacagacuguuauucccaacaucgggaguaggccuugggugcggggagucucuuccaaaauuagcaucuacuggaccauagugaagccaggugauauucuacucaucaauuguacaggcaaccugauugcgccgcgcggguauuucaagaucagaucgggaaaaucuuccaucaugaggucagacgcaaguauuggcaagugcaauagcgaauguauaacccccaacgguuccaucccuaaugacaaaccauuucagaacgugaaucggauuacguacggggccugcccccgcuaugucaagcagaacacucuuaaacuggcuacaggaaugcgaaauguuccugagaagcaaaccagaggcaucuucggcgccauagcaggguuuauugaaaacggaugggaggguaugguggauggcugguacggguucaggcaccaaaauucugagggaacuggccaggcugccgacuugaaaagcacacaggcggccaucaaccagaucaaugguaagcucaaccggcugauugaaaagaccaaugagaaauuucaucagaucgaaaaggaguucucagaaguagaggggcguauucaggauuuagagaaauauguggaagacacgaagauagaucuguggaguuacaacgcagagcuccuugucgcucuggaaaaccaacacaccaucgacuugacagauuccgagaugaauaaacuauucgaacgcacuaagaagcagcugagagagaacgccgaggacaugggcaauggauguuuuaaaauuuaucauaagugcgauaacgcuugcaucggcagcaucaggaaugggaccuacgaccacgauguguaccgggacgaagcccucaacaaucgauuccagauuaaaggaguugagcugaagucugguuauaaagacuggauacuuuggaucucauuugcaauuaguuguuuccuguugugcgugguccuccugggcuuuaucaugugggccugucagaaggggaacauucgcugcaauaucuguauauga

SEQ ID NO: 129759 - RNA, 1701 nt, Artificial Sequence; identical to SEQ ID NO: 128758
  derived and/or modified CDS sequence (opt3) from hemagglutinin__InfluenzaA__ABS50020

SEQ ID NO: 129760 - RNA, 1701 nt, Artificial Sequence
  derived and/or modified CDS sequence (opt3) from hemagglutinin__InfluenzaA__ABS50031
augaagaccaucauugcccugagcuacaugcucugccuuguguucgcucagaaacugcccggcaacgacaauuccacagcaauguuguguuuagggcaccaugccgucccuaacggaacucugguuaagacgauaaccaaugaucaaaucgaggugacaaacgcgacugaacuuguacagucuucaaguaccgguggcauuugcgacagcccacaccagauccucgauggggagaauuguacacugauugacgcucuacugggagauccgcauugcgacggcuuucagaacaaagaaugggauuuguucguggagagauccaaggccuauucuaauuguuaccccuaugacgucccugauuacgcaucgcucaggucacugguggccagcagugguacccuggaauuuaacaaugaguccuucaacuggacugggguugcucaaaauggaacaucuagcgcaugcaaacggcgcuccaacaagucauuuuucagucgacucaauugguuacaccagcugaaguauaaauacccagcccuuaacgugaccaugcccaauaacgagaaguuugacaaauuguauaucuggggcguccaucacccuagcacggauucugaccagauaucccuguacgcucaggccccaggccgugugacuguaucaaccaagagaagccaacagacaguuauccccaacauugggaguggaccuugggugaggggugucucuucccggaucagcauuuacuggacuaucgugaaaccaggcgauauacuacucauuaauuguaccgggaaccugaucgcgccgcgcggauauuucaagauuagaucgggcaagucuuccaucaugaggucagacgcaaguaucgguaaaugcaauagcgaauguauuacacccaacggguccauaccuaaugacaagccauuucagaacgugaaucggaucaccuacggagccugcccccgcuaugucaaacagaacacgcuuaagcuggcuacuggcaugcgaaauguuccugagaaacaaacaagaggcauuuucggggccaucgcaggauuuauagaaaacgguugggagggcaugguggaugggugguacggauucaggcaccaaaauucugagggcaccggucaggcugccgacuugaaaagcacucaggcggccauuaaccagaucaaugggaaacucaaccggcugaucgaaaagacaaaugagaaguuucaucagauugaaaaagaguucucagaaguagagggccguauccaggauuuagagaaguauguggaagacaccaaaauugaucuguggaguuacaacgcagagcuccuugucgcucuggaaaaccaacacacgauagacuugaccgauuccgagaugaauaagcuauucgaacgcacaaagaagcagcugagagagaacgccgaggacaugggaaauggcuguuuuaagaucuaucauaaaugcgauaacgcuugcauugggagcaucaggaauggaacuuacgaccacgauguguaccgggacgaagcccucaacaaucgauuccagaucaaggguguugagcugaaaucuggcuauaaggacuggauucuuuggauaucauuugcaaucaguuguuuccuguugugcgugguccuccugggguuuauuaugugggccugucagaaaggaaacauccgcugcaauauuuguaucuga

SEQ ID NO: 129761 - RNA, 1701 nt, Artificial Sequence; identical to SEQ ID NO: 128099
  derived and/or modified CDS sequence (opt3) from hemagglutinin__InfluenzaA__ABS50042

SEQ ID NO: 129762 - RNA, 1701 nt, Artificial Sequence; identical to SEQ ID NO: 129741
  derived and/or modified CDS sequence (opt3) from hemagglutinin__InfluenzaA__ABS50053

SEQ ID NO: 129763 - RNA, 1701 nt, Artificial Sequence
  derived and/or modified CDS sequence (opt3) from hemagglutinin__InfluenzaA__ABS50064
augaagaccaucauugcccugagcuacauacucugccuuguguucgcucagaaacugcccggcaacgacaauuccacagcaacuuuguguuuagggcaccaugccgucccuaacggaacgcugguuaagaccaucacaaaugaucaaauugaggugacuaacgcgaccgaacuuguacagucuucaaguacagguagaaucugcgacagcccacaccagauucucgauggcgagaauuguacccugaucgacgcucuacugggggauccgcauugcgacggauuucagaacaaagaaugggauuuguucguggagagguccaaggccuauucuaauuguuaccccuaugacgucccugauuacgugucgcuccggucacugguugcaagcaguggcacucuggaauuuaacaaugaguccuucaacuggacagguguggcccaaaaugggaccucuagcgcuugcaaacgccgauccgacaagucauuuuucagucgucucaacugguuacaccagcugaaguauaaauacccagcacuuaaugucacgaugcccaacaaugagaaguuugauaaauuguauauauggggagugcaucacccuggcacugacagcgaucagaucucucuguacgcccaggcuuccggcagaguaaccguuucaacaaagaggagccaacagacugugauuccaaacaucgggagucggcccuggguccgcggagugucuuccagaauuagcaucuacuggaccauagugaaaccuggugacauucuacucaucaacucgacaggcaaucugauugccccaaggggguauuucaagauccggucuggaaaguccucaaucaugcgcagugacgcgccgauuggcaaauguaacagcgaaugcauaacccccaaugguuccaucccuaacgauaagccauuucagaaugucaaccgaauuacguacgggcccuguccuagauauguuaaacagacuacacuuaagcuggcaaccggaaugaggaaugugccagagaaacaaacucggggcaucuucggcgccauagcuggguuuauugaaaacggaugggaggguaugauggacggcugguacggguuccgucaccagaauagcgagggaacaggccaggccgcagauuugaagucuacccaagcugccaucaaccagaucaaugguaaacucaaccgccugauugaaaagacgaaugagaaguuucaucagaucgaaaaagaguucucagaaguagaggggaggauucaggacuuagagaaguauguggaagauaccaaaauagaccuguggaguuacaacgcggagcuccuugucucccuggaaaaucaacacacaaucgauuugacugacagcgagaugaacaagcuauucgaaagaaccaaaaagcagcugcgggagaacgccgaggauaugggcaauggaugcuuuaagauuuaucauaaaugugacaacgcaugcaucggcucuauccgaaaugggacauacgaucacgacguguaccgcgacgaagcucucaacaauagauuccagauuaagggaguugagcugaaaucagguuauaaggauuggauacuuuggaucaguuuugccauuagcugcuuccuguuguguaucgugcuccugggcuuuauuaugugggcuugccagaaagggaacaucagguguaauauaugcaucuga

SEQ ID NO: 129764 - RNA, 1701 nt, Artificial Sequence
  derived and/or modified CDS sequence (opt3) from hemagglutinin__InfluenzaA__ABS50075
augaagaccaucauugcccugagcuacauacucugccuuguguucgcucagaaacugcccggcaacgacaauuccacagcaacuuuguguuuagggcaccaugccgucccuaacggaacgaucguuaagaccauuacaaaugaucaaaucgaggugacuaacgcgaccgaacugguacagucuucaaguacagguggcauuugcgacagcccacacaaaauccuagauggggagaauuguacccucauagacgcucugcuuggagauccgcagugcgacggcuuucagaacaagaaaugggaucuguucguggaaagauccaaggccuauucuaauuguuaccccuaugacgucccugauuacgcaucguugaggucacucaucgccagcagugguacucuggaguuuaacaaugaauccuucaacuggacaggggugacccaaaauggaacgucuagcgcuugcaagcggcgcuccaacucaaguuucuucagccgacugaauuggcucacucauuuaaaauuuaaguauccagcacugaacguuaccaugcccaauaacgaggaguucgacaaacuuuacauuuggggcgugcaccauccuggcacauauaacgaucagaucucuuuguacgcccaggcuuccgggcguauuacugucucaaccaagagaagccagcaaacagugaucccaaauauaggaaguaggccccggguacgcgacauuccuucuagaaucuccauuuacuggaccaucguuaaaccaggugauauccugcuaauuaacagcacgggcaaucucauagccccgaggggguauuuuaagauccggucgggaaagucuuccauuaugcgcucagacgcgcccaucggcaaauguaacagugaaugcauaacuccuaaugguagcauuccaaacgacaagcccuuccagaaugugaaccgaaucacauacggggcauguccuagauaugucaaacagaauacccugaaacuugccacuggaaugaggaacgugccagagaagcagacacggggcaucuuuggcgcuauugccggguucaucgaaaauggaugggaggguaugguggauggcugguacggguuucgucaccaaaacuccgagggaauuggccaggcagcugaccugaagucuacccaggccgcgauagaucaaaucaaugguaaauugaaccgccucauugggaagacgaaugaaaaguuccaccagaucgagaaagaauuuagcgaggucgaaggcagaauccaggaccuggagaaguauguugaggauaccaaaauugacuuauggucauacaacgccgaacugcucguggcacuugagaaccagcauacaauagaucugacugacagugaaaugaauaaguuguuugagaggaccaaaaagcaacuacgggaaaacgcugaggauaugggaaauggcugcuucaagaucuaucacaaaugugacaacgccugcauuggguccauccgaaauggaacauacgaucaugacguauaccgcgacgaggcucugaacaauagauuucagauuaaggguguggaacucaaaagcggcuauaaggauuggauccuguggauaucuuucgccaucucaugcuuucuucugugugucgcauugcucggguucauuaugugggccugccagaaaggaaacaucagguguaauauuugcaucuga

SEQ ID NO: 129765 - RNA, 1698 nt, Artificial Sequence
  derived and/or modified CDS sequence (opt3) from hemagglutinin__InfluenzaA__ABS71665
augaaggugaaacugcucguccuucugugcaccuucacagccacuuacgcugacacgaucuguauuggcuaucacgcaaacaauagcaccgauacaguugacacuguguuggagaagaacguaaccgugacacauuccgucaauuuacuggaagauucucacaacgggaaacuaugccuccugaagggaauagcgccccuucagcuggguaauuguucaguggccggcuggaucuuggggaacccugagugcgaaagucucauuagcagagaguccuggucuuacaucguugaaaaaccaucgccggagaauggaaccuguuaucccggccauuuugcugacuacgaggaacugagggagcaacugucaagcgugaguuccuucgaacgguuugagauuuucccuaaggagucuagcuggccaaaccacacugccacaggugucuccgcaucaugcagucauaauggggaaagcucuuuuuauaagaaccucuuauggcugaccggcaaaaauggacuuuaccccaacuuguccaagucauaugccaauaacaaagagaaggaagugcugguacuauggggcguucaccacccuccaaauaucggggaucagcgcgcucucuaccauacggagaacgcauacgugagcgucgugaguucucacuauucccgaaaauucacucccgaaauagccaagcguccuaaggugagagaccaggagggaaggaucagcuacuauuggacccugcuugagccaggugauacaauuaucuuugaagcuaacggcaaucugauugccccgcgguacgcguucgcauugucgcgcggguuuggaucuggcaucauaaacuccaaugcccccauggacgagugugaugcuaaaugccagacuccucaaggugccauuaacucaagucucccauuccagaauguccaucccguuaccaucggggaauguccuaaguaugugagaagcgcaaaacugaggaugguaacaggauuacggaacauuccauccauccagucucgcggccuguuuggcgcuaucgccggguucauugagggagguuggaccggcaugguggacgggugguacggauaucaccaccagaaugaacaaggcagcgguuacgcggccgaucagaagucaacgcagaacgcaauaaaugggaucacuaacaaagucaauagugugauugagaagaugaacacacaguuuaccgcuguuggcaaagaguucaauaagcucgaacgaagaauggagaaccuuaauaagaaaguggacgauggauucaucgacauauggacuuacaacgccgaacuguugguccuacuggagaacgaaaggacacucgacuuucaugauuccaaugugaagaaccuguaugagaaaguaaagagccaacuuaaaaauaacgcuaaggagauuggcaaugggugcuucgaauuuuaccacaaguguaacgacgagugcauggaaucuguuaaaaauggaaccuaugauuaccccaaguauucagaggagaguaaacugaaccgggaaaagaucgacggugugaaauuggagagcaugggcgucuaccagauccucgccauuuauuccacgguggcaucuucgcuggucuuacuggugagccuaggggccaucuccuucuggaugugcucaaauggaagucuccagugucguauuugcauauga

SEQ ID NO: 129766 - RNA, 1698 nt, Artificial Sequence
  derived and/or modified CDS sequence (opt3) from hemagglutinin__InfluenzaA__ABS71666
augaaggugaaacugcucguccuucugugcaccuucacagccacuuacgcugacacgaucuguauuggcuaucacgcaaacaauagcaccgauacaguugacacuguguuggagaagaacguaaccgugacacauuccgucaauuuacuggaagauucucacaacgggaaacuaugccuccugaagggaauagcgccccuucagcuggguaauuguucaguggccggcuggaucuuggggaacccugagugcgaaagucucauuagcagagaguccuggucuuacaucguugaaaaaccaucgccggagaauggaaccuguuaucccggccauuuugcugacuacgaggaacugagggagcaacugucaagcgugaguuccuucgaacgguuugagauuuucccuaaggagucuagcuggccaaaccacacugccacaggugucuccgcaucaugcagucauaaugggaaaagcucuuuuuauaaaaaccucuuauggcugaccggaaagaauggccuuuaccccaacuuguccaaaucauaugccaauaacaaggaaaaagaggugcugguacuauggggcguucaccacccuccaaauaucggggaucagcgcgcucucuaccauacggaaaacgcauacgugagcgucgugaguucucacuauucccgaaaguucacucccgagauagccaagcguccuaaagugagagaccaggaaggaaggaucagcuacuauuggacccugcuugagccaggugauacaauuaucuuugaggcuaacggcaaucugauugccccgcgguacgcguucgcauugucgcgcggguuuggaucuggcaucauaaacuccaaugcccccauggacgaaugugaugcuaagugccagacuccucaaggugccauuaacucaagucucccauuccagaauguccaucccguuaccaucggggaguguccuaaauaugugagaagcgcaaagcugaggaugguaacaggauuacggaacauuccauccauccagucucgcggccuguuuggcgcuaucgccggguucauugaaggagguuggaccggcaugguggacgggugguacggauaucaccaccagaaugagcaaggcagcgguuacgcggccgaucagaaaucaacgcagaacgcaauaaaugggaucacuaacaaggucaauagugugauugaaaagaugaacacacaguuuaccgcuguuggcaaggaguucaauaagcucgagcgaagaauggaaaaccuuaauaaaaagguggacgauggauucaucgacauauggacuuacaacgccgagcuguugguccuacuggaaaacgagaggacacucgacuuucaugauuccaaugugaaaaaccuguaugaaaagguaaaaagccaacuuaagaauaacgcuaaggagauuggcaaugggugcuucgaguuuuaccacaaauguaacgacgaaugcauggagucuguuaagaauggaaccuaugauuaccccaaauauucagaagagaguaagcugaaccgggagaaaaucgacggugugaaguuggaaagcaugggcgucuaccagauccucgccauuuauuccacgguggcaucuucgcuggucuuacuggugagccuaggggccaucuccuucuggaugugcucaaauggaagucuccagugucguauuugcauauga

SEQ ID NO: 129767 - RNA, 1698 nt, Artificial Sequence
  derived and/or modified CDS sequence (opt3) from hemagglutinin__InfluenzaA__ABS71667
augaaggugaaacugcucguccuucugugcaccuucacagccacuuacgcugacacgaucuguauuggcuaucacgcaaacaauagcaccgauacaguugacacuguguuggagaagaacguaaccgugacacauuccgucaauuuacuggaagauucucacaacgggaaacuaugccuccugaagggaauagcgccccuucagcuggguaauuguucaguggccggcuggaucuuggggaacccugagugcgaaagucucauuagcagagaguccuggucuuacaucguugaaaaaccaucgccggagaauggaaccuguuaucccggccauuuugcugacuacgaggaacugagggagcaacugucaagcgugaguuccuucgaacgguuugagauuuucccuaaggagucuagcuggccaaaccacacugccacaggugucuccgcaucaugcagucauaaugggaaaagcucuuuuuauaaaaaccucuuauggcugaccggaaagaauggccuuuaccccaacuuguccaaaucauaugccaauaacaaggaaaaagaggugcugguacuauggggcguucaccacccuccaaauaucggggaucagcgcgcucucuaccauacggaaaacgcauacauaagcguggucaguucucacuauucccgaaaguucacucccgagaucgccaagcguccuaaagugagagaccaggaaggaaggauuagcuacuauuggacccugcuugagccaggugauacaaucauuuuugaggcuaacggcaaucugaucgccccgcgguacgcguucgcauugucgcgcggguuuggaucuggcauaauuaacuccaaugcccccauggacgaaugugaugcuaagugccagacuccucaaggugccaucaacucaagucucccauuccagaaugugcaucccgucaccauuggggaguguccuaaauauguuagaagcgcaaagcugaggauggugacaggauuacggaacaucccauccauccagucucgcggccuguuuggcgcuauugccggguucauagaaggagguuggaccggcaugguagacgggugguacggauaucaccaccagaaugagcaaggcagcgguuacgcggccgaucagaaaucaacgcagaacgcaaucaaugggauuacuaacaaggugaauagugucaucgaaaagaugaacacacaguuuaccgcugugggcaaggaguucaauaagcucgagcgaagaauggaaaaccuuaauaaaaagguugacgauggauucauagacauuuggacuuacaacgccgagcuguuggugcuacuggaaaacgagaggacacucgacuuucaugauuccaaugucaaaaaccuguaugaaaaggugaaaagccaacuuaagaauaacgcuaaggagaucggcaaugggugcuucgaguuuuaccacaaauguaacgacgaaugcauggagucuguaaagaauggaaccuaugauuaccccaaauauucagaagagaguaagcugaaccgggagaaaaucgacgguguuaaguuggaaagcaugggcguguaccagauucucgccaucuauuccacggucgcaucuucgcugguguuacuggucagccuaggggccauuuccuucuggaugugcucaaauggaagucuccagugucguauaugcaucuga

SEQ ID NO: 129768 - RNA, 1698 nt, Artificial Sequence
  derived and/or modified CDS sequence (opt3) from hemagglutinin__InfluenzaA__ABS71668
augaaggugaaacugcucguccuucugugcaccuucacagccacuuacgcugacacgaucuguauuggcuaucacgcaaacaauagcaccgauacaguugacacuguguuggagaagaacguaaccgugacacauuccgucaauuuacuggaagauucucacaacgggaaacuaugccuccugaagggaauagcgccccuucagcuggguaauuguucaguggccggcuggaucuuggggaacccugagugcgaaagucucauuagcagagaguccuggucuuacaucguugaaaaaccaucgccggagaauggaaccuguuaucccggccauuuugcugacuacgaggaacugagggagcaacugucaagcgugaguuccuucgaacgguuugagauuuucccuaaggagucuagcuggccaaaccacacugccuccggugucucagcaaguugcagccauaaugggaagucuuccuuuuauaaaaaccucuuauggcugacaggaaagaauggccuuuaccccaacuugucaaaaagcuaugccaauaacaaggaaaaagaggugcugguacuauggggcguucaccacccuccaaauaucggggaucagcgcgcucucuaccauaccgaaaacgcauacgugagugucgugucuucccacuauagccgaaaguucacgcccgagauagccaagcguccuaaagugagagaccaggaaggaaggaucaacuacuauuggacucugcuugagccaggugauaccauuaucuuugaggcuaauggcaaccugauugccccgcgguacgcguucgcauugucgcgcggguuuggaucuggcaucauaaauuccaacgcccccauggacgaaugugaugcuaagugccagacaccucaaggugccauuaauucaagucucccauuccagaacguccaucccguuacuaucggggaguguccuaaauaugugagaagcgcaaagcugaggaugguaaccggauuacggaauauuccauccauccagucucgcggccuguuuggcgcuaucgccggguucauugaaggagguuggacaggcaugguggacgggugguacggauaucaccaccagaacgagcaaggcagcgguuacgcggccgaucagaaaucaacccagaaugcaauaaacgggaucacgaauaaggucaacagugugauugaaaagaugaauacucaguuuacagcuguuggcaaagaguucaacaagcucgagcgaagaauggaaaaucuuaacaaaaagguggacgauggauucaucgacauauggaccuacaacgccgagcuguugguccuacuggaaaaugagaggacucucgacuuucaugauuccaacgugaaaaaucuguaugaaaagguaaaaagccaacuuaagaacaaugcuaaggagauuggcaacgggugcuucgaguuuuaccacaaauguaaugacgaaugcauggagucuguuaagaacggaacauaugauuaccccaaauauucagaagagaguaagcugaaucgggagaaaaucgacggugugaaguuggaaagcaugggcgucuaccagauccucgccauuuauuccaccguggcaucuucgcuggucuuacuggugagccuaggggccaucuccuucuggaugugcucaaacggaagucuccagugucguauuugcauauga

SEQ ID NO: 129769 - RNA, 1698 nt, Artificial Sequence
  derived and/or modified CDS sequence (opt3) from hemagglutinin__InfluenzaA__ABS71669
augaaggugaaacugcucguccuucugugcaccuucacagccacuuacgcugacacgaucuguauuggcuaucacgcaaacaauagcaccgauacaguugacacuguguuggagaagaacguaaccgugacacauuccgucaauuuacuggaagauucucacaacgggaaacuaugccuccugaagggaauagcgccccuucagcuggguaauuguucaguggccggcuggaucuuggggaacccugagugcgaacuccugauuaguaaagagagcugguccuacaucguugaaaagccaaauccggagaacggaaccuguuaucccggccauuuugcugacuacgaggaacugagagagcaacucucuucggugagcucauucgaaagguuugagauuuucccuaaggagaguuccuggccaaaucacacugucacaggugugucugccagcugcucccauaacggggaaucaaguuuuuauaaaaauuuacuguggcuuaccggaaagaacggcuuguaccccaaucugagcaaaucuuaugcaaacaauaaggagaaagaagugcuaguucucuggggcgugcaccacccuccaaacaucggggaucagaaggcccuguaccauacggagaacgcuuacgucuccguggugucaagccacuauagucggaaguucacucccgaaauagcaaaacgcccuaagguccgagaccaggagggacguaucaauuacuauuggacccuucuggagccaggugauacaauuaucuuugaagccaacggcaauuugauugcuccgagauacgccuucgcgcucucuaggggguuuggauccggcaucauaaacagcaaugcacccauggacaaaugugaugccaagugccagacuccucaaggugcuauuaacucgucucugccauuccagaauguucaucccgugaccaucggggaguguccuaaauauguacgguccgccaaguuacgcauggugacaggacugagaaacauuccaucaauccagaguaggggccucuuuggcgcaaucgcuggguucauugaaggagguuggaccggcauggucgacgggugguacggauaucaccaccagaaugagcaaggcagcgguuacgccgcggaucagaaauccacgcagaacgccauaaaugggaucacuaacaagguaaauucuguuauugaaaagaugaacacacaguuuaccgcagugggcaaagaguucaauaaacuugagcggcgcauggaaaaccugaacaaaaaggucgacgauggauucaucgacauauggacuuacaaugcugaguugcuagugcugcucgaaaacgagcgaacacuggacuuucaugauagcaauguaaagaaccuuuaugaaaagguuaagucacaacugaaaaauaacgccaaggagauuggcaaugggugcuucgaguuuuaccacaaauguaacgacgaaugcauggagagugugaagaauggaaccuaugauuaccccaaauauuccgaagagagcaaguugaacagagagaagaucgacggugucaaacucgaaucuaugggcguguaccagauccuggcuauuuauucaacggucgccaguagcuuagugcugcuaguuucccucggggcaaucucuuucuggaugugcucgaauggaagccugcaguguaggauuugcauauga

SEQ ID NO: 129770 - RNA, 1698 nt, Artificial Sequence
  derived and/or modified CDS sequence (opt3) from hemagglutinin__InfluenzaA__ABS71671
augaaggugaaacugcucguccuucugugcaccuucacagccacuuacgcugacacgaucuguauuggcuaucacgcaaacaauagcaccgauacaguugacacuguguuggagaagaacguaaccgugacacauuccgucaauuuacuggaagauucucacaacgggaaacuaugccuccugaagggaauagcgccccuucagcuggguaauuguucaguggccggcuggaucuuggggaacccugagugcgaacuccugauuaguaaagagagcugguccuacaucguugaaaagccaaauccggagaacggaaccuguuaucccggccauuuugcugacuacgaggaacugagagagcaacucucuucggugagcucauucgaaagguuugagauguucccuaaggagaguuccuggccaaaucacacugucacaggugugucugccagcugcucccauaacgggaaaucaaguuuuuauaagaauuuacuguggcuuaccggcaaaaacggauuguaccccaaucugagcaagucuuaugcaaacaauaaagaaaaggaggugcuaguucucuggggcgugcaccacccuccaaacauuggggaucagcgggcccuguaccauacggaaaacgcuuacgucuccguggugucaagccacuauagucgcaaguucacucccgagaucgcaaaacgaccuaagguccgugaccaggaaggaagaauaaauuacuauuggacccuucuggagccaggugauacaaucauuuuugaggccaacggcaauuugaucgcuccgagguacgccuucgcgcucucucggggguuuggauccggcauuaucaacagcaaugcacccauggacgaaugugaugccaaaugccagacuccucaaggugcuauaaacucgucucugccauuccagaauguucaucccgugaccauuggggaguguccuaaguauguacgcuccgccaaauuaagaauggugacaggacugaggaacaucccaucaauucagagucggggccucuuuggcgcaaucgcuggguucaucgaaggagguuggaccggcauggucgacgggugguacggauaucaccaccagaaugagcaaggcagcgguuacgccgcggaucagaaguccacgcagaacgccauuaaugggauaacuaacaaaguaaauucuguuaucgaaaagaugaacacacaguuuaccgcagugggcaaggaguucaauaaacuugagcgccgaauggaaaaccugaacaagaaagucgacgauggauucauugacaucuggacuuacaaugcugaguugcuagugcugcucgaaaacgagagaacacuggacuuucaugauagcaauguaaagaaccuuuaugaaaaaguuaagucacaacugaagaauaacgccaaagagauaggcaaugggugcuucgaguuuuaccacaaguguaacgacgaaugcauggagagugugaaaaauggaaccuaugauuaccccaaguauuccgaagagagcaaauugaacagggagaagauugacggugucaagcucgaaucuaugggcguguaccagauccuggcuaucuauucaacggucgccaguagcuuagugcugcuaguuucccucggggcaauuucuuucuggaugugcucgaauggaagccugcagugucggaucugcauuuga

SEQ ID NO: 129771 - RNA, 1698 nt, Artificial Sequence
  derived and/or modified CDS sequence (opt3) from hemagglutinin__InfluenzaA__ABS71672
augaaggugaaacugcucguccuucugugcaccuucacagccacuuacgcugacacgaucuguauuggcuaucacgcaaacaauagcaccgauacaguugacacuguguuggagaagaacguaaccgugacacauuccgucaauuuacuggaagauucucacaacgggaaacuaugccuccugaagggaauagcgccccuucagcuggguaauuguucaguggccggcuggaucuuggggaacccugagugcgaacuccugauuaguaaagagagcugguccuacaucguugaaaagccaaauccggagaacggaaccuguuaucccggccauuuugcugacuacgaggaacugagagagaggcucucuucggugagcucauucgaacgguuugagauguucccuaaggagaguuccuggccaaaucacacugucacaggugugucugccagcugcucccauaacgggaaaucaaguuuuuauaagaauuuacuguggcuuaccggcaaaaacggauuguaccccaaucugagcaagucuuaugcaaacaauaaagaaaaggaggugcuaguucucuggggcgugcaccacccuccaaacauuggggcccaacgcgcucuguaccauacggaaaacgcauacgucuccguggugucaagccacuauagucgaaaguucacucccgagaucgccaaacguccuaaggucagagaucaggaaggaaggauaaauuacuauuggacccuucuggagccaggugacacaaucauuuuugaggcuaacggcaauuugaucgccccgcgguacgcguucgcacucucucgcggguuuggauccggcauuaucaacagcaaugcccccauggaugaaugugacgcuaaaugccagacuccucagggugccauaaacucgucucugccauuccaaaauguucaucccgugaccauuggggaguguccuaaguauguaagauccgcaaaauuaaggauggugacaggacugcggaacaucccaucaauucagagucgcggccucuuuggcgcuaucgccggguucaucgaaggagguuggaccggcauggucgaugggugguacggauaucaccaccagaaugagcagggcagcgguuacgcggccgaccaaaaguccacgcagaacgcaauuaaugggauaacuaacaaaguaaauucuguuaucgaaaagaugaacacacaguuuaccgcugugggcaaggaguucaauaaacuugagcgaagaauggaaaaccugaacaagaaagucgaugacggauucauugauaucuggacuuacaaugccgaguugcuagugcugcucgaaaacgagaggacacuggacuuucaugacagcaauguaaagaaccuuuaugaaaaaguuaagucacagcugaagaauaacgcuaaagagauaggcaaugggugcuucgaguuuuaccacaaguguaacgaugaaugcauggagagugugaaaaauggaaccuaugacuaccccaaguauuccgaagagagcaaauugucucgggagaagauugauggugucaagcucgaaucaaugggcguguaccaaauccuggccaucuauaguacggucgcaagcuccuuagugcugcuaguuucucucggggccauuucguucuggaugugcagcaacggaucccugcagugucguaucugcauuuga

SEQ ID NO: 129772 - RNA, 1698 nt, Artificial Sequence
  derived and/or modified CDS sequence (opt3) from hemagglutinin__InfluenzaA__ABS71673
augaaggugaaacugcucguccuucugugcaccuucacagccacuuacgcugacacgaucuguauuggcuaucacgcaaacaauagcaccgauacaguugacacuguguuggagaagaacguaaccgugacacauuccgucaauuuacuggaagauucucacaacgggaaacuaugccuccugaagggaauagcgccccuucagcuggguaauuguucaguggccggcuggaucuuggggaacccugagugcgaacuccugauuaguaaagagagcugguccuacaucguugaaaccccaaauccggagaacggaacuuguuaucccggcuacuuugcugacuaugaggaacugagagagcaacucucuucggugagcucauucgaaagguuugagauuuucccuaaggagaguuccuggccaaaucauacagucaccggugugucugccagcugcucccacaacgggcggucaaguuuuuaccgcaauuuacuguggcuuacgggaaagaacggcuuguaucccaaucugagcaaaucuuacgcaaacaauaaggaaaaagagguacuuguucucuggggcgugcaucacccuccaaacaucggggaucagcgagcccuguaccacacugaaaacaccuaugucuccguggugucaagccauuacagucguagauucacacccgagauagcuaagaggccuaaaguccgggaccaggaaggacgcaucaauuauuacuggacucuucuggagccaggugauaccauuaucuuugaggcaaacggcaauuugauugccccgagauucgcuuuugcccucucuaggggguucggauccggcaucauaacaagcaacgcgcccauggacgaaugugaugcaaagugccagaccccucaaggugccauuaauucgucucugccauuucagaacguucaccccgugacgaucggggaguguccuaaguauguacgguccgcuaaauuacgcauggccacuggacugcgaaauauuccaucaauccagaguagaggccucuucggcgcaaucgcuggguuuauugaaggagguuggacaggcaugguggacgggugguacggauaucaucaccagaacgagcaaggcagcgguuacgccgcggaucagaaguccacccagaaugccauaaacgggaucacuaauaaagucaacucugugauugaaaagaugaauacacaguucaccgcaguuggcaaagaguucagcaagcuagagaggcggauggaaaaccugaauaaaaagguggacgauggauuuuuggacaucuggacguacaacgcugagcuacugguccuccuggaaaacgagcguacccuugacuuccacgauucaaaugugaagaaccuguaugaaaaaguaaagagucaauugaaaaauaacgccaaggagauaggcaaugggugcuuugaguucuaccauaaauguaacgacgaaugcauggaguccguuaagaauggaacauaugauuaccccaaguauagcgaagagucuaaacucaaccgcgagaagauugacggugugaaacuggaaucaaugggcgucuaccagaucuuagcuaucuauaguacuguggccagcucccugguccuacucgugucucugggggcaauuucguuuuggaugugcagcaauggaucccuucaguguagaaucugcauuuga

SEQ ID NO: 129773 - RNA, 1701 nt, Artificial Sequence; identical to SEQ ID NO: 128678
  derived and/or modified CDS sequence (opt3) from hemagglutinin__InfluenzaA__ABS71674

SEQ ID NO: 129774 - RNA, 1701 nt, Artificial Sequence
  derived and/or modified CDS sequence (opt3) from hemagglutinin__InfluenzaA__ABS71675
augaagaccaucauugcccugagcuacauacucugccuuguguucgcucagaaacugcccggcaacgacaauuccacagcaacuuuguguuuagggcaccaugccgucccuaacggaacgaucguuaagaccauuacaaaugaucaaaucgaggugacuaacgcgaccgaacugguacagucuucaaguacagguggcauuugcgacagcccacaccagauccuagauggggagaauuguacccucauagacgcucugcuuggagauccgcagugcgacggcuuucaaaacaaaaagugggaucuguucguggaaagauccaaagcccauucuaauuguuaucccuacgacgucccugauuaugcaucguugaggucacucguggccagcagugguacucuggaguuuaacaaugaauccuucaacuggacagggguuacccagaauggaacgucuagcgcuugcaagcggcgcuccaacaauucauuuuucagucgacugaacuggcucacucacuuaaaguuuaaauacccagcacugaaugugaccaugcccaacaacgagaaguucgacaaacuuuauaucuggggcguccaucacccuggcacagauaaugaccagaucuuuuuguacgcccaggcuagcgggcguauuacugugucuaccaagagaucccaacagacaguaauuccaaacaucggaucaaggccccggguucgcaauauaccuagcagaauuaguaucuauuggaccauugugaaaccaggugauauccugcuaaucaacucuacgggcaaucucauugccccgaggggguacuucaagauacgguccggaaagagcucgaucaugcgcucugacgcgcccauuggcaaauguaacuccgagugcaucacuccuaaugguucaauaccaaacgacaagcccuuucagaaugucaaccgaauuacauacggggcauguccuagauaugugaaacagaauacccugaagcuggccacuggaaugaggaacgugccagaaaaacaaacacggggcaucuucggcgcuaucgccggguuuauugagaauggaugggaagguauggucgauggcugguacggguuccgucaccagaacagugagggaaucggccaggcagcugaccuuaagagcacccaagccgcgauuaaucagauaaacgguaaauugaaccgccucaucgggaagacgaaugagaaguuccaucagauugaaaaagaguuuuccgaaguugagggcagaauccaggaucuggaaaaguauguggaggacaccaaaaucgauuuauggucuuacaacgccgagcugcucguagcacuugaaaaucaacacacaauugaccugacugauagcgagaugaacaaguuguucgaaaggaccaaaaagcagcuacgggagaaugcugaagacaugggaaacggcugcuuuaagauauaucauaaaugugauaaugccugcaucgggucaauucgaaacggaacauacgaccacgauguguaucgcgacgaggcucugaauaacagauuccagaucaagggugucgagcucaaaaguggcuacaaggacuggauucuguggaucuccuuugccauaagcugcuuccuucuguguguggcauugcucggguuuaucaugugggccugccagaaaggaaauauuagguguaacaucugcauuuga

SEQ ID NO: 129775 - RNA, 1701 nt, Artificial Sequence
  derived and/or modified CDS sequence (opt3) from hemagglutinin__InfluenzaA__ABS71676
augaagaccaucauugcccugagcuacauacucugccuuguguucgcucagaaacugcccggcaucgacaacuccacagcaacuuuguguuuagggcaccaugccgucccuaauggaacgauuguuaagaccaucacaaacgaucaaauugaggugacuaaugcgaccgaacugguacagaacucuucaacagguggcaucugcgacaguccacaccagauacuagauggggagaauuguacccucaucgacgcucugcuuggagauccgcagugcgacggcuuucaaaacaaaaagugggaucuguucguggaaagaagcaaagccuauuccaauuguuaccccuaugacgucccugauuacgcaucuuugaggucgcucguggccucaagcgguacucuggaguuuaacaaugaaaguuucaacuggacagggguuacccagaauggaacguccucugcuugcaagcggggcagcaacaauuccuuuuucucacgccugaacuggcucacucauaguaaguuuaaauauccagcauuaaaugugaccaugcccaacaacgaggaguucgacaagcuguacauuuggggcguccaccauccugggacagauaaugaccagaucuuucuuuaugcccaggcuagcggacgaauuacugugucuaccaaacguucccaacagacaguaaucccaaacauagguucaagacccaggguucggaauauuccuagccgcaucaguauuuacuggaccaucgugaagccaggcgauaucuugcugauuaacucuacggggaaucuaauagccccgagaggauacuucaucauuagguccggcaaaagcucgaucaugcggucugacgcgcccauagguaaguguaacuccgaaugcauuacuccuaaugggucaaucccaaacgacaagcccuuucagaaugucaaccgcaucacauauggagcauguccucgauacgugaaacagaauacccucaagcuggccacuggcaugagaaacgugccagagaaacaaacaaggggcauuuucggggcuaucgccggauuuauugaaaaugguugggagggcauggucgaugggugguauggauuccggcaccagaacagugagggcauaggucaggcagcugaccuuaagagcacccaagccgcgaucgaucagauuaaugggaaacugaaccguuugaucggcaagacgaacgaaaaauuccaccagaucgagaaggaauuuuccgagguugaaggacgcauucaggaccucgagaaguacguggaggauaccaaaauagaccuguggucuuauaaugccgaauuacugguagcacucgagaaccaacauacaaucgaucuuacugacagcgaaaugaauaagcuguucgagaaaaccaagaaacaguugagagaaaacgcugaggauaugggcaaugggugcuuuaagauuuaccacaagugugacaacgccugcaucggaucaauuaggaaugguacauaugaucaugacguguaccgggacgaggcucuaaacaaucgauuccagaucaaaggcgucgaacugaagaguggguacaaagauuggauacucuggaucuccuuugccauuagcugcuuccugcuuuguguggcacuguugggauuuaucaugugggccugccagaagggcaacauucgcuguaauaucugcauauga

SEQ ID NO: 129776 - RNA, 1701 nt, Artificial Sequence
  derived and/or modified CDS sequence (opt3) from hemagglutinin__InfluenzaA__ABS71677
augaagaccaucauugcccugagcuacauacucugccuuguguucgcucagaaacugcccggcaucgacaacuccacagcaacuuuguguuuagggcaccaugccgucccuaauggaacgauuguuaagaccaucacagaugaccaaauugaggugacuaacgcgaccgaacugguacaaaauucuucaacagguggcaucugcgauaguccacaccagauacuagacggggagaacuguacccucaucgaugcucugcuuggagacccgcagugcgauggcuuucagaauaaaaagugggaccuguucguggaaagaagcaaagccuauuccaacuguuaccccuaugaugucccugacuacgcaucuuugaggucgcucguggccucaagcgguacucuggaguuuaauaacgaaaguuucaauuggacagggguuacccagaacggaacguccucugcuugcaagcggggcagcaauaacuccuuuuucucacgccugaauuggcucacucauaguaaguuuaaauauccagcauuaaacgugaccaugcccaauaacgaggaguucgauaagcuguacauuuggggcguccaccauccugggacagacaacgaucagaucuuucuuuaugcccaggcuagcggacgaauuacugugucuaccaaacguucccaacagacaguaaucccaaauauagguucaagacccaggguucggaacauuccuagccgcaucaguauuuacuggaccaucgugaagccaggcgacaucuugcugauuaauucuacggggaaccuaauagccccgagaggauacuucaaaaucagguccggcaagagcucgauuaugcggucugacgcgcccaucgauaaguguaauuccgaaugcauaacuccuaacgguucaauuccaaaugacaaacccuuucagaacgucaaucgcaucacauauggggcauguccucgauacgugaagcagaacacccucaaacuggccacuggaaugagaaaugugccagagaagcaaacaaggggcaucuucggcgcuauugccggguuuaucgaaaacggaugggaggguauggucgauggcugguauggguuccggcaccagaauagugagggaauuggccaggcagcugaccuuaaaagcacccaagccgcgauagaucagaucaacgguaagcugaaucguuugauugggaaaacgaacgaaaaguuccaccagaucgagaaggaauuuuccgagguugaaggccgcauccaggaccucgagaaauacguggaggauaccaagauugaccuguggucuuauaacgccgaauuacugguagcacucgagaaucaacauacaauagaucuuacugacagcgaaaugaacaaacuguucgagaagaccaaaaagcaguugagagaaaaugcugaggauaugggaaacggcugcuuuaagaucuaccacaaaugugacaaugccugcauugggucaaucaggaacggaacauaugaccaugauguguaccgggacgaggcucuaaauaaccgauuccagauuaagggugucgaacugaaaaguggcuacaaggauuggauccucuggauauccuuugccaucagcugcuuccugcuuuguguggcacuguugggguuuauuaugugggccugccagaaaggaaauauccgcuguaacauuugcaucuga

SEQ ID NO: 129777 - RNA, 1701 nt, Artificial Sequence
  derived and/or modified CDS sequence (opt3) from hemagglutinin__InfluenzaA__ABS71679
augaagaccaucauugcccugagcuacauacucugccuuguguucgcucagaaacugcccggcaucgacaacuccacagcaacuuuguguuuagggcaccaugccgucccuaauggaacgauuguuaagaccaucacaaacgaucaaauugaggugacuaaugcgaccgaacugguacagucuucaaguacagguggcaucugcgacagcccacaccagauacuagauggggagaacuguacccucaucgacgcucugcuuggagauccgcagugcgacggcuuucaaaauaaaaagugggaucuguucguggaaagauccaaagccuauucuaacuguuaccccuaugacgucccugauuacgcaucguugaggucacucguggccagcagugguacucuggaguuuaauaacgaauccuucaauuggacagggguuacccagaacggaacgucuagcgcuugcaagcggggcuccaauaacucauuuuucagucgccugaauuggcucacucauagcaaguuuaaauauccagcauuaaacgugaccaugcccaauaacgaggaguucgacaagcuguacauuuggggcguccaccauccugggacagauaacgaccagaucuuucuuuaugcccaggcuucuggacgaauuacuguguccaccaaacguucacaacagacaguaaucccaaauauagguagcagacccaggguucggaacauuccuagucgcaucucuauuuacuggaccaucgugaagccaggcgauaucuugcugauuaauuccacggggaaccuaauagccccgagaggauacuucaaaaucaggagcggcaagucgucuauuaugcgguccgacgcgcccaucgguaaguguaauucagaaugcauaacuccuaacgggaguauuccaaaugacaaacccuuucagaacgucaaucgcaucacauauggagcauguccucgauacgugaagcagaacacccucaaacuggccacuggcaugagaaaugugccagagaagcaaacaaggggcaucuucggggcuauugccggauuuaucgaaaacgguugggagggcauggucgaugggugguauggauuccggcaccagaauagcgagggcauuggucaggcagcugaccuuaaauccacccaagccgcgauagaucagaucaacgggaagcugaaucguuugauuggcaaaacgaacgaaaaguuccaccagaucgagaaggaauuuucugagguugaaggacgcauccaggaccucgagaaauacguggaggauaccaagauugaccuguggagcuauaacgccgaauuacugguagcacucgagaaucaacauacaauagaucuuacugacucagaaaugaacaaacuguucgagaagaccaaaaagcaguugagagaaaaugcugaggauaugggcaacgggugcuuuaagaucuaccacaaaugugacaaugccugcauuggaaguaucaggaacgguacauaugaucaugacguguaccgggacgaggcucuaaauaaccgauuccagauuaagggcgucgaacugaaauccggguacaaggauuggauccucuggaucagcuuugccauaucuugcuuccugcuuuguguggcacuguugggauuuauuaugugggccugccagaaaggcaauauccgcuguaacauuugcaucuga

SEQ ID NO: 129778 - RNA, 1701 nt, Artificial Sequence; identical to SEQ ID NO: 129777
  derived and/or modified CDS sequence (opt3) from hemagglutinin__InfluenzaA__ABS71680

SEQ ID NO: 129779 - RNA, 1701 nt, Artificial Sequence
  derived and/or modified CDS sequence (opt3) from hemagglutinin__InfluenzaA__ABS71682
augaagaccaucauugcccugagcuacauacucugccuuguguucgcucagaaacugcccggcaacgacaauuccacagcaacuuuguguuuagggcaccaugccgucccuaacggaacgaucguuaagaccauuacaaaugaucaaaucgaggugacuaacgcgaccgaacugguacagucuucaaguacagguggcauuugcgacagcccacaccagauccuagauggggagaauuguacccucauagacgcucugcuuggagauccgcagugcgacggcuuucaaaacaaaaagugggaucuguucguggaaagauccaaagccuauucuaauuguuaccccuaugacgucccugauuacgcaucguugaggucacucaucgccagcagugguacucuggaguuuaacaaugaauccuucaacuggacaggggugacccagaauggaacgucuagcgcuugcaagcggcgcuccaacaauucauuuuucagucgacugaacuggcucacucauuuaaaguuuaaauauccagcacugaauguuaccaugcccaacaacgagaaguucgacaaacuuuacauuuggggcgugcaccauccuggcacagauaaugaccagaucuuuuuguaugcccaggcuagcgggcguauuacugucucuaccaagagaucccaacagacagugaucccaaacauaggaucaaggccccggguacgcaauauuccuagcagaaucaguauuuacuggaccaucguuaaaccaggugauauccugcuaauuaacucuacgggcaaucucauagccccgaggggguacuucaagauccgguccggaaagagcucgauuaugcgcucugacgcgcccaucggcaaauguaacuccgagugcauaacuccuaaugguucaauuccaaacgacaagcccuuucagaaugugaaccgaaucacauauggggcauguccuagauacgucaaacagaauacccugaagcuggccacuggaaugaggaacgugccagaaaaacaaacacggggcaucuucggcgcuauugccggguuuaucgagaauggaugggaagguaugguggauggcugguauggguuccgucaccagaacagugagggaauuggccaggcagcugaccuuaagagcacccaagccgcgauagaucagaucaaugguaaauugaaccgccucauugggaagacgaacgagaaguuccaccagaucgaaaaagaguuuuccgaagucgagggcagaauccaggaccuggaaaaguacguugaggauaccaaaauugacuuauggucuuauaaugccgagcugcucguggcacuugaaaaccaacauacaauagaucugacugacagcgagaugaauaaguuguucgagaaaaccaagaagcagcuaagggaaaacgcugaagauaugggaaauggcugcuuuaaaaucuaccacaagugugacaacgccugcauugggucaauccggaauggaacauaugaucaugacguauaccgagacgaggcucugaacaaucgcuuccagauuaaagguguggagcucaagaguggcuacaaagauuggauccuguggauauccuuugccaucagcugcuuccuucugugugucguguugcucggguuuauuaugugggcaugccagaagggaaacaucagauguaauauuugcaucuga

SEQ ID NO: 129780 - RNA, 1701 nt, Artificial Sequence
  derived and/or modified CDS sequence (opt3) from hemagglutinin__InfluenzaA__ABU80177
augaagaccaucauugcccugagcuacauacucugccuuguguucgcucagaaacugcccgucaacgacaauuccacagcaacuuuguguuuaggccaccaugccguuccuaacgggacgcuggugaagaccaucacaaaugaucacauugagguaacuaacgcgaccgaacuugugcaaucuucaaguacaggaagaaucugcgacagcccacaucagauucucgauggugagaauuguacccugaucgacgcucuacugggcgauccgcacugcgacggguuucagaacaaagaaugggauuuguucgucgagagguccacugccuauucuaauuguuaccccuaugacgugccugauuacgcaucgcuccggucacugguugccagcaguggaacacuggaauuuaacaaugaguccuucaacuggaccggcguggcucagaaugguacgucuagcuccugcaagcgccgaucaauaaaaaguuucuuuagccgucucaacugguuacaucaacugaaguauaaguacccagcacuuaaugucacuaugcccaacaaugagaaauuugacaaguuguauaucuggggagugcaccacccuucuaccgauuccgaccagauuucacuguacgcccaggcuagcgggagaguaacaguuaguacuaaaaggucucagcaaaccgugaucccaaacauuggcucccggcccuggguccgcggcgugagcucgagaaucucuauauacuggacaauugugaagccuggggauauccuacucauuaacuccaccggaaaucugaucgccccaagggguuauuucaaaauccggucaggcaagaguagcauuaugcgcuccaacgcgccgauagggaaguguaauucugaaugcaucacgcccaacggaagcauuccuaaugacaaaccauuucagaacgucaaucgaaucacuuacggcgcaugucccagauauguuaagcagaacacacuuaaacuggccaccgguaugaggaaugugccugagaagcagacucgggggauauucggagcuauugccggcuuuaucgaaaacggcugggaggggaugguagacggaugguacgguuuccgucaucaaaauucagagggcacagggcaggcagcugauuugaaaaguacccaggccgcgaucaaccaaauuaauggaaagcucaaccgccugaucgagaaaacgaaugaaaaguuucaccagauugaaaaggaguucuccgaaguggagggcagaauacaggacuuagagaaauaugucgaagauaccaagaucgaccuguggagcuacaacgccgagcuccuuguggcacuggaaaaccagcauacaauugauuugacugacucugagaugaauaaacuauucgaaaggacccggaagcaacugcgagagaacgcugaggauauggguaaugggugcuuuaaaaucuaucacaagugugacaacgccugcaucggcucaauucgcaauggaacauacgaucacgacguuuacagagaugaagcucucaacaauagguuccagauaaagggcguggagcugaaaaguggguauaaggacuggauccuuuggauuagcuuugccaucuccugcuuccuguugugugucgugcuccugggauuuauuaugugggcaugccagaaagguaacauccgguguaauauaugcaucuga

SEQ ID NO: 129781 - RNA, 1698 nt, Artificial Sequence
  derived and/or modified CDS sequence (opt3) from hemagglutinin__InfluenzaA__ABU80298
augaaggugaaacugcucguccuucugugcaccuucacagccacuuacgcugacacgaucuguauuggcuaucacgcaaacaauagcaccgauacaguugacacuguguuggagaagaacguaaccgugacacauuccgucaauuuacuggaagauucucacaacgggaaacuaugccuccugaagggaauagcgccccuucagcuggguaauuguucaguggccggcuggaucuuggggaacccugagugcgaacuccugauuaguaaagagagcugguccuacaucguugaaaccccaaauccggagaacggaacuuguuaucccggcuacuuugcugacuaugaggaacugagagagcaacucucuucggugagcucauucgaaagguuugagauuuucccuaaggagaguuccuggccaaaucauacagucaccggugugucugccagcugcucccacaacgggaagucaaguuuuuaccggaauuuacuguggcuuacgggcaaaaacggauuguaucccaaucugagcaagucuuacgcaaacaauaaagaaaaggagguucuaguacucuggggcgugcaucacccuccaaacaucggggaucagcgcgcccuguaccacacugaaaacgcuuaugucuccguggugucaagccauuacagucgacguuucacccccgagauagcaaaaagaccuaaggucagggaccaggaaggacggaucaauuauuacuggacacuucuggagccaggugauacuauuaucuuugaggccaacggcaauuugauugcuccgcgcuaugccuucgcgcucucuagaggguuuggauccggcaucauaaccagcaacgcacccauggacgaaugugaugccaagugccagacaccucaaggugcuauuaauucgucucugccauuccagaacguucaccccgugaccaucggggaguguccuaaauacguaagguccgccaaguuacggauggcaacgggacugcgcaauauuccaucaauccagagucgaggccucuuuggcgcuaucgccggguucauugaaggagguuggacuggcaugguggacgggugguauggauaccaucaccagaacgagcaaggcagcgguuacgcggccgaucagaaauccacacagaaugcaauaaacgggaucaccaauaaggucaacucugugauugaaaagaugaauacucaguuuacagcuguuggcaaagaguucaacaaacuugagagaaggauggaaaaucugaacaagaagguggacgauggauucuuggacaucuggaccuauaacgccgagcuacugguccuccuggaaaaugagcggacgcuugacuuucacgauagcaacgugaaaaaucuguacaagaaaguaaagucacaauugaaaaacaaugcuaaggaaauaggcaacgggugcuucgaguuuuaucauaaguguaauaacgagugcauggaaaguguuaaaaauggaaccuacgacuaucccaaguacuccgaggaaagcaaacucaaccgugagaagauugauggugugaaacuggagucuaugggcgucuaucagaucuuagccaucuacucaacaguggcaaguagccugguccuacucgugucccugggggccauuucuuucuggaugugcucgaauggaagccuucagugucgcaucugcauuuga

SEQ ID NO: 129782 - RNA, 1701 nt, Artificial Sequence
  derived and/or modified CDS sequence (opt3) from hemagglutinin__InfluenzaA__ABU80320
augaagaccaucauugcccugagcuacauacucugccuuguguucgcucagaaacugcccggcaacgacaauuccacagcaacuuuguguuuagggcaccaugccgucccuaacggaacgcugguuaagaccaucacaaaugaucaaauugaggugacuaacgcgaccgaacuuguacagucuucaaguacagguggcaucugcgacagcccacaccagauucucgauggggagaauuguacccugaucgacgcucuacugggagauccgcauugcgacuccuuucagaacaaagaaugggauuuguucguggagagaucuaaggccuauucgaauuguuaccccuaugacgucccugauuacgcaucacucaggagccugguggccaguuccggcacucuggaauuuaacaaugagucuuucaacuggacagguguugcucaaaaugggaccagcuccgcaugcaaacggcgcucaaacaagagcuuuuucagucgacucaauugguuacaccagcugaaguauaaauacccagcccuuaacgugacgaugcccaauaacgagaaguuugacaaauuguauauauggggaguccaucacccuucuacugauuccgaccagaucucacuguacgcucaggccccaggccgugugaccguaagcacaaagagaagucaacagacuguuauucccaacaucggcucuaggccuugggugcgcggggucuccagcauuaucucgauauacuggaccauugugaaaccaggagauauccuacucauuaauuguacagguaaccugaucgcgccgcggggcuauuucaagaucagaucugggaaguccucaauuaugaggagugacgcaagcauaggaaaaugcaauuccgaauguaucacccccaacggcucuauuccuaaugacaagccauuucagaacgugaaucggaucacguacggugccugcccccgcuaugucaaacagaacacucuuaagcuggcuacagggaugcgaaauguuccugagaaacaaaccagaggaauauucggcgccauugcaggcuuuaucgaaaacgggugggagggaaugguggaugguugguacggcuucaggcaccagaauagcgaggggacuggacaggcugccgacuugaagucaacacaagcggccaucaaccagauuaauggcaaacucaaccggcugaucgaaaagaccaaugagaaguuucaucagauugaaaaagaguucagugaaguagagggucguauacaggauuuagagaaguauguggaagacacgaaaaucgaucugugguccuacaacgcagagcuccuugucgcucuggaaaaccaacacaccauugacuugacagauagcgagaugaauaagcuauucgaacgcacuaaaaagcagcugagagagaacgccgaggacauggggaauggcuguuuuaagaucuaucauaaaugcgauaacgcuugcaucggaucuauuaggaauggcaccuacgaccacgauguguaccgggacgaagcccucaacaaucgauuccagauaaaggggguugagcugaaaucaggauauaaggacuggauccuuuggauuaguuuugcaaucagcuguuuccuguugugcgugguccuccuggguuuuauuaugugggccugucagaaaggcaacauccgcugcaauauauguaucuga

SEQ ID NO: 129783 - RNA, 1701 nt, Artificial Sequence; identical to SEQ ID NO: 129087
  derived and/or modified CDS sequence (opt3) from hemagglutinin__InfluenzaA__ABU80331

SEQ ID NO: 129784 - RNA, 1701 nt, Artificial Sequence
  derived and/or modified CDS sequence (opt3) from hemagglutinin__InfluenzaA__ABU80400
augaaggccauccugcucgugcuucuguacaccuucacagcugcaaacgccgacacuuugugcauuggcuaucacgcgaauaacagcacggauaccgucgacacaguuuuagagaaaaaugugacuguaacccauuccgugaaccugcuagaagauagacacaaugggaagcucuguaaacugaggggagucgcuccccuucaucuggguaagugcaacauagccggcugguugcucgggaauccugagugugaacugcuguuuacagcaucuucauggaguuacaucguggagaccagcaacuccgacaauggaacuugcuauccaggcgauuucauuaacuacgaagaacuccgggagcaguuaucuucgguuucuagcuuugaacgcuucgagaucuuuccgaaagccaguuccuggcccaaucacgaaacaaaccgaggugugaccgcugcauguccuuaugccggggcuaauucuuucuaccguaaccugauuuggcuugucaagaagggaaauagcuauccaaaauuguccaagucauacgugaacaacaaagagaaggagguacugguucuauggggcauccaucaucccccuacgaguacugaccaacagagccucuaccagaaugccgaugcguauguguuugucggcucauccaaauacaacaagaaguucaaaccagaaauagcaaccagacccaaggugagggggcaggccggacggaugaauuauuacuggacacugguggagccuggugacacuaucaccuuugaagcuacaggcaaccuugucguuccacgcuaugccuucgcaaugaaaagagggucaggaagcggcauuaucauuagugauaccccggugcacgacugcaauacgacuugucaaacacccaagggugcuaucaacaccucucugccuuuucagaauauacacccaguaacuauuggggagugccccaaauacgugaaguccacaaaauugaggauggccaccggacuccggaacaucccuagcauucagucgcgcggccuguucggcgcgaucgccggguuuaucgaaggagguuggacgggcaugauugaugggugguauggauaccaccaucagaaugagcaaggcucugguuacgcagcugaccgaaaguccacccagaacgccauagaugggaucacaaauaaggucaacucagugauugagaaaaugaauacucaguucaccgcuguuggcaaggaguucaaccacuuagagaaaagaaucgaaaaucugaacaggaagguggacgacggauuucucgauauauggacauauaacgccgagcuucuggucuugcuagaaaaugagcggacucuggacuaccacgauaguaacgugaaaaaucucuaugagaagguacguagccagcugaagaacaaugcaaaagaaauuggcaacggguguuucgaguuuuaccauaagugcgacgauaccuguauggaauccguuaaaaauggaacauaugacuacccaaaguauucugaggaaagcaaacuuaaccgcgaggagaucgauggugugaagcuggaaucaaccagaaucuaccaaauuuuggccaucuacaguacugucgcuuccagccucgugcuguuagucucucugggcgcgauuucauucuggaugugcaguaaugggagccuacagugcaggauauguaucuga

SEQ ID NO: 129785 - RNA, 1701 nt, Artificial Sequence
  derived and/or modified CDS sequence (opt3) from hemagglutinin__InfluenzaA__ABU92572
augaagaccaucauugcccugagcuacauacucugccuuguguucacacagaaacugcccggcaacgacaauuccacugcuacguuguguuuagggcaccaugcagucccuaacggaacccugguuaagacaaucacuaaugaucaaauugaggugaccaacgccacagaauugguacagucuucaaguaccgguagaaucugcgacagcccacaccagauucucgauggcgagaauuguacucugaucgacgcgcuucugggggauccgcauugcgacggauuucagaacaaagaaugggauuuguucguggagagguccaaggcuuauucuaauuguuaccccuaugacgucccugauuacgugucgcuccggucacugguugccagcaguggcacacuggaauuuaacaaugaguccuucaacuggaccgguguggcacaaaaugggacgucuagcgccugcaaacgccgauccgacaagucauuuuucagucgucucaacugguuacaccagcugaaguauaaauacccagcucuuaaugucacuaugcccaacaaugagaaguuugauaaauuguauauauggggagugcaucacccuggcaccgacagcgaucagaucucucuguacgcacaggccuccggcagaguaacaguuucaacuaagaggagccaacagaccgugauuccaaacaucgggagucggcccuggguccgcggagugucuuccagaauuagcaucuacuggacaauagugaaaccuggugacauucuacucaucaacucgaccggcaaucugauugcuccaaggggguauuucaagauccggucuggaaaguccucaaucaugcgcagugacgccccgauuggcaaauguaacagcgaaugcauaacgcccaaugguuccaucccuaacgauaagccauuucagaaugucaaccgaauuacuuacgggcccuguccuagauauguuaaacagaauacacuuaagcuggcgaccggaaugaggaacgugccagagaaacaaacucggggcaucuucggcgcaauagccggguuuauugaaaauggaugggaggguaugauggacggcugguacggguuccgucaccagaacucugagggaacaggccaggcugccgaucuaaagagcacccaagcagcuaucaaucagaucaacgguaaacucaaucgccugauugaaaagacgaacgagaaguuucaucagaucgaaaaagaguucucagaaguagaggggaggauucaggacuuagagaaguauguggaagauaccaaaauagaccuguggaguuacaaugccgagcuccuugucgcgcuggaaaaccaacacacaaucgauuugacugacuccgagaugaacaagcuauucgaaagaaccaaaaagcagcugcgggagaaugccgaggauaugggcaacggaugcuuuaagauuuaucauaaaugugacaaugcaugcaucggcagcauccgaaacgggacauacgaucacgacguguaccgcgacgaagcucucaauaacagauuccagauuaagggaguugagcugaaaucugguuauaaggauuggauacuuuggaucucauuugccauuaguugcuuccuguuguguaucgugcuccugggcuuuauuaugugggcuugccagaaagggaauaucagguguaacauaugcaucuga

SEQ ID NO: 129786 - RNA, 1701 nt, Artificial Sequence
  derived and/or modified CDS sequence (opt3) from hemagglutinin__InfluenzaA__ABU92573
augaagaccaucauugcccugagcuacauacucugccuuguguucgcucagaaacugcccggcaacgacaauuccacagcaacuuuguguuuagggcaccaugccgucccuaacggaacgcugguuaagaccaucacaaaugaucaaauugaggugacuaacgcgaccgaauugguacagucuucaaguacagguagaaucugcgacagcccacaccagauucucgauggcgagaauuguacccugaucgacgcccuucugggggauccgcauugcgacggauuucagaacaaagaaugggauuuguucguggagagguccaaggcuuauucuaauuguuaccccuaugacgucccugauuacgugucgcuccggucacugguugcaagcaguggcacucuggaauuuaacaaugaguccuucaacuggacagguguggcccaaaaugggaccucuagcgcuugcaaacgccgauccgacaagucauuuuucagucgucucaacugguuacaccagcugaaguauaaauacccagcacuuaaugucacgaugcccaacaaugagaaguuugauaaauuguauauauggggagugcaucacccuggcacugacagcgaucagaucucucuguacgcccaggcuuccggcagaguaaccguuucaacaaagaggagccaacagacugugauuccaaacaucgggagucggcccuggguccgcggagugucuuccagaauuagcaucuacuggaccauagugaaaccuggugacauucuacucaucaacucgacaggcaaucugauugccccaaggggguauuucaagauccggucuggaaaguccucaaucaugcgcagugacgcgccgauuggcaaauguaacagcgaaugcauaacccccaaugguuccaucccuaacgggaagccauuucagaaugucaaccgaauuacguacggagcaugucccagauauguuaaacagaauacucuuaagcuggccacaggcaugaggaacgugccugagaaacaaacccggggcaucuucggggcuauagccggauuuauugaaaaugguugggagggcaugauggaugggugguacggauuccgucaccagaacucugagggcacuggucaggcagcugaccuaaagagcacacaagccgcgaucaaucagaucaacgggaaacucaaucgccugauuaagaagaccaacgaaaaauuucaucagaucgagaaggaguucucagaaguagaaggcaggauucaggauuuagagaaauauguggaggacacgaagauagaucuguggaguuacaaugccgaacuccuugucgcacuggagaaccaacacaccaucgacuugacagauuccgaaaugaacaaacuauucgagagaacuaagaagcagcugcgggaaaaugcugaggacaugggaaacggcugcuuuaaaauuuaucauaagugugauaaugccugcaucgggagcauccgaaacggaaccuacgaccacgauguguaccgcgacgaggcucucaauaacagauuccagauuaaagguguugaacugaagucuggcuauaaagacuggauacuuuggaucucauuugccauuaguugcuuccuguuguguaucgugcuccugggguuuauuaugugggcaugccagaagggaaauaucagguguaacauaugcaucuga

SEQ ID NO: 129787 - RNA, 1701 nt, Artificial Sequence
  derived and/or modified CDS sequence (opt3) from hemagglutinin__InfluenzaA__ABU92575
augaagaccaucauugcccugagcuacauacucugccuuguguucgcucagaaacugcccggcaacgacaauuccacagcaacuuuguguuuagggcaccaugccgucccuaacggaacgcugguuaagaccaucacaaaugaucaaauugaggugacuaacgcgaccgaacuuguacagucuucaaguacagguagaaucugcgacagcccacaccagauucucgauggcgagaauuguacccugaucgacgcucuacugggggauccgcauugcgacggauuucagaacaaagaaugggauuuguucguggagagguccaaggccuauucuaauuguuaccccuaugacgucccugauuacgugucgcuccggucacugguugcaagcaguggcacucuggaauuuaacaaugaguccuucaacuggacagguguggcccaaaaugggaccucuagcgcuugcaaacgccgauccgacaagucauuuuucagucgucucaacugguuacaccagcugaaguauaaauacccagcacuuaaugucacgaugcccaacaaugagaaguuugauaaauuguauauauggggagugcaucacccuggcacugacagcgaucagaucucucuguacgcccaggcuuccggcagaguaaccguuucaacaaagaggagccaacagacugugauuccaaacaucgggaguaaacccuggguccggggagugucuucccgcauuagcaucuacuggaccauagugaagccuggugacauucuacucaucaacucgacaggcaaucugauugccccaagaggguauuucaagaucaggucuggaaaauccucaaucaugcggagugacgcgccgauuggcaaguguaacagcgaaugcauaacccccaaugguuccaucccuaacgauaaaccauuucagaaugucaaccgcauuacguacgggcccuguccucgauauguuaagcagaauacucuuaaacuggcaacaggaaugagaaacgugccagagaagcaaaccaggggcaucuucggcgccauagcuggguuuauugaaaauggaugggaggguaugauggacggcugguacggguuccggcaccagaacucugagggaacuggccaggccgcagauuugaaaagcacacaagcugccaucaaucagaucaacgguaagcucaaucgucugauugaaaagaccaacgagaaauuucaucagaucgaaaaggaguucucagaaguagaggggcgcauucaggacuuagagaaauauguggaagauacgaagauagaccuguggaguuacaaugcggagcuccuugucgcccuggaaaaccaacacaccaucgauuugacagacuccgagaugaacaaacuauucgaaagaacuaagaagcagcugagggagaaugcagaggauaugggcaacggaugcuuuaaaauuuaucauaagugugacaaugcuugcaucggcagcauccggaacgggaccuacgaucacgacguguaccgagacgaagcccucaauaaccgcuuccagauuaaaggaguugagcugaagucugguuauaaagauuggauacuuuggaucucauuugcuauuaguugcuuccuguuguguaucgugcuccugggcuuuauuaugugggccugccagaaggggaauaucagauguaacauaugcaucuga

SEQ ID NO: 129788 - RNA, 1701 nt, Artificial Sequence; identical to SEQ ID NO: 128099
  derived and/or modified CDS sequence (opt3) from hemagglutinin__InfluenzaA__ABU92576

SEQ ID NO: 129789 - RNA, 1701 nt, Artificial Sequence; identical to SEQ ID NO: 128099
  derived and/or modified CDS sequence (opt3) from hemagglutinin__InfluenzaA__ABU92577

SEQ ID NO: 129790 - RNA, 1701 nt, Artificial Sequence; identical to SEQ ID NO: 128120
  derived and/or modified CDS sequence (opt3) from hemagglutinin__InfluenzaA__ABU92578

SEQ ID NO: 129791 - RNA, 1701 nt, Artificial Sequence; identical to SEQ ID NO: 128120
  derived and/or modified CDS sequence (opt3) from hemagglutinin__InfluenzaA__ABU92579

SEQ ID NO: 129792 - RNA, 1701 nt, Artificial Sequence; identical to SEQ ID NO: 128120
  derived and/or modified CDS sequence (opt3) from hemagglutinin__InfluenzaA__ABU92580

SEQ ID NO: 129793 - RNA, 1701 nt, Artificial Sequence; identical to SEQ ID NO: 129785
  derived and/or modified CDS sequence (opt3) from hemagglutinin__InfluenzaA__ABU92581

SEQ ID NO: 129794 - RNA, 1701 nt, Artificial Sequence
  derived and/or modified CDS sequence (opt3) from hemagglutinin__InfluenzaA__ABU92582
augaagaccaucauugcccugagcuacauacucugccuuguguucgcucagaaacugcccggcaacgacaauuccacagcaacuuuguguuuagggcaccaugccgucccuaacggaacgcugguuaagaccaucacaaaugaucaaauugaggugacuaacgcgaccgaacuuguacagucuucaaguacagguagaaucugcgacagcccacaccagauucucgauggcgagaauuguacccugaucgacgcccuucugggggauccgcauugcgacggauuucagaacaaagaaugggauuuguucguggagagguccaaggcuuauucuaauuguuaccccuaugacgucccugauuacgugucgcuccggucacugguugcaagcaguggcacucuggaauuuaacaaugaguccuucaacuggacagguguggcccaaaaugggaccucuagcgcuugcaaacgccgauccgacaagucauuuuucagucgucucaacugguuacaccagcugaaguauaaauacccagcacagaaugucacgaugcccaacaaugagaaguuugauaaacuuuauauauggggagugcaucacccuggcacugacagcgaucagaucucuuuguacgcccaagcuagcggcagaguaaccguuucaacaaagaggagccagcagacugugauuccaaacaucgggagucggcccuggguccgcggagugucuuccagaauuagcaucuacuggaccauagugaaaccuggugacauucugcuaaucaacucgacaggcaaucucauugccccaaggggguauuucaagauccggucuggaaaguccucaaucaugcgcagugacgcgccgauuggcaaauguaacagcgaaugcauaacccccaaugguuccaucccuaacgauaagccauuucagaaugucaaccgaauuacguacggggcaugucccagauauguuaaacaaaauacucugaagcuagccacaggaaugaggaacgugccugagaaacagacccggggcaucuucggcgcuauagccggguuuauugaaaauggaugggaggguaugauggacggcugguacggguuccgucaccagaacucugagggaacuggccaagcagcugaucugaaguccacacaggccgcgaucaaucagaucaacgguaaauugaaucgccucauugaaaagaccaacgagaaguuucaucagaucgaaaaagaguucucagaaguagaggggaggauucaagaccuggagaaguauguggaagauacgaaaauagacuuauggaguuacaaugccgagcugcucgucgcacuugaaaaccagcacaccaucgaucugacagacuccgagaugaacaaguuguucgaaagaacuaaaaagcagcuacgggagaaugcugaggauaugggcaacggaugcuuuaagauuuaucauaaaugugacaaugccugcaucggcagcauccgaaacgggaccuacgaucacgacguguaccgcgacgaagcucugaauaacagauuccagauuaagggaguugagcucaaaucugguuauaaggauuggauacuguggaucucauuugccauuaguugcuuccuucuguguaucguguugcucggcuuuauuaugugggcaugccaaaaagggaauaucagguguaacauaugcaucuga

SEQ ID NO: 129795 - RNA, 1701 nt, Artificial Sequence; identical to SEQ ID NO: 129794
  derived and/or modified CDS sequence (opt3) from hemagglutinin__InfluenzaA__ABU92583

SEQ ID NO: 129796 - RNA, 1701 nt, Artificial Sequence
  derived and/or modified CDS sequence (opt3) from hemagglutinin__InfluenzaA__ABU92584
augaagaccaucauugcccugagcuacauacucugccuuguguucgcucagaaacugcccggcaacgacaauuccacagcaacuuuguguuuagggcaccaugccgucccuaacggaacgcugguuaagaccaucacaaaugaucaaauugaggugacuaacgcgaccgaacuuguacagucuucaaguacagguagaaucugcgacagcccacaccagauucucgauggcgagaauuguacccugaucgacgcucuacugggggauccgcauugcgacggauuucagaacaaagaaugggauuuguucguggagagguccaaggccuauucuaauuguuaccccuaugacgucccugauuacgugucgcuccggucacugguugcaagcaguggcacucuggaauuuaacaaugaguccuucaacuggacagguguggcccaaaaugggaccucuagcgcuugcaaacgccgauccgacaagucauuuuucagucgucucaacugguuacaccagcugagauauaaguacccagcacuuaaugucacgaugcccaacaaugagaaauuugauaaguuguauauauggggagugcaucacccuggcacugacagcgaucagaucucucuguacgcccaggcuuccggcaggguaaccguuucaacaaaacggagccaacagacugugauuccaaacaucgggagucgccccugggucagaggagugucuuccaggauuagcaucuacuggaccauagugaagccuggugacauucuacucaucaacucgacaggcaaucugauugccccacggggguauuucaaaauccgcucuggaaaguccucaaucaugcgaagugacgcgccgauuggcaaguguaacagcgaaugcauaacccccaaugguuccaucccuaacgauaaaccauuucagaaugucaacagaauuacguacggggcaugucccagguauguuaagcagaaaacucuuaagcuggccacaggaaugcggaaugugccugagaaacaaacccguggcaucuucggcgcuauagccggguuuauugaaaacggaugggaggguaugauggacggcugguacggguuccgccaccagaauagcgagggaacuggccaggcagcugauuugaagucuacacaagccgcgaucaaccagaucaaugguaaacucaacagacugauugaaaagaccaaugagaaguuucaucagaucgaaaaagaguucucagaaguagaggggaggauucaggacuuagagaaguauguggaagauacgaaaauagaccuguggaguuacaacgccgagcuccuugucgcacuggaaaaucaacacaccaucgauuugacagacuccgagaugaacaagcuauucgaacggacuaaaaagcagcugcgagagaacgcugaggauaugggcaauggaugcuuuaagauuuaucauaaaugugacaacgccugcaucggcagcauccgcaaugggaccuacgaucacgacguguacagagacgaagcucucaacaauagguuccagauuaagggaguugagcugaaaucugguuauaaggauuggauacuuuggaucucauuugccauuaguugcuuccuguuguguaucgugcuccugggcuuuauuaugugggcaugccagaaagggaacauccgguguaauauaugcaucuga

SEQ ID NO: 129797 - RNA, 1701 nt, Artificial Sequence
  derived and/or modified CDS sequence (opt3) from hemagglutinin__InfluenzaA__ABU92586
augaagaccaucauugcccugagcuacauacucugccuuguguucgcucagaaacugcccggcaacgacaauuccacagcaacuuuguguuuagggcaccaugccgucccuaacggaacgaucguuaagaccauuacaaaugaucaaaucgaggugacuaacgcgaccgaacugguacagucuucaaguacagguggcauuugcgacagcccacaccagauccuagauggggagaauuguacccucauagacgcucugcuuggagauccgcagugcgacggcuuucaaaacaaaaagugggaucuguucguggaaagauccaaagccuauucuaauuguuaccccuaugacgucccugauuacgcaucguugaggucacucaucgccagcagugguacucuggaguuuaacaaugaauccuucaacuggacaggggugacccagaauggaacgucuagcgcuugcaagcggcgcuccaacucaaguuucuucagccgacugaauuggcucacucauuuaaaguuuaaauauccagcacugaacguuaccaugcccaauaacgaggaguucgacaaacuuuacauuuggggcgugcaccauccuggcacagauaacgaccagaucucuuuguaugcccaggcuuccgggcguauuacugucucaaccaagagaagccaacagacagugaucccaaauauaggaaguaggccccggguacgcgauauuccuucuagaaucuccauuuacuggaccaucguuaagccaggugacauccugcuaauuaacagcacgggcaaucucauagccccgaggggguacuuuaaaauccggucgggaaagucuuccauuaugcgcucagacgcgcccaucggcaaguguaacagugaaugcauaacuccuaaugguagcauuccaaacgauaaacccuuccagaaugugaaccgaaucacauauggggcauguccuagauacgucaagcagaauacccugaaacuugccacuggaaugaggaacgugccagagaagcaaacacggggcaucuuuggcgcuauugccggguucaucgaaaauggaugggaggguaugguggacggcugguauggguuucgucaccagaacuccgagggaauuggccaggcagcugaucugaaaucuacccaagccgcgauagaccagaucaaugguaaguugaaccgccucauugggaaaacgaaugaaaaguuccaccagaucgagaaggaauuuagcgaggucgaaggcagaauccaggaucuggagaaauacguugaggacaccaagauugauuuauggucauauaacgccgaacugcucguggcacuugagaaccaacauacaauagaccugacugauagugaaaugaauaaauuguuugagaggaccaagaaacagcuacgggaaaacgcugaggacaugggaaauggcugcuucaagaucuaccacaagugugauaacgccugcauuggguccauccgaaauggaacauaugaccaugacguauaccgcgaugaggcucugaacaauagauuucagauuaaagguguggaacucaagagcggcuacaaaaacuggauccuguggauaucuuucgccaucucaugcuuucuucugugugucgcauugcucggguucauuaugugggccugccagaagggaaauaucagguguaacauuugcaucuga

SEQ ID NO: 129798 - RNA, 1701 nt, Artificial Sequence
  derived and/or modified CDS sequence (opt3) from hemagglutinin__InfluenzaA__ABU92587
augaagaccaucauugcccugagcuacauacucugccuuguguucgcucagaaacugcccggcaacgacaauuccacagcaacuuuguguuuagggcaccaugccgucccuaacggaacgaucguuaagaccauuacaaaugaucaaaucgaggugacuaacgcgaccgaacugguacagucuucaaguacagguggcauuugcgacagcccacaccagauccuagauggggagaauuguacccucauagacgcucugcuuggagauccgcagugcgacggcuuucaaaacaaaaagugggaucuguucguggaaagauccaaagccuauucuaauuguuaccccuaugacgucccugauuacgcaucguugaggucacucaucgccagcagugguacucuggaguuuaacaaugaauccuucaacuggacaggggugacccagaauggaacgucuagcgcuugcaagcggcgcuccaacucaaguuucuucagccgacugaauuggcucacucauuuaaaguuuaaauauccagcacugaacguuaccaugcccaauaacgaggaguucgacaaacuuuacauuuggggcgugcaccauccuggcacauauaacgaucagaucucuuuguacgcccaggcuuccgggcguauuacugucucaaccaagagaagccaacagacagccaucccaaauauaggaaguaggccccgggugcgcgacauuccuucuagaaucuccauuuacuggaccaucguaaagccaggugauauccugcuaauuaacagcacgggcaaucucauagcgccgaggggguauuuuaaaauccggucgggaaagucuuccauuaugcgcucagacgcacccaucggcaaguguaacagugaaugcauaacuccuaaugguagcauuccaaacgacaaacccuuccagaauguuaaccgaaucacauacggggccuguccuagauaugugaagcagaauacccugaaacuugcuacuggaaugaggaacgucccagagaagcaaacacggggcaucuuuggcgccauugcaggguucaucgaaaauggaugggaggguaugguggauggcugguacggguuucgucaccagaacuccgagggaauuggccaggcugccgaccugaaaucuacccaagcggccauagaucagaucaaugguaaguugaaccgccucauugggaaaacgaaugaaaaguuccaccagaucgagaaggaauuuagcgagguggaaggcagaauccaggaccuggagaaauaugucgaggauaccaagauugacuuauggucauacaacgcagaacugcucguugcucuugagaaccaacauacaauagaucugacugacagugaaaugaauaaauuguuugagaggaccaagaaacagcuacgggaaaacgccgaggauaugggaaauggcugcuucaagaucuaucacaagugugacaacgcuugcauuggguccauccgaaauggaacauacgaucaugacguguaccgcgacgaggcccugaacaauagauuucagauuaaagguguagaacucaagagcggcuauaaagauuggauccuguggauaucuuucgcaaucucaugcuuucuucuguguguggccuugcucggguucauuaugugggcuugccagaagggaaacaucagguguaauauuugcaucuga

SEQ ID NO: 129799 - RNA, 1701 nt, Artificial Sequence
  derived and/or modified CDS sequence (opt3) from hemagglutinin__InfluenzaA__ABU92588
augaagaccaucauugcccugagcuacauacucugccuuguguucgcucagaaacugcccggcaacgacaauuccacagcaacuuuguguuuagggcaccaugccgucccuaacggaacgaucguuaagaccauuacaaaugaucaaaucgaggugacuaacgcgaccgaacugguacagucuucaaguacagguggcauuugcgacagcccacaccagauccuagauggggagaauuguacccucauagacgcucugcuuggagauccgcagugcgacggcuuucaaaacaaaaagugggaucuguucguggaaagauccaaagccuauucuaauuguuaccccuaugacgucccugauuacgcaucguugaggucacucguggccagcagugguacucuggaguuuaacaaugaauccuucaacuggacagggguuacccagaauggaacgucuagcgcuugcaagcggaaguccaacaauucauuuuucagucgccugaacuggcucacucauuuaaaauuuaaguauccagcacugaaugugaccaugcccaacaacgagaaauucgacaaacuuuacaucuggggcguccaccauccuggcacagauaaugaccagauuagcuuguaugcccaggcuucugggcgaaucacuguguccaccaagcguucacaacagacaguaauuccaaacaucggaagcagacccaggguucgggauauaccuagucgcauuucuaucuacuggaccauugugaagccaggugacauccugcuaaucaauuccacgggcaaccucauugccccgagaggguacuuuaagauaaggagcggaaaaucgucuaucaugcgguccgacgcgcccauuggcaaguguaauucagagugcaucacuccuaacgguaguauaccaaaugauaaacccuuccagaacgucaaucgcauuacauauggggcauguccucgauacgugaagcagaacacccugaaacuugccacuggaaugagaaaugugccagaaaagcaaacaaggggcaucuuuggcgcuaucgccggguucauugagaacggaugggaagguauggucgacggcugguauggguuucggcaccagaauagcgagggaaucggccaggcagcugaucugaaauccacccaagccgcgauuaaccagauaaaugguaaguugaaccgucucaucgggaagacgaacgagaaauuccaccagauugaaaaggaguucucugaaguugagggccgcauccaggaccuggaaaaauacguggaggauaccaagaucgacuuauggagcuauaaugccgaguuucugguagcacucgaaaaccaacauacaauugaucuuacugacucagagaugaauaaacuguucgaaagaaccaagaagcaguugagggagaacgcugaagauaugggaaauggcugcuuuaaaauauaccacaagugugacaacgccugcaucgggaguauucggaauggaacauaugaucaugacguguaccgagacgaggcucuaaacaaucgcuuccagaucaaaggugucgagcugaaguccggcuacaaagauuggauucucuggaucagcuuugccauaucuugcuuccugcuuuguguggcacuguugggguuuaucaugugggccugccagaagggaaacauuagauguaauaucugcauuuga

SEQ ID NO: 129800 - RNA, 1701 nt, Artificial Sequence; identical to SEQ ID NO: 128681
  derived and/or modified CDS sequence (opt3) from hemagglutinin__InfluenzaA__ABU92590

SEQ ID NO: 129801 - RNA, 1701 nt, Artificial Sequence
  derived and/or modified CDS sequence (opt3) from hemagglutinin__InfluenzaA__ABU92591
augaagaccaucauugcccugagcuacauacucugccuuguguucgcucagaaacugcccggcaacgacaauuccacagcaacuuuguguuuagggcaccaugccgucccuaacggaacgaucguuaagaccauuacaaaugaucaaaucgaggugacuaacgcgaccgaacugguacagucuucaaguacagguggcauuugcgacagcccacaccagauccuagauggggagaauuguacccucauagacgcucugcuuggagauccgcagugcgacggcuuucaaaacaaaaagugggaucuguucguggaaagauccaaagccuauucuaauuguuaccccuaugacgucccugauuacgcaucguugaggucacucaucgccagcagugguacucuggaguuuaacaaugaauccuucaacuggacaggggugacccagaauggaacgucuagcgcuugcaagcggcgcuccaacucaaguuucuucagccgacugaauuggcucacucauuuaaaguuuaaauauccagcacugaacguuaccaugcccaauaacgaggaguucgacaaacuuuacauuuggggcgugcaccauccuggcacagauaacgaccagaucucuuuguaugcccaggcuuccgggcguauuacugucucaaccaagagaagccaacagacagugaucccaaauauaggaaguaggccccggguacgcgauauuccuucuagaaucuccauuuacuggaccaucguuaagccaggugacauccugcuaauuaacagcacgggcaaucucauagccccgaggggguacuuuaaaauccggucgggaaagucuuccauuaugcgcucagacgcgcccaucggcaaguguaacagugaaugcauaacuccuaaugguagcauuccaaacgauaaacccuuccagaaugugaaccgaaucacauauggggcauguccuagauacgucaagcagaauacccugaaacuugccacuggaaugaggaacgugccagagaagcaaacacggggcaucuuuggcgcuauugccggguucaucgaaaauggaugggaggguaugguggacggcugguauggguuucgucaccagaacuccgagggaauuggccaggcagcugaucugaaaucuacccaagccgcgauagaccagaucaaugguaaguugaaccgccucauugggaaaacgaaugaaaaguuccaccagaucgagaaggaauuuagcgaggucgaaggcagaauccaggaucuggagaaauacguugaggacaccaagauugauuuauggucauauaacgccgaacugcucguggcacuugagaaccaacauacaauagaccugacugauagugaaaugaauaaauuguuugagaggaccaagaaacagcuacgggaaaacgcugaggacaugggaaauggcugcuucaagaucuaccacaagugugauaacgccugcauuggguccauccgaaauggaacauaugaccaugacguauaccgcgaugaggcucugaacaauagauuucagauuaaagguguggaacucaagagcggcuacaaagacuggauccuguggauaucuuucgccaucucaugcuuucuucugugugucgcauugcucggguucauuaugugggccugccagaagggaaacaucagguguaauauuugcaucuga

SEQ ID NO: 129802 - RNA, 1701 nt, Artificial Sequence; identical to SEQ ID NO: 129801
  derived and/or modified CDS sequence (opt3) from hemagglutinin__InfluenzaA__ABU92592

SEQ ID NO: 129803 - RNA, 1701 nt, Artificial Sequence
  derived and/or modified CDS sequence (opt3) from hemagglutinin__InfluenzaA__ABU92593
augaagaccaucauugcccugagcuacauacucugccuuguguucgcucagaaacugcccggcaacgacaauuccacagcaacuuuguguuuagggcaccaugccgucccuaacggaacgaucguuaagaccauuacaaaugaucaaaucgaggugacuaacgcgaccgaacugguacagucuucaaguacagguggcauuugcgacagcccacaccagauccuagauggggagaauuguacccucauagacgcucugcuuggagauccgcagugcgacggcuuucaaaacaaaaagugggaucuguucguggaaagauccaaagccuauucuaauuguuaccccuaugacgucccugauuacgcaucguugaggucacucguggccagcagugguacucuggaguuuaacaaugaauccuucaacuggacagggguuacccagaauggaacgucuagcgcuugcaagcggcgcuccaacaauucauuuuucagucgacugaacuggcucacucauuuaaaguuuaaauauccagcacugaaugugaccaugcccaacaacgagaaguucgacaaacuuuacaucuggggcguccaccauccuggcacagauaaugaccagauuuuucuuuaugcccaggcuagcgggcguaucacugugucuaccaagagaucccaacagacaguaauuccaaacaucggaucaaggccccggguucgcaauauaccuagcagaauuaguaucuacuggaccauugugaaaccaggugauauccugcuaaucaacucuacgggcaaucucauugccccgaggggguacuucaagauacgguccggaaagagcucgaucaugcgcucugacgcgcccauuggcaaauguaacuccgagugcaucacuccuaaugguucaauaccaaacgacaagcccuuucagaaugucaaccgaauuacauauggggcauguccuagauacgugaaacagaauacccugaaguuggccacuggaaugaggaacgugccagaaaaacaaacacggggcaucuucggcgcuaucgccggguuuauugagaauggaugggaagguauggucgauggcugguauggguuccgucaccagaacagugagggaaucggccaggcagcugaccugaaaagcacccaagccgcgauugaucagauaaaugguaaauugaaccgccucaucgggaagacgaacgagaaguuccaccagauugaaaaagaguuuuccgaaguugagggcagaauccaggaccuggaaaaguacguggaggauaccaaaaucgacuuauggucuuauaaugccgagcugcucguagcacuugaaaaccaacauacaauugaucugacugacagcgagaugaauaaguuguucgaaaagaccaagaagcagcuaagggagaacgcugaagauaugggaaauggcugcuuuaaaauauaccacaagugugacaacgccugcaucgggucaauucggaauggaacauaugaucaugacguguaccgagacgaggcucugaacaaucgcuuccagaucaaaggugucgagcucaagaguggcuacaaagauuggauucuguggaucuccuuugccauaagcugcuuccuucuguguguggcauugcucggguuuaucaugugggccggacagaagggcaacaagagaugcaauauuuguaucuga

SEQ ID NO: 129804 - RNA, 1701 nt, Artificial Sequence
  derived and/or modified CDS sequence (opt3) from hemagglutinin__InfluenzaA__ABU92594
augaagaccaucauugcccugagcuacauacucugccuuguguucgcucagaaacugcccggcaacgacaauuccacagcaacuuuguguuuagggcaccaugccgucccuaacggaacgaucguuaagaccauuacaaaugaucaaaucgaggugacuaacgcgaccgaacugguacagucuucaaguacaggugagauuugcaauagcccacaccagauccuagacggcgaauccuguacccucauagaugcucugcuuggggacccgcagugcgauggauuucaaaacaaaaagugggaccuguucguggagagaucuaaagccuauucgaauuguuaccccuaugaugucccugacuacgcaucauugaggagccucguggccaguuccggcacucuggaauuuaacaaugagucuuucaacuggacagguguuacccagaaugggacgagcuccgcuugcaagcggcgcucaaacaauagcuuuuucagucgacugaacuggcucacucauuuaaaguuuaaauauccagcacugaaugugaccaugcccaacaacgagaaguucgauaaacuuuacaucuggggaguccaccauccuggcacagacaaugaucagauuuuucuuuaugcccaggcuucuggccguaucacuguguccaccaagagaucacaacagacaguaauuccaaacaucgggagcaggccccggguucgcaauauaccuaguagaauuucuaucuacuggaccauugugaaaccaggagacauccugcuaaucaacuccacggguaaucucauugccccgaggggcuacuucaagauacggagcgggaagucgucuaucaugcgcuccgaugcgcccauuggaaaauguaacucagaaugcaucacuccuaauggcaguauaccaaacgacaagcccuuucagaaugucaaccgaauuacauauggugcauguccuagauacgugaaacagaauacccugaaguuggccacugggaugaggaacgugccagagaaacaaacacggggaaucuucggcgcuaucgccggcuuuauugaaaaugggugggagggaauggucgacgguugguauggcuuccgucaccagaacagcgaggggaucggacaggcagcugaucugaaguccacccaagccgcgauuaaucagauaaacggcaaauugaaccgccucaucgguaagacgaaugaaaaguuccaccagauugagaaagaauuuucugagguugaagggagaauccaggaccuggagaaguacguggaggauaccaaaaucgacuuauggagcuauaacgccgaacugcucguagcacuugagaaucaacauacaauugaucugacugacucagaaaugaacaaguuguucgagaggaccaaaaagcagcuacgggaaaaugcugaggauaugggcaacggaugcuuuaagauauaccacaaaugugacaaugccugcaucggcaguauucgaaacgggacauaugaucaugacguguaccgcgaugaggcucugaauaacagauuccagaucaagggagucgaacucaaauccgguuacaaggacuggauucuguggaucagcuuugccauaucuugcuuccuucuguguguggcauugucaggcuuuaucaugugggccugccagaaagggaauauuagguguaacaucugcauuuga

SEQ ID NO: 129805 - RNA, 1701 nt, Artificial Sequence
  derived and/or modified CDS sequence (opt3) from hemagglutinin__InfluenzaA__ABU92595
augaagaccaucauugcccugagcuacauacucugccuuguguucgcucagaaacugcccgagaacgacaauuccacagcaacuuuguguuuaggccaccaugccgucccuaacgggacgaucguuaagaccauuacaaaugaucaaaucgaagugacuaacgcgaccgagcugguacagucuucaaguacaggagguauuugcgacagcccacaccagauccuagauggcgaaaauuguacccucauagacgcucugcuuggggauccgcagugcgacggauuucaaaacaaaaagugggaucuguucguggagagauccaaagccuauucuaauuguuaccccuaugacgucccugauuacgcaucguugaggucacucguggccagcaguggcacucuggaauuuaacaaugaguccuucaacuggacagguguuacccagaaugggacgucuagcgcuugcaagcggcgcuccaacaauucauuuuucagucgacugaacuggcucacucauuuaaaguuuaaauauccagcacugaaugugaccaugcccaacaacgagaaguucgacaaacuuuacaucuggggaguccaccauccuggcacagauaaugaccagaucuuuuuguaugcccaggcuagcggccguauuacugugucuaccaagagaucccaacagacaguaauuccaaacaucgggucaaggccccggguucgcaauauaccuagcagaauuaguaucuacuggaccauugugaaaccaggagauauccugcuaaucaacucuacggguaaucucauugccccgaggggcuacuucaagauacgguccggaaagagcucgaucaugcgcucugacgcgcccauugggaaauguaacuccgaaugcaucacuccuaauggcucaauaccaaacgacaagcccuuucagaaugucaaccgaauuacauauggugcauguccuagauacgugaaacagaauacccugaagcuggccacugggaugaggaacgugccagagaaacaaacacggggaaucuucggcgcuaucgccggcuuuauugaaaaugggugggagggaauggucgaugguugguauggcuuccgucaccagaacagugaggggaucggacaggcagcugaccuuaagagcacccaagccgcgauugaucagauaaauggcaaauugaaccgccucaucgguaagacgaacgaaaaguuccaccagauugagaaagaauuuuccgagguugaagggagaauccaggaccuggagaaguacguggaggauaccaaaaucgacuuauggucuuauaaugccgaacugcucguagcacuugagaaccaacauacaauugaucugacugacagcgaaaugaauaaguuguucgagaaaaccaagaagcagcuaagggaaaacgcugaggauaugggcaauggaugcuuuaaaauauaccacaagugugacaacgccugcaucggcucaauucggaaugggacauaugaucaugacguguaccgagacgaggcucugaacaaucgcuuccagaucaaaggagucgaacucaagagugguuacaaagauuggauucuguggaucuccuuugccauaagcugcuuccuucuguguguggcauugcucggcuuuaucaugugggccugccagaaggggaacauuagauguaauaucugcauuuga

SEQ ID NO: 129806 - RNA, 1701 nt, Artificial Sequence
  derived and/or modified CDS sequence (opt3) from hemagglutinin__InfluenzaA__ABU92596
augaagaccaucauugcccugagcuacauacucugccuuguguucgcucagaaacugcccggcaacgacaauuccacagcaacuuuguguuuagggcaccaugccgucccuaacggaacgaugguuaagaccaucacaaaugaucaaauugaggugacuaacgcgaccgaacugguacagucuucaaguacaggugagaucugcgacagcccacaccagauucuagauggcgaaaauuguacccucaucgacgcucugcuuggggauccgcagugcgacggauuucaaaacaaaaagugggaucuguucguggagagauccaaagcccauucuaauuguuaucccuacgacgucccugauuaugcaucguugaggucacucauagccagcaguggcacucuggaauuuaacaaugaguccuucaacuggacaggugugacccagaaugggacgucuagcgcuugcaagcggcgcuccgacaacucauuuuucagucgacugaauuggcucacucacuuaaaguuuaaauacccagcacugaacguuaccaugcccaauaacgaggaguucgauaaacuuuauaucuggggagugcaucacccuggcacagacaacgaucagauuagcuuguacgcccaggcuucuggccguaucacugucuccaccaagagaucacaacagacagugauuccaaauaucgggagcaggccccggguacgcgacauaccuaguagaauuucuaucuauuggaccauuguuaagccaggagacauccugcuaaucaacuccacggguaaucucauugccccgaggggcuacuuuaaaauacggagcgggaagucgucuaucaugcgcuccgaugcgcccauuggaaaguguaacucaggcugcaucacuccuaaugguaguauaccaaacgacaaacccuuccagaaugugaaccgaauuacauacggggcauguccuagauaugucaagcagaauacccugaaacuugccacuggaaugaggaacgugccagaaaagcaaacacggggcaucuuuggcgcuaucgccggguucauugaaaauggaugggaggguaugguggauggcugguacggguuucgucaccagaacagcgagggaaucggccaggcagcugaccugaaauccacccaagccgcgauugaucagauaaaugguaaguugaaccgccucaucgggaaaacgaaugaaaaguuccaucagauugagaaggaguucucugaagucgaaggcagaauccaggaccuggagaaauauguugaggauaccaagaucgacuuauggagcuacaacgccgaacugcucguggcacuugagaaccaacacacaauugaucugacugacucagaaaugaauaaauuguuugagaggaccaagaaacagcuacgggaaaacgcugaggauaugggaaauggcugcuucaagauauaucauaagugugacaacgccugcaucgggaguauucgaaauggaacauacgaccacgauguauaucgcgacgaggcucugaacaauagauuucagaucaaagguguggaacucaaguccggcuacaaagauuggauucuguggaucagcuucgccauaucuugcuuucuucugugugucgcauugcucggguucaucaugugggccugccagaagggaaacauuagguguaauaucugcauuuga

SEQ ID NO: 129807 - RNA, 1701 nt, Artificial Sequence; identical to SEQ ID NO: 128678
  derived and/or modified CDS sequence (opt3) from hemagglutinin__InfluenzaA__ABU92597

SEQ ID NO: 129808 - RNA, 1701 nt, Artificial Sequence; identical to SEQ ID NO: 128121
  derived and/or modified CDS sequence (opt3) from hemagglutinin__InfluenzaA__ABU92601

SEQ ID NO: 129809 - RNA, 1701 nt, Artificial Sequence; identical to SEQ ID NO: 128121
  derived and/or modified CDS sequence (opt3) from hemagglutinin__InfluenzaA__ABU92602

SEQ ID NO: 129810 - RNA, 1701 nt, Artificial Sequence
  derived and/or modified CDS sequence (opt3) from hemagglutinin__InfluenzaA__ABU92603
augaagaccaucauugcccugagcuacauacucugccuuguguucgcucagaaacugcccggcaacgacaauuccacagcaacuuuguguuuagggcaccaugccgucccuaacggaacgaucguuaagaccauuacaaaugaucaaaucgaggugacuaacgcgaccgaacugguacagauuucuucaacaggugagaucugcgacaguccacaccagauacuagauggcgaaaauuguacccucaucgacgcucugcuuggggauccgcagugcgacggauuucaaaacaaaaagugggaucuguucguggagagaagcaaagccuauuccaauuguuaccccuaugacgucccugauuacgcaucuuugaggucgcucguggccucaagcggcacucuggaauuuaacaaugagaguuucgacuggacagguguuacccagaacgggacguccucugcuugcaagcggcgcagcgauaaguccuuuuucucacgacugaauuggcucacucauuuaaaauauaaguacccagcacugaacgugaccaugcccaauaacgagaaauuugacaaacuuuauauuuggggaguccaccauccuggcacagauagugaccagaucagcuuguacgcccaggcuucuggccguauuacuguguccaccaagagaucacaacagacaguaaucccaaauauagggagcaggccccggguucgcgacgugaguucuagaauuuccaucuacuggaccauugucaagccuggagauauccugcuaaucaacagcacggguaaccucauugccccaaggggcuauuucaagauacggucggggaaaucuuccaucaugcgcucagacgcgccgauuggaaaguguaauagugaaugcaucacucccaacggcagcauaccuaaugauaaaccauuucagaacgugaaucgaauuacauacggugcaugucccagauaugugaagcagaacacccugaaacuugccacugggaugaggaaugucccugagaagcaaacacggggaaucuucggcgcuaucgccggcuuuauugaaaacgggugggagggaaugguugacgguugguacggcuuccgucaccaaaauuccgaggggaccggacaggcagcugaucugaaaucuacgcaggccgcgaucaaccagauuaauggcaaguugaaccgccucauagguaagaccaaugaaaaauuucaccagaucgagaaggaguucagcgaaguggaagggaggauucaggaccuggagaaauauguagaggauacaaagaucgacuuauggucauacaacgccgaacugcucguggcacuugagaaucaacauacuaucgaucugaccgacagugaaaugaacaaauuguucgagagaacaaagaagcagcuacgggaaaacgcugaggauaugggcaauggaugcuuuaaaauuuaucacaagugugacaacgccugcauaggcuccauccgaaaugggacuuacgaccaugaugucuaccgcgacgaggcucugaacaauagauuccagauuaaaggaguggaacucaagagcgguuauaaagauuggauccuguggauuucuuuugccaucucaugcuuccuucuguguguugcauugcucggcuuuauaaugugggccugccagaaggggaacaucagguguaauauuugcaucuga

SEQ ID NO: 129811 - RNA, 1701 nt, Artificial Sequence; identical to SEQ ID NO: 128121
  derived and/or modified CDS sequence (opt3) from hemagglutinin__InfluenzaA__ABU92604

SEQ ID NO: 129812 - RNA, 1701 nt, Artificial Sequence; identical to SEQ ID NO: 129810
  derived and/or modified CDS sequence (opt3) from hemagglutinin__InfluenzaA__ABU92605

SEQ ID NO: 129813 - RNA, 1701 nt, Artificial Sequence; identical to SEQ ID NO: 129810
  derived and/or modified CDS sequence (opt3) from hemagglutinin__InfluenzaA__ABU92606

SEQ ID NO: 129814 - RNA, 1701 nt, Artificial Sequence; identical to SEQ ID NO: 128660
  derived and/or modified CDS sequence (opt3) from hemagglutinin__InfluenzaA__ABU92608

SEQ ID NO: 129815 - RNA, 1701 nt, Artificial Sequence; identical to SEQ ID NO: 128660
  derived and/or modified CDS sequence (opt3) from hemagglutinin__InfluenzaA__ABU92609

SEQ ID NO: 129816 - RNA, 1701 nt, Artificial Sequence
  derived and/or modified CDS sequence (opt3) from hemagglutinin__InfluenzaA__ABU92610
augaagaccaucauugcccugagcuacauacucugccuuguguucgcucagaaacugcccggcaacgacaauuccacagcaacuuuguguuuagggcaccaugccgucccuaacggaacgaucguuaagaccauuacaaaugaucaaaucgaggugacuaacgcgaccgaacugguacagucuucaaguacaggugagauuugcgacagcccacaccagauccuagauggcgaaaauuguacccucauagacgcucugcuuggggauccgcagugcgacggauuucaaaacaaaaagugggaucuguucguggagagauccaaagccuauucuaauuguuaccccuaugacgucccugauuacgcaucguugaggucacucguggccagcaguggcacucuggaauuuaacaaugaguccuucaacuggacagguguuacccagaaugggacgucuagcgcuugcaagcggcgcuccaacaauucauuuuucagucgacugaacuggcucacucauagcaaguuuaaauauccagcauuaaaugugaccaugcccaacaacgagaaguucgacaaacuguacaucuggggaguccaccauccuggcacagauaaugaccagauuuuucuuuaugcccaggcuucuggccguaucacuguguccaccaagagaucacaacagacaguaauuccaaacaucgggagcaggccccggguucgcaauauaccuaguagaauuucuaucuacuggaccauugugaaaccaggagauaucuugcugaucaacuccacggguaaucuaauugccccgaggggcuacuucaagauacggagcgggaagucgucuaucaugcgcuccgacgcgcccauuggaaaauguaacucagaaugcaucacuccuaauggcaguauaccaaacgacaagcccuuucagaaugucaaccgaauugcauauggugccuguccuagauacgugaaacagaauacacucaagcuggcuaccgggaugaggaacgugccagagaaacaaacucggggaaucuucggcgccaucgcaggcuuuauugaaaaugggugggagggaauggucgaugguugguauggcuuccgucaccagaacagcgaggggaucggacaggcugccgaccuuaaguccacacaagcggccauuaaucagauaaacggcaaacugaaccgcuugaucgguaagaccaaugaaaaguuccaccagauugagaaagaauuuucugagguugaagggagaauccaggaucucgagaaguacguggaggacacgaaaaucgaucuguggagcuauaacgcagaauuacugguagcucucgagaaucaacauaccauugaccuuacagauucagaaaugaacaagcuguucgagaggacuaaaaagcaguugcgggaaaaugccgaggacaugaguaacggcugcuuuaagauauaccacaaaugugauaaugcuugcaucggauccauucgaaacggcaccuaugaccaugauguguaccgcgacgaggcccuaaauaacagauuccagaucaagggggucgaacugaaaagcggauacaaggacuggauucucuggaucucuuuugcaauaucaugcuuccugcuuugugugguucuguuggguuuuaucaugugggccugccagaaaggcaauauuagguguaacaucugcauuuga

SEQ ID NO: 129817 - RNA, 1701 nt, Artificial Sequence
  derived and/or modified CDS sequence (opt3) from hemagglutinin__InfluenzaA__ABU92611
augaagaccaucauugcccugagcuacauacucugccuuguguucgcucagaaacugcccggcaacgacaauuccacagcaacuuuguguuuagggcaccaugccgucccuaacggaacgaucguuaagaccauuacaaaugaucaaaucgaggugacuaacgcgaccgaacugguacagucuucaaguacagguggcauuugcgacagcccacaccagauccuagauggggagaauuguacccucauagacgcucugcuuggagauccgcagugcgacggcuuucaaaacaaaaagugggaucuguucguggaaagauccaaagccuauucuaauuguuaccccuaugacgucccugauuacgcaucguugaggucacucaucgccagcagugguacucuggaguuuaacaaugaauccuucaacuggacaggggugacccagaauggaacgucuagcgcuugcaagcggcgcuccaacaauucauuuuucagucgacugaacuggcucacucauuuaaaguuuaaauauccagcacugaauguuaccaugcccaacaacgaggaguucgacaaacuuuacauuuggggcgugcaccauccuggcacagauaaugaccagaucagcuuguaugcccaggcuucugggaagauuacugucuccaccaagcguucacaacagacagugaucccaaacauaggaagcagacccaggguacgggauauuccuagucgcaucucuauuuacuggaccaucguuaaaccaggugacauccugcuaauuaauuccacgggcaaccucauagccccgagaggguacuuuaagaucaggagcggaaagucgucuauuaugcgguccgacgcgcccaucggcaaauguaauucagaaugcauaacuccuaacgguaguauuccaaaugauaagcccuuccagaacgugaaucgcaucacauauggggcauguccucgauacgucaaacagaacacccugaaacuugccacuggaaugagaaaugugccagagaagcaaacaaggggcaucuuuggcgcuauugccggguucaucgaaaacggaugggaggguaugguggacggcugguauggguuucggcaccagaauagcgagggaauuggccaggcagcugaucugaaguccacccaagccgcgauagaccagaucaacgguaaauugaaucgucucauugggaagacgaacgaaaaguuccaccagaucgagaaagaguucucugaagucgaaggccgcauccaggaucuggagaaguacguugaggacaccaaaauugauuuauggagcuauaacgccgaacugcucguggcacuugagaaucaacauacaauagaccugacugauucagaaaugaacaaguuguuugagagaaccaaaaagcagcuaagggaaaaugcugaggacaugggaaacggcugcuucaagaucuaccacaaaugugauaaugccugcauugggaguauccggaacggaacauaugaccaugacguauaccgagaugaggcucugaauaaccgcuuucagauuaaggguguggaacucaaauccggcuacaaggacuggauccuguggaucagcuucgccauaucuugcuuucuucugugugucgcauugcucggguucauuaucugggccugccugaaaggaaauauuagauguaacaucugcauauga

SEQ ID NO: 129818 - RNA, 1701 nt, Artificial Sequence
  derived and/or modified CDS sequence (opt3) from hemagglutinin__InfluenzaA__ABU92612
augaagaccaucauugcccugagcuacauacucugccuuguguucgcucagaaacugcccggcaacgacaauuccacagcaacuuuguguuuagggcaccaugccgucccuaacggaacgaugguuaagaccaucacaaaugaucaaauugaggugacuaacgcgaccgaacugguacagucuucaaguacagguggcaucugcgacagcccacaccagauucuagauggggagaauuguacccucaucgacgcucugcuuggagauccgcagugcgacggcuuucaaaacaaaaagugggaucuguucguggaaagauccaaagcccauucuaauuguuaucccuacgacgucccugauuaugcaucguugaggucacucguggccagcagugguacucuggaguuuaacaaugaauccuucaacuggacagggguuacccagaauggaacgucuagcgcuugcaagcggcgcuccaacaauucauuuuucagucgacugaacuggcucacucacuuaaaguuuaaauacccagcacugaaugugaccaugcccaacaacgagaaguucgacaaacuuuauauauggggcguccaucacccuggcacagauaaugaccagaucagcuuguacgcccaggcuucugggcguauuacuguguccaccaagagaucacaacagacaguaaucccaaacauuggaagcaggccccggguucgcgauaucccuaguagaauaucuauuuauuggaccaucgugaaaccaggugacauucugcuaaucaauuccacgggcaaccucaucgccccgaggggguacuuuaagauucggagcggaaagucgucuauaaugcgcuccgacgcgcccaucggcaaauguaauucagagugcauuacuccuaacgguaguaucccaaauaacaagcccuuccagaaugucaaccgaauaacauacggggcauguccuagauaugugaaacagaauacccugaaacuugccacuggaaugaggaacgugccagaaaagcaaacacggggcauuuuuggcgcuaucgccggguucaucgagaauggaugggaagguauggucgauggcugguacggguuucgucaccagaacagcgagggaauuggccaggcagcugaccugaaguccacccaagccgcgaucaaucagauuaacgguaaauugaaccgccucauagggaagacgaaugagaaguuccaucagaucgaaaaagaguucucugaaguugagggcaggauucaggaucuggaaaaguauguggaggacaccaaaaucgauuuauggagcuacaacgccgagcugcucguagcacuugaaaaucaacacacaaucgaccugacugauucagagaugaacaaguuguuugaaagaaccaaaaagcagcuacgggagaaugcugaagacaugggaaacggcugcuucaagauuuaucauaaaugugauaaugccugcauagggaguauccgaaacggaacauacgaccacgauguguaucgcgacgaggcucugaauaacagauuucagauuaagggugucgagcucaaauccggcuacaaggacuggauccuguggauuagcuucgccaucucuugcuuucuucuguguguggcauugcucggguucauaaugugggccugccagaaaggaaauaucagguguaacauuugcaucuga

SEQ ID NO: 129819 - RNA, 1701 nt, Artificial Sequence; identical to SEQ ID NO: 129306
  derived and/or modified CDS sequence (opt3) from hemagglutinin__InfluenzaA__ABU92613

SEQ ID NO: 129820 - RNA, 1701 nt, Artificial Sequence; identical to SEQ ID NO: 129805
  derived and/or modified CDS sequence (opt3) from hemagglutinin__InfluenzaA__ABU92614

SEQ ID NO: 129821 - RNA, 1701 nt, Artificial Sequence
  derived and/or modified CDS sequence (opt3) from hemagglutinin__InfluenzaA__ABU92615
augaagaccaucauugcccugagcuacauacucugccuuguguucgcucagaaacugcccggcaacgacaauuccacagcaacuuuguguuuagggcaccaugccgucccuaacggaacgaucguuagaaccauuacaaaugaucaaaucgaggugacuaacgcgaccgaacugguacagucuucaaguacagguggcauuugcgacagcccacaccagauccuagauggggagaauuguacccucauagacgcucugcuuggagauccgcagugcgacggcuuucaaaacaagaaaugggaucuguucguggaaagguccaaggccuauucuaauuguuaccccuaugacgucccugauuacgcaucguugcggucacucguggccagcagugguacucuggaguuuaacaaugaauccuucaacuggacagggguuacccagaauggaacgucuagcgcuugcaaacgccgauccaacaauucauuuuucagucgucugaacuggcucacucauuuaaaguuuaaguauccagcacugaaugugaccaugcccaacaacgagaaauucgacaaacuuuacaucuggggcguccaccauccuggcacagauaaugaccagauuagcuuguaugcccaggcuucugggagaaucacuguguccaccaagaggucacaacagacaguaauuccaaacguuggaagccggccccgcgugagagauaucccuaguaggauaucuauuuacuggaccaucgucaagccaggugacauucugcuaaucaauuccacgggcaaccucaucgccccgcggggguacuuuaaaauucgcagcggaaagucgucuauaaugcgauccgacgcgcccaucggcaaguguaauucagagugcauuacuccuaacgguaguaucccaaaugauaaacccuuccagaacgugaauagaauaacauauggggcauguccuagguacgugaagcagaacacccugaaacuugccacuggaaugcggaaugucccagaaaagcaaacacguggcauuuuuggcgcuaucgccggguucaucgagaacggaugggaagguaugguugacggcugguauggguuucgccaccagaauagcgagggaauuggccaggcagcugaucugaaauccacccaagccgcgaucaaccagauuaaugguaaguugaacagacucauagggaaaacgaacgagaaguuccaccagaucgaaaaggaguucucugaaguggagggcaggauucaggaccuggaaaaauacguagaggauaccaagaucgacuuauggagcuauaaugccgagcugcucguggcacuugaaaaccaacauacaaucgaucugacugacucagagaugaauaaauuguuugaacggaccaagaaacagcuacgagagaacgcugaagauaugggaaauggcugcuucaagauuuaccacaagugugacaacgccugcauagggaguauccgcaauggaacauaugaucaugacgucuacagagacgaggcucugaacaauagguuucagauuaaagguguggagcucaaguccggcuacaaagauuggauccuguggauuagcuucgccaucucuugcuuucuucuguguguugcauugcucggguucauaaugugggccugccagaagggaaacauccgguguaauauuugcaucuga

SEQ ID NO: 129822 - RNA, 1701 nt, Artificial Sequence
  derived and/or modified CDS sequence (opt3) from hemagglutinin__InfluenzaA__ABU92617
augaagaccaucauugcccugagcuacauacucugccuuguguucgcucagaaacugcccggcaacgacaauuccacagcaacuuuguguuuagggcaccauucugucccuaacggaacgaucguuaagaccauuacaaaugaucaaaucgaggugacuaacgccaccgaacugguacagucaaguagcacagguggcauuugcgacuccccacaccagauccuagauggggagaauuguacccucauagacgcgcugcuuggagauccgcagugcgacggcuuucaaaacaaaaagugggaucuguucguggaaagaucuaaggcuuauucgaauuguuaccccuaugacgucccugauuacgccucauugaggagccucaucgcaaguuccgguacucuggaguuuaacaaugaaucuuucaacuggacaggggugacccagaauggaacgagcuccgccugcaagcggcgcucaaacaguagcuuuuucucucgacugaauuggcucacucauuuaaaguuuaaauauccagcucugaacguuaccaugcccaauaacgaggaguucgacaaacuuuacauuuggggcgugcaccauccuggcacagauaacgaccagaucuccuuguaugcacaggccucagggcguauuacugucagcaccaaaagaagucaacagacagugaucccaaauauaggaucuaggccccggguacgcgauauuccuuccagaaucagcauuuacuggaccaucguuaagccaggugacauccugcuaauuaacucgacgggcaaucucauagcuccgaggggguacuuuaaaauccggucuggaaaguccucaauuaugcgcagugacgcccccaucggcaaguguaacagcgaaugcauaacuccuaaugguuccauuccaaacgauaaacccuuccagaaugugaaccgaaucacauauggggcguguccuagauacgucaagcagaauacccugaaacuugcaacuggaaugaggaacgugccagagaagcaaacacggggcaucuuuggcgccauugcuggguucaucgaaaauggaugggaggguaugguggacggcugguauggguuucgucaccagaacucugagggaauuggccaggccgcagaucugaaaagcacccaagcugccauagaccagaucaaugguaaguugaaccgccucauugggaaaacgaaugaaaaguuccaccagaucgagaaggaguucucagaagucgaaggcagaauccaggaucuggagaaauacguugaggacaccaagauugauuuauggaguuauaacgcggaacugcucguggcccuugagaaccaacauacaauagaccugacugauuccgaaaugaauaaauuguuugagaggaccaagaaacagcuacgggaaaacgcagaggacaugggaaauggcugcuucaagaucuaccacaagugugauaacgcuugcauugggagcauccgaaauggaacauaugaccaugacguauaccgcgaugaggcccugaacaauagauuucagauuaaagguguggaacucaagucuggcuacaaagacuggauccuguggauaucauucgcuaucaguugcuuucuucugugugucgccuugcucggguucauuaugugggcaugccagaagggaaacaucagguguaauauuugcaucuga

SEQ ID NO: 129823 - RNA, 1701 nt, Artificial Sequence; identical to SEQ ID NO: 129306
  derived and/or modified CDS sequence (opt3) from hemagglutinin__InfluenzaA__ABU92619

SEQ ID NO: 129824 - RNA, 1701 nt, Artificial Sequence; identical to SEQ ID NO: 129805
  derived and/or modified CDS sequence (opt3) from hemagglutinin__InfluenzaA__ABU92620

SEQ ID NO: 129825 - RNA, 1701 nt, Artificial Sequence
  derived and/or modified CDS sequence (opt3) from hemagglutinin__InfluenzaA__ABU92622
augaagaccaucauugcccugagcuacauacucugccuuguguucgcucagaaacugcccggcaacgacaauuccacagcaacuuuguguuuagggcaccaugccgucccuaacggaacgaucguuaagaccauuacaaaugaucaaaucgaggugacuaacgcgaccgaacugguacagucuucaaguacagguggcauuugcgacagcccacaccagauccuagauggggagaauuguacccucauagacgcucugcuuggagauccgcagugcgacggcuuucaaaacaaaaagugggaucuguucguggaaagauccaaagccuauucuaauuguuaccccuaugacgucccugauuacgcaucguugaggucacucaucgccagcagugguacucuggaguuuaacaaugaauccuucaacuggacaggggugacccagaauggaacgucuagcgcuugcaagcggcgcuccaacucaaguuucuucagccgacugaauuggcucacucauuuaaaguuuaaauauccagcacugaacguuaccaugcccaauaacgaggaguucgacaaacuuuacauuuggggcgugcaccauccuggcacagauaacgaccagaucucuuuguaugcccaggcuuccgggcguauuacugucucaaccaagagaagccaacagacagugaucccaaauauaggaaguaggccccggguacgcgauauuccuucuagaaucuccauuuacuggaccaucguuaagccaggugacauccugcuaauuaacagcacgggcaaucucauagccccgaggggguacuuuaaaauccggucgggaaagucuuccauuaugcgcucagacgcgcccaucggcaaguguaacagugaaugcauaacuccuaaugguagcauuccaaacgauaaacccuuccagaaugugaaccgaaucacauauggggcauguccuagauccgucaagcagaauacccugaaacuugccacuggaaugaggaacgugccagagaagcaaacacggggcaucuuuggcgcuauugccggguucaucgaaaauggaugggaggguaugguggacggcugguacggguuucgucaccagaacucugagggaauuggccaggcagcugaucugaaaagcacccaagccgcgauagaccagaucaaugguaaguugaaccgccucauugggaaaacgaaugaaaaguuccaccagaucgagaaggaauuuucagaggucgaaggcagaauccaggaucuggagaaauauguugaggacaccaagauugauuuauggaguuacaacgccgaacugcucguggcacuugagaaccaacauacaauagaccugacugauuccgaaaugaauaaauuguuugagaggaccaagaaacagcuacgggaaaacgcugaggacaugggaaauggcugcuucaagaucuaucacaagugugauaacgccugcauugggagcauccgaaauggaacauacgaccaugacguauaucgcgaugaggcucugaacaauagauuucagauuaaagguguggaacucaagucuggcuacaaagacuggauccuguggauaucauucgccaucaguugcuuucuucugugugucgcauugcucggguucauuaugugggccugccagaagggaaacaucagguguaauauuugcaucuga

SEQ ID NO: 129826 - RNA, 1701 nt, Artificial Sequence; identical to SEQ ID NO: 128121
  derived and/or modified CDS sequence (opt3) from hemagglutinin__InfluenzaA__ABU92623

SEQ ID NO: 129827 - RNA, 1701 nt, Artificial Sequence
  derived and/or modified CDS sequence (opt3) from hemagglutinin__InfluenzaA__ABU92624
augaagaccaucauugcccugagcuacauacucugccuuguguucgcucagaaacugcccggcaacgacaauuccacagcaacuuuguguuuagggcaccaugccgucccuaacggaacgaucguuaagaccauuacaaaugaucaaaucgaggugacuaacgcgaccgaacugguacagauuucuucaacaggugagaucugcgacaguccacaccagauacuagauggcgaaaauuguacccucaucgacgcucugcuuggggauccgcagugcgacggauuucaaaacaaaaagugggaucuguucguggagagaagcaaagccuauuccaauuguuaccccuaugacgucccugauuacgcaucuuugaggucgcucguggccucaagcggcacucuggaauuuaacaaugagaguuucgacuggacagguguuacccagaacgggacguccucugcuugcaagcggcgcagcgauaaguccuuuuucucacgacugaauuggcucacucauuuaaaauauaaguacccagcacugaacgugaccaugcccaauaacgagaaauuugacaaacuuuauauuuggggaguccaccauccuggcacagauagugaccagaucagcuuguacgcccaggcucugggccguauuacugugucuaccaagagaucccaacagacaguaaucccaaauauagggucaaggccccggguucgcgacgugagcaguagaauuucuaucuacuggaccauugucaagccuggagauauccuacucaucaacuccacggguaaccugauugccccaaggggcuauuucaagauacggagcgggaaaucgucuaucaugcgcuccgacgcgccgauuggaaaguguaauucagaaugcaucacucccaacggcaguauaccuaaugauaaaccauuucagaacgugaaucgaauuacauacggugcaugucccagauaugugaagcagaacacccuuaaacuggccacugggaugaggaaugucccugagaagcaaacacggggaaucuucggcgcuaucgccggcuuuauugaaaacgggugggagggaaugguugacgguugguacggcuuccgucaccagaauagcgaggggaccggacaggcagcugauuugaaauccacgcaagccgcgaucaaccagauuaauggcaagcucaaccgccugauagguaagaccaaugaaaaauuucaccagaucgagaaggaguucucugaaguggaagggaggauucaggacuuagagaaauauguagaggauacaaagaucgaccuguggagcuacaacgccgaacuccuuguggcacuggagaaucaacauacuaucgauuugaccgacucagaaaugaacaaacuauucgagagaacaaagaagcagcugcgggaaaacgcugaggauaugggcaauggaugcuuuaaaauuuaucacaagugugacaacgccugcauaggcaguauccgaaaugggacuuacgaccaugaugucuaccgcgacgaggcucucaacaauagauuccagauuaaaggaguggaacugaaguccgguuauaaagauuggauccuuuggauuagcuuugccaucucuugcuuccuguuguguguugcacuccugggcuuuauaaugugggccugccagaaggggaacaucagguguaauauuugcaucuga

SEQ ID NO: 129828 - RNA, 1701 nt, Artificial Sequence; identical to SEQ ID NO: 129810
  derived and/or modified CDS sequence (opt3) from hemagglutinin__InfluenzaA__ABU92625

SEQ ID NO: 129829 - RNA, 1701 nt, Artificial Sequence; identical to SEQ ID NO: 128121
  derived and/or modified CDS sequence (opt3) from hemagglutinin__InfluenzaA__ABU92626

SEQ ID NO: 129830 - RNA, 1701 nt, Artificial Sequence
  derived and/or modified CDS sequence (opt3) from hemagglutinin__InfluenzaA__ABU92627
augaagaccaucauugcccugagcuacauacucugcaugguguucgcucagaaacuucccggcaacgacaauuccacagcaacucuguguuuggggcaccaugccgucccuaacggaacgaucguuaagaccauuacaaaugaucaaaucgaggugacuaacgcgaccgaauuaguacagauuucuucaacaggugagaucugcgacaguccacaccagauacuggauggcgaaaauuguacccuaaucgacgcucuccugggggauccgcagugcgacggauuucaaaacaaaaagugggaucuuuucguggagagaagcaaagccuauuccaauuguuaccccuaugacgucccugauuacgcaucucugaggucguugguggccucaagcggcacucucgaauuuaacaaugagaguuucgacuggacagguguuacccagaacgggacguccucugcuugcaagcggcgcagcgauaaguccuuuuucucacgacugaauuggcugacucaucucaaauauaaguacccagcauuaaacgugaccaugcccaauaacgagaaauuugacaagcuguauauuuggggaguccaccauccuggcacagauagugaccagaucagccuuuacgcccaggcuucuggccguauuacuguguccaccaaaagaucacaacagacaguaaucccaaauauagggagcaggccccggguucgcgacgugaguucuagaauuuccaucuacuggaccauugucaagccuggagauaucuugcugaucaacaggccagguaaccuaauugccccgcggggcuauuucaagauacgcagcgggaaaucgucuaucaugcgauccgacgcgcccauuggaaaguguaauucagaaugcaucacgccuaacggcaguauaccaaaugauaaacccuuucagaacgugaauagaauuacuuacggugcauguccuagguaugugaagcagaacacacucaaacuggccaccgggaugcggaaugucccagagaagcaaacucguggaaucuucggcgcuaucgccggcuuuauugaaaacgggugggagggaaugguugacgguugguacggcuuccgccaccagaauagcgaggggacaggacaggcagcugaucuuaaauccacccaagccgcgaucaaccagauuaauggcaagcugaacagauugauagguaagacgaaugaaaaauuucaccagaucgagaaggaguucucugaaguggaagggaggauucaggaccucgagaaauauguagaggauaccaagaucgaccuguggagcuacaacgccgaauuacugguggcacucgagaaucaacauacaaucgaucuuacugacucagaaaugaacaaacuguucgagcggaccaagaagcaguugcgagaaaacgcugaggauaugggcaauggaugcuuuaaaauuuaucacaagugugacaacgccugcauaggcaguauccgcaaugggacauacgaccaugaugucuacagagacgaggcucuaaacaauagguuccagauuaaaggaguggaacugaaguccgguuauaaagauuggauccucuggauuagcuuugccaucucuugcuuccugcuuuguguugcacuguugggcuuuauaaugugggccugccagaaggggaacauccgguguaauauuugcaucuga

SEQ ID NO: 129831 - RNA, 1701 nt, Artificial Sequence; identical to SEQ ID NO: 129810
  derived and/or modified CDS sequence (opt3) from hemagglutinin__InfluenzaA__ABU92628

SEQ ID NO: 129832 - RNA, 1701 nt, Artificial Sequence; identical to SEQ ID NO: 129810
  derived and/or modified CDS sequence (opt3) from hemagglutinin__InfluenzaA__ABU92631

SEQ ID NO: 129833 - RNA, 1701 nt, Artificial Sequence
  derived and/or modified CDS sequence (opt3) from hemagglutinin__InfluenzaA__ABU92632
augaagaccaucauugcccugagcuacauacucugccuuguguucgcucagaaacugcccggcaacgacaauuccacagcaacuuuguguuuagggcaccaugccgucccuaacggaacgaucguuaagaccauuacaaaugaucaaaucgaggugacuaacgcgaccgaacugguacagucuucaaguacagguggcauuugcgacagcccacaccagauccuagauggggagaauuguacccucauagacgcucugcuuggagauccgcagugcgacggcuuucaaaacaaaaagugggaucuguucguggaaagauccaaagccuauucuaauuguuaccccuaugacgucccugauuacgcaucguugaggucacucaucgccagcagugguacucuggaguuuaacaaugaauccuucaacuggacaggggugacccagaauggaacgucuagcgcuugcaagcggcgcuccaacaagucauuuuucagucgacugaauuggcucacucauuuaaaauauaaguacccagcacugaacguuaccaugcccaauaacgagaaauuugacaagcuguauauuuggggcgugcaccauccuggcacagauagcgaccagaucucuuuguacgcccaggcuuccgggcguauuacugucucaaccaaaagaagccaacagacagugaucccaaacauaggaaguaggccccggguacgcgauguuucuuccagaauuagcaucuacuggaccauugugaagccuggugacauccugcuaaucaauucgacgggcaaccucauugccccaaggggguauuucaagauacggucuggaaaauccucaaucaugcgcagugacgcgccgauuggcaaguguaauagcgagugcaucacucccaacgguuccauaccuaaugauaaaccauuucagaacgucaaucgaauuacauacggggcaugucccagauaugugaagcagaacacccugaaacuugccacuggaaugaggaaugugccugaaaagcaaacacggggcaucuucggcgcuaucgccggguuuauugagaacggaugggaagguauggucgacggcugguacggguuccgucaccuuaauucugagggaaccggccaggcagcugauuugaaaagcacgcaggccgcgaucaaccaaauuaaugguaagcucaaccgccugauagggaagaccaaugagaaauuucaccagaucgaaaaggaguucucagaaguugagggcaggauucaggacuuagaaaaauauguggaggauacaaagaucgaccuguggaguuacaacgccgagcuccuuguagcacuggaaaaccagcauacuaucgauuugaccgacuccgagaugaauaaacuauucgaaagaacaaagaagcaacugcgggagaacgcugaagauaugggaaauggcugcuuuaaaauuuaucacaagugugacaacgccugcauagggagcauccgaaauggaacuuacgaucaugacguguaccgcgacgaggcucucaacaauagauuccagauuaaaggugucgagcugaagucuggcuauaaagauuggauccuuuggauuucauuugccaucaguugcuuccuguuguguguggcacuccugggguuuauaaugugggccugccagaagggaaacaucagguguaauauuugcaucuga

SEQ ID NO: 129834 - RNA, 1701 nt, Artificial Sequence
  derived and/or modified CDS sequence (opt3) from hemagglutinin__InfluenzaA__ABU92635
augaagaccaucauugcccugagcuacauacucugccuuguguucgcucagaaacugcccggcaacgacaauuccacagcaacuuuguguuuagggcaccaugccgucccuaacggaacgaucguuaagaccauuacaaaugaucaaaucgaggugacuaacgcgaccgaacugguacagucuucaaguacagguggcauuugcgacagcccacaccagauccuagauggggagaauuguacccucauagacgcucugcuuggagauccgcagugcgacggcuuucaaaacaaaaagugggaucuguucguggaaagauccaaagccuauucuaauuguuaccccuaugacgucccugauuacgcaucguugaggucaaucguggccagcagugguacucucgaguuuaacaaugaauccuucaacuggacagggguuacccagaauggaacgucuagcgcuugcaagcggaaguccaacaaaucauuuuucagucgccugaauuggcugacucaucucaaguauaaauacccagcauuaaacgugaccaugcccaauaacgagaaguuugacaaacuguauauuuggggcguccaccauccuggcacagauaacgaccagaucagccuuuacgcccaggcuucugggcgaauuacuguguccaccaagcguucacaacagacaguaaucccaaauauaggaagcagacccaggguucgggaugugaguucucgcauuuccaucuacuggaccauugucaagccuggugacaucuugcugaucaacagcacgggcaaucuaauugccccaagaggguauuucaaaauaaggucgggaaagucuuccaucaugcggucagacgcgccgauuggcaaauguaacagugagugcaucacucccaaugguagcauaccuaacgauaagccauuucagaaugugaaccgcauuacauacggggcauguccccgauaugugaaacagaauacccucaagcuggccacuggaaugagaaacgucccugaaaaacaaacaaggggcaucuucggcgcuaucgccggguuuauugagaauggaugggaagguaugguugacggcugguacggguuccggcaccagaacuccgagggaaccggccaggcagcugaucuuaagucuacgcaagccgcgaucaaucagauuaacgguaagcugaaucguuugauagggaaaaccaacgagaaguuucaccagaucgaaaaagaguucagcgaaguggagggccgcauucaggaccucgaaaaguauguagaggauacaaaaaucgaccuguggucauacaacgccgaguuacugguggcacucgaaaaucaacauacuaucgaucuuaccgacagugagaugaacaagcuguucgaaagaacaaagaaacaguugagggagaaugcugaagauaugggaaacggcugcuuuaagauuuaucacaaaugugacaaugccugcauaggguccauccggaacggaacuuacgaucaugacgucuaccgagacgaggcucuaaauaaccgcuuccagauuaaggguguggagcugaaaagcggcuauaaggauuggauccucuggauuucuuuugccaucucaugcuuccugcuuuguguugcacuguugggguuuauaaugugggccugccagaagggaaauaucagauguaacauuugcaucuga

SEQ ID NO: 129835 - RNA, 1701 nt, Artificial Sequence; identical to SEQ ID NO: 128678
  derived and/or modified CDS sequence (opt3) from hemagglutinin__InfluenzaA__ABU92636

SEQ ID NO: 129836 - RNA, 1701 nt, Artificial Sequence
  derived and/or modified CDS sequence (opt3) from hemagglutinin__InfluenzaA__ABU92637
augaagaccaucauugcccugagcuacauacucugccuuguguucgcucagaaacugcccggcaacgacaauuccacagcaacuuuguguuuagggcaccaugccgucccuaacggaacgaccguuaagacaaucacuaaugaucaaauugaggugaccaacgcgacagaacugguacagucuucaaguaccgguggcaucugcgacagcccacaccagauucuagauggggagaauuguacucucaucgacgcucugcuuggagauccgcagugcgacggcuuucaaaacaaaaagugggaucuguucguggaaagauccaaagccuauucuaauuguuaccccuaugacgucccugauuacgugucguugaggucacucguugcaagcagugguacacuggaguuuaacaaugaauccuucaacuggaccggggugacgcagaauggaacuucuagcgccugcaagcggcgcuccaacaauucauuuuucagucgacugaacuggcucacccauuuaaaguuuaaauauccagcucugaaugucacaaugcccaacaacgagaaguucgacaaacuuuacauauggggcgugcaccauccuggcacugauaaugaccagaucagcuuguaugcacaggccucugggcguauuaccguauccacaaagagaucacaacagaccguuaucccaaacauuggaagcaggccccgggugcgcgauaucccuaguagaauaucuauuuacuggacgaucgucaaaccaggugacauucugcuaaucaauuccacuggcaaccucaucgcuccgaggggguacuuuaagauucggagcggaaagucgucuauaaugcgcuccgacgcccccaucggcaaauguaauucagagugcauuacaccuaacgguaguaucccaaaugauaagcccuuccagaacgugaaucgaauaaccuauggggcguguccuagauacgugaaacagaacacucugaaacuugcaacaggaaugaggaaugucccagaaaaacaaacccggggcauuuuuggcgccaucgcuggguucaucgagaacggaugggaagguaugguugacggcugguauggguuucgucaccagaauagcgagggaauuggccaggccgcagaucugaaguccacgcaagcugccaucaaccagauuaaugguaaauugaaccgccucauagggaagaccaacgagaaguuccaccagaucgaaaaagaguucucugaaguggagggcaggauucaggaccuggaaaaguacguagaggauacaaaaaucgacuuauggagcuauaaugcggagcugcucguggcccuugaaaaccaacauacuaucgaucugaccgacucagagaugaauaaguuguuugaaagaacaaagaagcagcuacgggagaacgcagaagauaugggaaauggcugcuucaagauuuaccacaaaugugacaacgcuugcauagggaguauccgaaauggaacuuaugaucaugacgucuaccgcgacgaggcccugaacaauagauuucagauuaaggguguggagcucaaauccggcuacaaggauuggauccuguggauuagcuucgcuaucucuugcuuucuucuguguguugccuugcucggguucauaaugugggcaugccagaaaggaaacaucagguguaauauuugcaucuga

SEQ ID NO: 129837 - RNA, 1701 nt, Artificial Sequence
  derived and/or modified CDS sequence (opt3) from hemagglutinin__InfluenzaA__ABU92639
augaagaccaucauugcccugagcuacauacucugccuuguguucgcucagaaacugcccggcaacgacaauuccacagcaacuuuguguuuagggcaccaugccgucccuaacggaacgaucguuaagaccauuacaaaugaucaaaucgaggugacuaacgcgaccgaacugguacagauuucuucaacaggugagaucugcgacaguccacaccagauacuagauggcgaaaauuguacccucaucgacgcucugcuuggggauccgcagugcgacggauuucaaaacacuaaaugggaucuguucguggagagaagcaaggccuauuccaauuguuaccccuaugacgucccugauuacgcaucuuugaggucgcucguggccucaagcggcacacuggaauuuaacaaugagaguuucgacuggaccgguguuacgcagaacgggacuuccucugcuugcaaacggcgcagcgauaaguccuuuuucucacgacugaauuggcucacccauuuaaaguauaaauacccagcacugaacgugacaaugcccaauaacgagaaguuugacaaacuuuauauuuggggaguccaccauccuggcacugauagugaccagaucagcuuguacgcccaggcuucuggccguauuaccguguccacaaagagaucacaacagaccguaaucccaaauauagggagcaggccccggguucgcgacgugaguucuagaauuuccaucuacuggacgauugucaaaccuggagauauccugcuaaucaacagcacugguaaccucauugccccaaggggcuauuucaagauacggucggggaagucuuccaucaugcgcucagacgcgccgauuggaaaauguaauagugaaugcaucacacccaacggcagcauaccuaaugauaagccauuucagaacgugaaucgaauuaccuacggugcaugucccagauaugugaaacagaacacucugaaacuugccacagggaugaggaaugucccugagaagcaaacccggggaaucuucggcgcuaucgccggcuuuauugaaaacgggugggagggaaugguugacgguugguacggcuuccgucaccaaaauuccgaggggacgggacaggcagcugaucugaagucuacccaggccgcgaucaaccagauuaauggcaaauugaaccgccucauagguaagacaaaugaaaaguuucaccagaucgagaaagaguucagcgaaguggaagggaggauucaggaccuggagaaguauaucgaggauacuaaaaucgacuuauggucauacaacgccgaacugcucguagcacuugagaaucaacauaccauugaucugacagacagugaaaugaacaaguuguucgagagaacuaaaaagcagcuacgggaaaacgcugaggauaugggcaauggaugcuuuaagauauaucacaaaugugacaacgccugcaucggcuccauucgaaaugggaccuacgaccaugauguguaccgcgacgaggcucugaacaauagauuccagaucaagggagucgaacucaaaagcgguuauaaggauuggauucuguggaucucuuuugccauaucaugcuuccuucuguguguggcauugcucggcuuuaucaugugggccugccagaaagggaacauuagguguaauaucugcauuuga

SEQ ID NO: 129838 - RNA, 1701 nt, Artificial Sequence
  derived and/or modified CDS sequence (opt3) from hemagglutinin__InfluenzaA__ABU92640
augaagaccaucauugcccugagcuacauacucugccuuguguucgcucagaaacugcccggcaacgacaauuccacagcaacuuuguguuuagggcaccaugccgucccuaacggaacgaucguuaagaccauuacaaaugaucaaaucgaggugacuaacgcgaccgaacugguacagucuucaaguacaggugagauuugcgacagcccacaccagauccuagauggcgaaaauuguacccucauagacgcucugcuuggggauccgcagugcgacggauuucaaaacaaaaagugggaucuguucguggagagauccaaagccuauucuaauuguuaccccuaugacgucccugauuacgcaucguugaggucacucguggccagcaguggcacucuggaauuuaacaaugaguccuucaacuggacagguguuacccagaaugggacgucuagcgcuugcaagcggcgcuccaacaauucauuuuucagucgacugaacuggcucacucauuuaaaguuuaaauauccagcacugaaugugaccaugcccaacaacgagaaguucgacaaacuuuacaucuggggaguccaccauccuggcacagauaaugaccagaucuuuuuguaugcccaggcuagcggccguauuacugugucuaccaagagaucccaacagacaguaauuccaaacaucgggucaaggccccggguucgcaauauaccuagcagaauuaguaucuacuggaccauugugaaaccaggagauauccugcuaaucaacucuacggguaaucucauugccccgaggggcuacuucaagauacgguccggaaagagcucgaucaugcgcucugacgcgcccauugggaaauguaacuccgaaugcaucacuccuaauggcucaauaccaaacgacaagcccuuucagaaugucaaccgaauuacauauggugcauguccuagauacgugaaacagaauacccugaagcuggccacugggaugaggaacgugccagagaaacaaacacggggaaucuucggcgcuaucgccggcuuuauugaaaaugggugggagggaauggucgaugguugguauggcuuccgucaccagaacagugaggggaucggacaggcagcugaccuuaagagcacccaagccgcgauuaaucagauaaacggcaaauugaaccgccucaucgguaagacgaaugaaaaguuccaccagauugagaaagaauuuuccgagguugaagggagaauccaggaucuggagaaguacguggaggacaccaaaaucgauuuauggucuuauaacgccgaacugcucguagcacuugagaaucaacauacaauugaccugacugauagcgaaaugaacaaguuguucgagaggaccaaaaagcagcuacgggaaaaugcugaggacaugggcaacggaugcuuuaagauauaccacaaaugugauaaugccugcaucggcucaauucgaaacgggacauaugaccaugauguguaccgcgacgaggcucugaauaacagauuccagaucaagggagucgaacucaaaagugguuacaaggacuggauucuguggaucuccuuugccauaagcugcuuccuucugugugcagccuugcucggcuuuaucaugugggcuugccagaaagggaauauuagguguaacaucugcauuuga

SEQ ID NO: 129839 - RNA, 1701 nt, Artificial Sequence
  derived and/or modified CDS sequence (opt3) from hemagglutinin__InfluenzaA__ABU92641
augaagaccaucauugcccugagcuacauacucugccuuguguucgcucagaaacugcccggcaacgacaauuccacagcaacuuuguguuuagggcaccaugccgucccuaacggaacgaucguuaagaccauuacaaaugaucaaaucgaggugacuaacgcgaccgaacugguacagucuucaaguacagguggcauuugcgacagcccacaccagauccuagauggggagaauuguacccucauagacgcucugcuuggagauccgcagugcgacggcuuucaaaacaaaaagugggaucuguucguggaaagauccaaagccuauucuaauuguuaccccuaugacgucccugauuacgcaucguugaggucacucguggccagcagugguacucuggaguuuaacaaugaauccuucaacuggacagggguuacccagaauggaacgucuagcgcuugcaagcggaaguccaacaauucauuuuucagucgccugaacuggcucacucauuuaaaauuuaaguauccagcacugaaugugaccaugcccaacaacgagaaauucgacaaacuuuacaucuggggcguccaccauccuggcacagauaaugaccagauuagcuuguaugcccaggcuucugggcgaaucacuguguccaccaagcguucacaacagacaguaauuccaaacaucggaagcagacccaggguucgggauauaccuagucgcauuucuaucuacuggaccauugugaagccaggugacauccugcuaaucaauuccacgggcaaccucauugccccgagaggguacuuuaagauaaggagcggaaaaucgucuaucaugcgguccgacgcgcccauuggcaaguguaauucagagugcaucacuccuaacgguaguauaccaaaugauaaacccuuccagaacgucaaucgcauuacauauggggcauguccucgauacgugaagcagaacacccugaaacuugccacuggaaugagaaaugugccagaaaagcaaacaaggggcaucuuuggcgcuaucgccggguucauugagaacggaugggaagguauggucgacggcugguauggguuucggcaccagaauagcgagggaaucggccaggcagcugaucugaaauccacccaagccgcgauuaaccagauaaaugguaaguugaaccgucucaucgggaagacgaacgagaaauuccaccagauugaaaaggaguucucugaaguugagggccgcauccaggaccuggaaaaauacguggaggauaccaagaucgacuuauggagcuauaaugccgagcugcucguagcacuugaaaaccaacauacaauugaucugacugacucagagaugaauaaauuguuugaaagaaccaagaagcagcuaagggagaacgcugaagauaugggaaauggcugcuucaaaauauaccacaagugugacaacgccugcaucgggaguauucggaauggaacauaugaucaugacguguaccgagacgaggcucugaacaaucgcuuucagaucaaaggugucgagcucaaguccggcuacaaagauuggauucuguggaucagcuucgccauaucuugcuuucuucuguguguggcauugcucggguucaucaugugggccugccagaagggaaacauuagauguaauaucugcauuuga

SEQ ID NO: 129840 - RNA, 1701 nt, Artificial Sequence
  derived and/or modified CDS sequence (opt3) from hemagglutinin__InfluenzaA__ABU92642
augaagaccaucauugcccugagcuacauacucugccuuguguucgcucagaaacugcccggcaacgacaauuccacagcaacuuuguguuuagggcaccaugccgucccuaacggaacgaucguuaagaccauuacaaaugaucaaaucgaggugacuaacgcgaccgaacugguacagucuucaaguacagguggcauuugcgacagcccacaccagauccuagauggggagaauuguacccucauagacgcucugcuuggagauccgcagugcgacggcuuucaaaacaaaaagugggaucuguucguggaaagauccaaagccuauucuaauuguuaccccuaugacgucccugauuacgcaucguugaggucacucguggccagcagugguacucuggaguuuaacaaugaauccuucaacuggacagggguuacccagaauggaacgucuagcgcuugcaagcggcgcuccaacaauucauuuuucagucgacugaacuggcucacucauuuaaaguuuaaauauccagcacugaaugugaccaugcccaacaacgagaaguucgacaaacuuuacaucuggggcguccaccauccuggcacagauaaugaccagauuuuucuuuaugcccaggcuagcgggcguaucauugugucuacuaagagaucccaacagaccguaaucccaaacauaggaucaaggccccggguucgcaauauuccuagcagaaucaguauuuacuggacaaucgugaaaccaggugauauccugcuaauuaacucuaccggcaaucucauagccccgaggggguacuucaagauccgguccggaaagagcucgauuaugcgcucugacgcgcccaucggcaaauguaacuccgagugcauaacgccuaaugguucaauuccaaacgacaagcccuuucagaaugucaaccgaaucacuuauggggcauguccuagauacgugaaacagaauacacugaaguuggccaccggaaugaggaacgugccagaaaaacaaacucggggcaucuucggcgcuauugccggguuuaucgagaauggaugggaagguauggucgauggcugguauggguuccgucaccagaacagugagggaauuggccaggcagcugaccugaaaagcacacaagccgcgauagaucagaucaaugguaaauugaaccgccucauugggaagaccaacgagaaguuccaccagaucgaaaaagaguuuuccgaaguugagggcagaauccaggaccuggaaaaguacguggaggauacgaaaauugacuuauggucuuauaaugccgagcugcucguagcacuugaaaaccaacauaccauagaucugacagacagcgagaugaauaaguuguucgaaaagacuaagaagcagcuaagggagaacgcugaagauaugggaaauggcugcuuuaaaaucuaccacaagugugacaacgccugcauugggucaauccggaauggaaccuaugaucaugacguguaccgagacgaggcucugaacaaucgcuuccagauuaaaggugucgagcucaagaguggcuacaaagauuggauccuguggauauccuuugccaucagcugcuuccuucuguguguggcauugcucggguuuauuaugugggccugccagaagggaaacaucagauguaauauuugcaucuga

SEQ ID NO: 129841 - RNA, 1701 nt, Artificial Sequence
  derived and/or modified CDS sequence (opt3) from hemagglutinin__InfluenzaA__ABU92643
augaagaccaucauugcccugagcuacauacucugccuuguguucgcucagaaacugcccggcaacgacaauuccacagcaacuuuguguuuagggcaccaugccgucccuaacggaacgaucguuaagaccauuacaaaugaucaaaucgaggugacuaacgcgaccgaacugguacagauuucuucaacaggugagaucugcgacaguccacaccagauacuagauggcgaaaauuguacccucaucgacgcucugcuuggggauccgcagugcgacggauuucaaaacaaaaagugggaucuguucguggagagaagcaaagccuauuccaauuguuaccccuaugacgucccugauuacgcaucuuugaggucgcucguggccucaagcggcacucuggaauuuaacaaugagaguuucgacuggacagguguuacccagaacgggacguccucugcuugcaagcggcgcagcgauaaguccuuuuucucacgacugaauuggcucacucauuuaaaauauaaguacccagcacugaacgugaccaugcccaauaacgagaaauuugacaaacuuuauauuuggggaguccaccauccuggcacagauagugaccagaucagcuuguacgcccaggcuucuggccguauuacuguguccaccaagagaucacaacagacaguaaucccaaauauagggagcaggccccggguucgcgacgugaguucuagaauuuccaucuacuggaccauugucaagccuggagauauccugcuaaucaacagcacggguaaccucauugccccaaggggcuauuucaagauacggucggggaaaucuuccaucaugcgcucagacgcgccgauuggaaaguguaauagugaaugcaucacucccaacggcagcauaccuaaugauaaaccauuucagaacgugaaucgaauuacauacggugcaugucccagauaugugaagcagaacacccugaaacuugccacugggaugaggaaugucccugagaagcaaacacggggaaucuucggcgcuaucgccggcuuuauugaaaacgggugggagggaaugguugacgguugguacggcuuccgucaccaaaauuccgaggggaccggacaggcagcugaucugaaaucuacgcaggccgcgaucaaccagauuaauggcaaguugaaccgccucauagguaagaccaaugaaaaauuucaccagaucgagaaggaguucagcgaaguggaagggaggauucaggaccuggagaaauauguagaggauacaaagaucgacuuauggucauacaacgccgaacugcucguggcacuugagaaucaacauacuaucgaucugaccgacagugaaaugaacaaauuguucgagagaacaaagaagcagcuacgggaaaacgcugaggauaugggcaauggaugcuuuaaaauuuaucacaagugugacaacgccugcauaggcuccauccgaaaugggacuuacgaccauaacgucuaccgcgaugaggcucugaauaacagauuccagauuaaaggaguggaacucaagagcgguuauaaagacuggauccuguggauuucuuuugccaucucaugcuuccuucuguguguugcauugcucggcuuuauaaugugggccugccagaaggggaauaucagguguaacauuugcaucuga

SEQ ID NO: 129842 - RNA, 1701 nt, Artificial Sequence
  derived and/or modified CDS sequence (opt3) from hemagglutinin__InfluenzaA__ABU92645
augaagaccaucauugcccugagcuacauacucugccuuguguucgcucagaaacugcccggcaacgacaauuccacagcaacuuuguguuuagggcaccaugccgucccuaacggaacgaucguuaagaccauuacaaaugaucaaaucgaggugacuaacgcgaccgaacugguacagucuucaaguacaggugagauuugcgacagcccacaccagauccuagauggcgaaaauuguacccucauagacgcucugcuuggggauccgcagugcgacggauuucaaaacaaaaagugggaucuguucguggagagauccaaagccuauucuaauuguuaccccuaugacgucccugauuacgcaucguugaggucacucguggccagcaguggcacucuggaauuuaacaaugaguccuucaacuggacagguguuacccagaaugggacgucuagcgcuugcaagcggcgcuccaacaauucauuuuucagucgacugaacuggcucacucauuuaaaguuuaaauauccagcacugaaugugaccaugcccaacaacgagaaguucgacaaacuuuacaucuggggaguccaccauccuggcacagauaaugaccagaucuuuuuguaugcccaggcuagcggccguauuacugugucuaccaagagaucccaacagacaguaauuccaaacaucgggucaaggccccggguucgcaauauaccuagcagaauuaguaucuacuggaccauugugaaaccaggagauauccugcuaaucaacucuacggguaaucucauugccccgaggggcuacuucaagauacgguccggaaagagcucgaucaugcgcucugacgcgcccauugggaaauguaacuccgaaugcaucacuccuaauggcucaauaccaaacgacaagcccuuucagaaugucaaccgaauugcauauggugccuguccuagauacgugaaacagaauacacugaagcuggcuaccgggaugaggaacgugccagagaaacaaacucggggaaucuucggcgccaucgcaggcuuuauugaaaaugggugggagggaauggucgaugguugguauggcuuccgucaccagaacagugaggggaucggacaggcugccgaccuuaagagcacacaagcggccauuaaucagauaaacggcaaauugaaccgccucaucgguaagaccaaugaaaaguuccaccagauugagaaagaauuuuccgagguugaagggagaauccaggaucuggagaaguacguggaggacacgaaaaucgauuuauggucuuauaacgcagaacugcucguagcucuugagaaucaacauaccauugaccugacagauagcgaaaugaacaaguuguucgagaggacuaaaaagcagcuacgggaaaaugccgaggacaugggcaacggaugcuuuaagauauaccacaaaugugauaaugcuugcaucggcucaauucgaaacgggaccuaugaccaugauguguaccgcgacgaggcccugaauaacagauuccagaucaagggaauugaacucaaaagugguuacaaggacuggauccuguggauauccuuugcaaucagcugcuuccuucugugugucguguugcucggcuuuauuaugugggccugccagaaagggaauaucagguguaacauuugcaucuga

SEQ ID NO: 129843 - RNA, 1701 nt, Artificial Sequence
  derived and/or modified CDS sequence (opt3) from hemagglutinin__InfluenzaA__ABU92646
augaagaccaucauugcccugagcuacauacucugccuuguguucgcucagaaacugcccggcaacgacaauuccacagcaacuuuguguuuagggcaccaugccgucccuaacggaacgaucguuaagaccauuacaaaugaucaaaucgaggugacuaacgcgaccgaacugguacagucuucaaguacagguggcauuugcgacagcccacaccagauccuagauggggagaauuguacccucauagacgcucugcuuggagauccgcagugcgacggcuuucaaaacaaaaagugggaucuguucguggaaagauccaaagccuauucuaauuguuaccccuaugacgucccugauuacgcaucguugaggucacucguggccagcagugguacucuggaguuuaacaaugaauccuucaacuggacagggguuacccagaauggaacgucuagcgcuugcaagcggcgcuccaacaagucauuuuucagucgacugaauuggcucacucauuuaaaauuuaaguauccagcacugaacgugaccaugcccaauaacgagaaauucgacaaacuuuacaucuggggcguccaccauccuggcacagauaacgaccagauuagcuuguaugcccaggcuucugggcguaucacuguguccaccaagagaucacaacagacaguaauuccaaauaucggaagcaggccccggguucgcgaugugccuaguagaauaucuauuuacuggaccaucgucaagccaggugacauucugcuaaucaacuccacgggcaaucucaucgccccgaggggguacuuuaagauucggagcggaaaaucgucuauaaugcgcuccgacgcgcccaucggcaaguguaacucagagugcauuacuccuaaugguaguaucccaaacgauaaacccuuccagaaugugaaccgaauaacauauggggcauguccuagauacgugaagcagaauacccugaaacuugccacuggaaugaggaacgucccagaaaagcaaacacggggcauuuuuggcgcuaucgccggguucaucgagaauggaugggaagguaugguugacggcugguauggguuucgucaccagaacagcgagggaaccggccaggcagcugaucugaaauccacgcaagccgcgauuaaucagaucaacgguaaguugaaucgccucauugggaagaccaacgagaaauuccaccagauagaaaaggaguucucugaaguggagggcagaauccaggaccuggaaaaauacguagaggauacaaagauugacuuauggagcuauaacgccgagcugcucguggcacuugaaaaucaacauacuaucgaucugaccgacucagagaugaacaaauuguuugaaaggacaaagaagcagcuacgggagaaugcugaagauaugggaaacggcugcuucaaaaucuaccacaagugugacaaugccugcauugggaguauacgaaacggaacuuaugaucaugacgucuaccgcgacgaggcucugaauaacagauuucagaucaaagguguggagcucaaguccggcuacaaagauuggauucuguggaucagcuucgccauuucuugcuuucuucuguguguugcauugcucggguucaucaugugggccugccagaagggaaauauaagguguaacaucugcauuuga

SEQ ID NO: 129844 - RNA, 1701 nt, Artificial Sequence; identical to SEQ ID NO: 128121
  derived and/or modified CDS sequence (opt3) from hemagglutinin__InfluenzaA__ABU92647

SEQ ID NO: 129845 - RNA, 1701 nt, Artificial Sequence
  derived and/or modified CDS sequence (opt3) from hemagglutinin__InfluenzaA__ABU92648
augaagaccaucauugcccugagcuacauacucugccuuguguucgcucagaaacugcccggcaacgacaauuccacagcaacuuuguguuuagggcaccaugccgucccuaacggaacgaucguuaagaccauuacaaaugaucaaaucgaggugacuaacgcgaccgaacugguacagauuucuucaacaggugagaucugcgacaguccacaccagauacuagauggcgaaaauuguacccucaucgacgcucugcuuggggauccgcagugcgacggauuucaaaacaaaaagugggaucuguucguggagagaagcaaagccuauuccaauuguuaccccuaugacgucccugauuacgcaucuuugaggucgcucguggccucaagcggcacucuggaauuuaacaaugagaguuucaacuggacagguguuacccagaaugggacguccucugcuugcaagcggcgcagcgacaaguccuuuuucucacgacugaacuggcucacucauuuaaaauauaaguacccagcacugaaugugaccaugcccaacaaugagaaauuugauaaacuuuauauuuggggaguccaccauccuggcacagacagugaucagaucagcuuguacgcccaggcuucuggccguauuacuguguccaccaagagaucacaacagacaguaaucccaaacauagggagcaggccccggguucgcgacgugaguucuagaauuuccaucuacuggaccauugucaagccuggagacauccugcuaaucaacagcacggguaaucucauugccccaaggggcuauuucaagauacggucggggaaaucuuccaucaugcgcucagaugcgccgauuggaaaguguaacagugaaugcaucacucccaauggcagcauaccuaacgacaaaccauuucagaaugugaaccgaauuacauacggugcaugucccagauaugugaagcagaauacccugaaacuugccacugggaugaggaacgucccugagaagcaaacacggggaaucuucggcgcuaucgccggcuuuauugaaaaugggugggagggaaugguugaugguugguacggcuuccgucaccagaacuccgaggggaccggacaggcagcugaccugaaaucuacgcaagccgcgaucaaucagauuaacggcaaguugaaucgccucauagguaagaccaacgaaaaauuucaccagaucgagaaggaguucagcgaaguggaagggaggauucaggaucuggagaaauauguagaggacacaaagaucgauuuauggucauacaaugccgaacugcucguggcacuugagaaccaacauacuaucgaccugaccgauagugaaaugaacaaauuguucgagagaacaaagaagcagcuacgggaaaaugcugaggacaugggcaacggaugcuuuaaaauuuaucacaagugugauaaugccugcauaggcuccauccgaaacgggacuuacgaccaugacgucuaccgcgaugaggcucugaauaacagauuccagauuaaaggaguggaacucaagagcgguuauaaagacuggauccuguggauuucuuuugccaucucaugcuuccuucuguguguugcauugcucggcuuuauaaugugggccugccagaaggggaauaucagguguaacauuugcaucuga

SEQ ID NO: 129846 - RNA, 1701 nt, Artificial Sequence; identical to SEQ ID NO: 128121
  derived and/or modified CDS sequence (opt3) from hemagglutinin__InfluenzaA__ABU92649

SEQ ID NO: 129847 - RNA, 1701 nt, Artificial Sequence; identical to SEQ ID NO: 129810
  derived and/or modified CDS sequence (opt3) from hemagglutinin__InfluenzaA__ABU92650

SEQ ID NO: 129848 - RNA, 1701 nt, Artificial Sequence
  derived and/or modified CDS sequence (opt3) from hemagglutinin__InfluenzaA__ABU92651
augaagaccaucauugcccugagcuacauacucugccuuguguucgcucagaaacugcccggcaacgacaauuccacagcaacuuuguguuuagggcaccaugccgucccuaacggaacgaucguuaagaccauuacaaaugaucaaaucgaggugacuaacgcgaccgaacugguacagauuucuucaacaggugagaucugcgacaguccacaccagauacuagauggcgaaaauuguacccucaucgacgcucugcuuggggauccgcagugcgacggauuucaaaacaaaaagugggaucuguucguggagagaagcaaagccuauuccaauuguuaccccuaugacgucccugauuacgcaucuuugaggucgcucguggccucaagcggcacucuggaauuuuauaacgagaguuucgacuggacagguguuacccagaaugggacguccucugcuugcaagcggcgcagcgauaaguccuuuuucucacgacugaacuggcucacucauuuaaaauacaaguauccagcacugaaugugaccaugcccaacaaugagaaauuugacaaacuuuacauuuggggaguccaccauccuggcacagauagugaccagaucagcuuguacgcccaggcuucuggccguauuacuguguccaccaagagaucacaacagacaguaaucccaaacauagggagcaggccccggguucgcgacgugaguucuagaauuuccaucuauuggaccauugucaagccuggagauauccugcuaaucaauagcacggguaaccucauugccccaaggggcuacuucaagauacggucggggaaaucuuccaucaugcgcucagacgcgccgauuggaaaguguaacagugaaugcaucacucccaauggcagcauaccuaacgauaaaccauuucagaaugugaaccgaauuacauauggugcaugucccagauacgugaagcagaauacccugaaacuugccacugggaugaggaacgucccugagaagcaaacacggggaaucuucggcgcuaucgccggcuuuauugaaaaugggugggagggaaugguugacgguugguauggcuuccgucaccagaacuccgaggggaccggacaggcagcugaucugaaaucuacgcaagccgcgaucaaucagauuaacggcaaguugaaucgccucauagguaagaccaacgaaaaauuucaccagaucgagaaggaguucagcgaaguggaagggaggauucaggaccuggagaaauacguagaggauacaaagaucgacuuauggucauauaaugccgaacugcucguggcacuugagaaccaacauacuaucgaucugaccgacagugaaaugaauaaauuguucgagagaacaaagaagcagcuacgggaaaacgcugaggauaugggcaacggaugcuuuaaaauuuaccacaagugugacaaugccugcauaggcuccauccgaaacgggacuuacgaccaugaugucuaucgcgacgaggcucugaauaacagauuccagauuaaaggaguggaacucaagagcgguuacaaagauuggauccuguggauuucuuuugccaucucaugcuuccuucuguguguugcauugcucggcuuuauaaugugggccugccagaaggggaauaucagguguaacauuugcaucuga

SEQ ID NO: 129849 - RNA, 1701 nt, Artificial Sequence
  derived and/or modified CDS sequence (opt3) from hemagglutinin__InfluenzaA__ABU92652
augaagaccaucauugcccugagcuacauacucugccuuguguucgcucagaaacugcccggcaacgacaauuccacagcaacuuuguguuuagggcaccaugccgucccuaacggaacgaucguuaagaccauuacaaaugaucaaaucgaggugacuaacgcgaccgaacugguacagucuucaaguacagguggcauuugcgacagcccacaccagauccuagauggggagaauuguacccucauagacgcucugcuuggagauccgcagugcgacggcuuucaaaacaaaaagugggaucuguucguggaaagauccaaagccuauucuaauuguuaccccuaugacgucccugauuacgcaucguugaggucacucguggccagcagugguacucuggaguuuaacaaugaauccuucgacuggacagggguuacccagaacggaacgucuagcgcuugcaagcggcgcuccaauaagucauuuuucagucgacugaacuggcucacucauuuaaaauauaaguacccagcacugaaugugaccaugcccaacaaugagaaauuugauaaacuuuauaucuggggcguccaccauccuggcacagacagcgaucagauuucuuuguacgcccaggcuuccgggcguaucacugugucaaccaagagaagccaacagacaguaauuccaaacaucggaaguaggccccggguucgcgacgugucuuccagaauaagcauuuacuggaccaucgucaagccuggugacauucugcuaaucaacucgacgggcaaucucaucgccccaaggggguauuucaagauucggucuggaaaauccucaauaaugcgcagugaugcgccgaucggcaaguguaacagcgagugcauuacucccaaugguuccaucccuaacgacaaaccauuucagaaugugaaccgaauaacauacggggcaugucccagauaugugaagcagaauacccugaaacuugccacuggaaugaggaacgucccugaaaagcaaacacggggcauuuucggcgcuaucgccggguuuaucgagaauggaugggaagguaugguugauggcugguacggguuccgucaccagaacucugagggaaccggccaggcagcugaccugaaaagcacgcaagccgcgauuaaucagaucaacgguaaguugaaucgccucauugggaagaccaacgagaaauuucaccagauagaaaaggaguucucagaaguggagggcagaauccaggaucuggaaaaauauguagaggacacaaagauugauuuauggaguuacaaugccgagcugcucguggcacuugaaaaccaacauacuaucgaccugaccgauuccgagaugaacaaauuguucgaaaggacaaagaagcagcuacgggagaaugcugaagacaucggaaacggcugcuuuaaaauuuaucacaagugugauaaugccugcauagggagcauccgaaacggaacuuacgaccaugacgucuaccgcgaugaggcucugaauaacagauuccagauuaaagguguggagcucaagucuggcuauaaagacuggauccuguggauuucauuugccaucaguugcuuccuucuguguguugcauugcucggguuuauaaugugggccugccagaagggaaauaucagguguaacauuugcaucuga

SEQ ID NO: 129850 - RNA, 1701 nt, Artificial Sequence; identical to SEQ ID NO: 129810
  derived and/or modified CDS sequence (opt3) from hemagglutinin__InfluenzaA__ABU92653

SEQ ID NO: 129851 - RNA, 1701 nt, Artificial Sequence
  derived and/or modified CDS sequence (opt3) from hemagglutinin__InfluenzaA__ABU92654
augaagaccaucauugcccugagcuacauacucugccuuguguucgcucagaaacugcccggcaacgacaauuccacagcaacuuuguguuuagggcaccaugccgucccuaacggaacgaucguuaagaccauuacaaaugaucaaaucgaggugacuaacgcgaccgaacugguacagucuucaaguacagguggcauuugcgacagcccacaccagauccuagauggggagaauuguacccucauagacgcucugcuuggagauccgcagugcgacggcuuucaaaacaaaaagugggaucuguucguggaaagauccaaagccuauucuaauuguuaccccuaugacgucccugauuacgcaucguugaggucacucguggccagcagugguacucuggaguuuaacaaugaauccuucaacuggacagggguuacccagaauggaacgucuagcgcuugcaagcggcgcuccaacaagucauuuuucagucgacugaauuggcucacucauuuaaaauuuaaguauccagcacugaacgugaccaugcccaauaacgagaaauucgacaaguuguacaucuggggcguccaccauccuggcacagauaacgaccagauuagcuuguaugcccaggcuucugggaaaaucacuguguccaccaagcguucacaacagacaguaauuccaaauaucggaagcagacccaggguucgggaugugccuagucgcauaucuauuuacuggaccaucgucaagccaggugacauucugcuaaucaacuccacgggcaaucucaucgccccgagaggguacuuuaaaauuaggagcggaaagucgucuauaaugcgguccgacgcgcccaucggcaaauguaacucagagugcauuacuccuaaugguaguauccugaacgauaagccauuccagaaugugaaccgcauaacauauggggcauguccccgauacgugaaacagaauacccuuaagcuggccacuggaaugagaaacgucccugaaaaacaaacaaggggcauuuuuggcgcuaucgccggguucaucgagaauggaugggaagguaugguugacggcugguauggguuucggcaccagaacgcagagggaaccggccaggcugccgaucuuaagagcacgcaagcggccauuaaucagaucaacgguaagcucaaucgucugauugggaaaaccaacgagaaguuccaccagauagaaaaagaguucuccgaaguggagggccgcauccaggacuuagaaaaguacguagaggauacaaaaauugaccuguggucuuauaacgcagagcuccuuguggcucuggaaaaucaacauacuaucgauuugaccgacagcgagaugaacaagcuauuugaaagaacaaagaaacagcugagggagaaugccgaagauaugggaaacggcugcuucaagaucuaccacaaaugugacaaugcuugcauugggucaauacggaacggaacuuaugaucaugacgucuaccgagacgaggcccucaauaaccgcuuucagaucaaggguguggagcugaaaaguggcuacaaggauuggauucuuuggaucuccuucgcaauuagcugcuuucuguuguguguugcccuccugggguucaucaugugggcuugccagaagggaaauauaagauguaacaucugcauuuga

SEQ ID NO: 129852 - RNA, 1701 nt, Artificial Sequence
  derived and/or modified CDS sequence (opt3) from hemagglutinin__InfluenzaA__ABU92655
augaagaccaucauugcccugagcuacauacucugccuuguguucgcucagaaacugcccggcaacgacaauuccacagcaacuuuguguuuagggcaccaugccgucccuaacggaacgaucguuaagaccauuacaaaugaucaaaucgaggugacuaacgcgaccgaacugguacagucuucaaguacagguggcauuugcgacagcccacaccagauccuagauggggagaauuguacccucauagacgcucugcuuggagauccgcagugcgacggcuuucaaaacaaaaagugggaucuguucguggaaagauccaaagccuauucuaauuguuaccccuaugacgucccugauuacgcaucguugaggucacucguggccagcagugguacucuggaguuuaacaaugaauccuucaacuggacagggguuacccagaauggaacgucuagcgcuugcaagcggcgcuccaacaagucauuuuucagucgacugaauuggcucacucauuuaaaauuuaaguauccagcacugaacgugaccaugcccaauaacgagaaauucgacaaacuuuacaucuggggcguccaccauccuggcacagauaacgaccagauuagcuuguaugcccaggcuucugggcguaucacuguguccaccaagagaucacaacagacaguaauuccaaauaucggaagcaggccccggguucgcgaugugccuaguagaauaucuauuuacuggaccaucgucaagccaggugacauucugcuaaucaacuccacgggcaaucucaucgccccgaggggguacuuuaagauucggagcggaaaaucgucuauaaugcgcuccgacgcgcccaucggcaaguguaacucagagugcauuacuccuaaugguaguaucccaaacgauaaacccuuccagaaugugaaccgaauaacauauggggcauguccuagauacgugaagcagaauacccugaaacuugccacuggaaugaggaacgucccagaaaagcaaacacggggcauuuuuggcgcuaucgccggguucaucgagaauggaugggaagguaugguugacggcugguauggguuucgucaccagaacgcagagggaaccggccaggcugccgaucugaaaagcacgcaagcggccauuaaucagaucaacgguaaguugaaucgccucauugggaagaccaacgagaaauuccaccagauagaaaaggaguucuccgaaguggagggcagaauccaggaccuggaaaaauacguagaggauacaaagauugacuuauggucuuauaacgcagagcugcucguggcucuugaaaaucaacauacuaucgaucugaccgacagcgagaugaacaaauuguuugaaaggacaaagaagcagcuacgggagaaugccgaagauaugggaaacggcugcuucaaaaucuaccacaagugugacaaugcuugcauugggucaauacgaaacggaacuuaugaucaugacgucuaccgcgacgaggcccugaauaacagauuucagaucaaagguguggagcucaagaguggcuacaaagauuggauucuguggaucuccuucgcaauuagcugcuuucuucuguguguugccuugcucggguucaucaugugggcuugccagaagggaaauauaagguguaacaucugcauuuga

SEQ ID NO: 129853 - RNA, 1701 nt, Artificial Sequence; identical to SEQ ID NO: 129810
  derived and/or modified CDS sequence (opt3) from hemagglutinin__InfluenzaA__ABU92656

SEQ ID NO: 129854 - RNA, 1701 nt, Artificial Sequence; identical to SEQ ID NO: 128681
  derived and/or modified CDS sequence (opt3) from hemagglutinin__InfluenzaA__ABU92657

SEQ ID NO: 129855 - RNA, 1701 nt, Artificial Sequence; identical to SEQ ID NO: 129810
  derived and/or modified CDS sequence (opt3) from hemagglutinin__InfluenzaA__ABU92658

SEQ ID NO: 129856 - RNA, 1701 nt, Artificial Sequence; identical to SEQ ID NO: 128681
  derived and/or modified CDS sequence (opt3) from hemagglutinin__InfluenzaA__ABU92659

SEQ ID NO: 129857 - RNA, 1701 nt, Artificial Sequence; identical to SEQ ID NO: 129810
  derived and/or modified CDS sequence (opt3) from hemagglutinin__InfluenzaA__ABU92660

SEQ ID NO: 129858 - RNA, 1701 nt, Artificial Sequence
  derived and/or modified CDS sequence (opt3) from hemagglutinin__InfluenzaA__ABU92661
augaagaccaucauugcccugagcuacauacucugccuuguguucgcucagaaacugcccggcaacgacaauuccacagcaacuuuguguuuagggcaccaugccgucccuaacggaacgaucguuaagaccauuacaaaugaucaaaucgaggugacuaacgcgaccgaacugguacagauuucuucaacaggugagaucugcgacaguccacaccagauacuagauggcgaaaauuguacccucaucgacgcucugcuuggggauccgcagugcgacggauuucaaaacaaaaagugggaucuguucguggagagaagcaaagccuauuccaauuguuaccccuaugacgucccugauuacgcaucuuugaggucgcucguggccucaagcggcacucuggaauuuaacaaugagaguuucgacuggacagguguuacccagaacgggacguccucugcuugcaagcggcgcagcgauaaguccuuuuucucacgacugaauuggcucacucauuuaaaauauaaguacccagcacugaacgugaccaugcccaauaacgagaaauuugacaaacuuuauauuuggggaguccaccauccuggcacagauagugaccagaucagcuuguacgcccaggcuucuggccguauuacuguguccaccaagagaucacaacagacaguaaucccaaauauagggagcaggccccggguucgcgacgugaguucuagaauuuccaucuacuggaccauugucaagccuggagauauccugcuaaucaacagcacggguaaccucauugccccaaggggcuauuucaagauacggucggggaaaucuuccaucaugcgcucagacgcgccgauuggaaaguguaauagugaaugcaucacucccaacggcagcauaccuaaugauaaaccauuucagaacgugaaucgaauuacauacggugcaugucccagauaugugaagcagaacacccugaaacuugccacugggaugaggaaugucccugagaagcaaacacggggaaucuucggcgcuaucgccggcuuuauugaaaacgggugggagggaaugguugacgguugguacggcuuccgucaccaaaauuccgaggggaccggacaggcagcugaucugaaaucuacgcaggccgcgaucaaccagauuaauggcaaguugaaccgccucauagguaagaccaaugaaaaauuucaccagaucgagaaggaguucagcgaaguggaagggaggauucaggaccuggagaaauauguagaggauacaaagaucgacuuauggucauacaacgccgaacugcucguggcacuugagaaucaacauacuaucgaucugaccgacagugaaaugaacaaauuguucgagagaacaaagaagcagcuacgggaaaacgcugaggauaugggcaauggaugcuuuaaaauuuaucacaagugugacaacgccugcauaggcuccauccgaaaugggacuuacgaccaugaugucuaccgcgacgaggcucugaacaauagauuccagauuaaaggaguggaacucgagagcgguuauaaggauuggauccuguggauuucuuuugccaucucaugcuuccuucuguguguugcauugcucggcuuuauaaugugggccugccagaaagggaacaucagguguaauauuugcaucuga

SEQ ID NO: 129859 - RNA, 1701 nt, Artificial Sequence; identical to SEQ ID NO: 128121
  derived and/or modified CDS sequence (opt3) from hemagglutinin__InfluenzaA__ABU92662

SEQ ID NO: 129860 - RNA, 1701 nt, Artificial Sequence; identical to SEQ ID NO: 129810
  derived and/or modified CDS sequence (opt3) from hemagglutinin__InfluenzaA__ABU92663

SEQ ID NO: 129861 - RNA, 1701 nt, Artificial Sequence; identical to SEQ ID NO: 129810
  derived and/or modified CDS sequence (opt3) from hemagglutinin__InfluenzaA__ABU92664

SEQ ID NO: 129862 - RNA, 1701 nt, Artificial Sequence
  derived and/or modified CDS sequence (opt3) from hemagglutinin__InfluenzaA__ABU92665
augaagaccaucauugcccugagcuacauacucugccuuguguucgcucagaaacugcccggcaacgacaauuccacagcaacuuuguguuuagggcaccaugccgucccuaacggaacgaucguuaagaccauuacaaaugaucaaaucgaggugacuaacgcgaccgaacugguacagucuucaaguacagguggcauuugcgacagcccacaccagauccuagauggggagaauuguacccucauagacgcucugcuuggagauccgcagugcgacggcuuucaaaacaaaaagugggaucuguucguggaaagauccaaagccuauucuaauuguuaccccuaugacgucccugauuacgcaucguugaggucacucguggccagcagugguacucuggaguuuaacaaugaauccuucaacuggacagggguuacccagaauggaacgucuagcgcuugcaagcggcgcuccaacaagucauuuuucagucgacugaauuggcucacucauuuaaaauuuaaguauccagcacugaacgugaccaugcccaauaacgagaaauucgacaaacuuuacaucuggggcguccaccauccuggcacagauaacgaccagauuagcuuguaugcccaggcuucugggcguaucacuguguccaccaagagaucacaacagacaguaauuccaaauaucggaagcaggccccggguucgcgaugugccuaguagaauaucuauuuacuggaccaucgucaagccaggugacauucugcuaaucaacuccacgggcaaucucaucgccccgaggggguacuuuaagauucggagcggaaaaucgucuauaaugcgcuccgacgcgcccaucggcaaguguaacucagagugcauuacuccuaaugguaguaucccaaacgauaaacccuuccagaaugugaaccgaauaacauauggggcauguccuagauacgugacccagaauacucugaaacuugccacaggaaugaggaacgucccagaaaagcaaacccggggcauuuuuggcgcuaucgccggguucaucgagaauggaugggaagguaugguugacggcugguauggguuucgucaccagaacagcgagggaacgggccaggcagcugaucugaaguccacccaagccgcgauuaaucagaucaacgguaaauugaaucgccucauugggaagacaaacgagaaguuccaccagauagaaaaagaguucucugaaguggagggcagaauccaggaccuggaaaaguacguagaggauacuaaaauugacuuauggagcuauaacgccgagcugcucguggcacuugaaaaucaacauaccaucgaucugacagacucagagaugaacaaguuguuugaaaggacuaaaaagcagcuacgggagaaugcugaagauaugggaaacggcugcuucaagaucuaccacaaaugugacaaugccugcauugggaguauacgaaacggaaccuaugaucaugacgucuaccgcgacgaggcucugaauaacagauuucagaucaaggguguggagcucaaauccggcuacaaggauuggauucuguggaucagcuucgccauuucuugcuuucuucuguguguugcauugcucggguucaucaugugggccugccagaaaggaaauauaagguguaacaucugcauuuga

SEQ ID NO: 129863 - RNA, 1701 nt, Artificial Sequence; identical to SEQ ID NO: 129810
  derived and/or modified CDS sequence (opt3) from hemagglutinin__InfluenzaA__ABU92666

SEQ ID NO: 129864 - RNA, 1701 nt, Artificial Sequence; identical to SEQ ID NO: 128120
  derived and/or modified CDS sequence (opt3) from hemagglutinin__InfluenzaA__ABU92667

SEQ ID NO: 129865 - RNA, 1701 nt, Artificial Sequence; identical to SEQ ID NO: 128120
  derived and/or modified CDS sequence (opt3) from hemagglutinin__InfluenzaA__ABU92668

SEQ ID NO: 129866 - RNA, 1701 nt, Artificial Sequence
  derived and/or modified CDS sequence (opt3) from hemagglutinin__InfluenzaA__ABU92669
augaagaccaucauugcccugagcuacauacucugccuuguguucgcucagaaacugcccgucaacgacaauuccacagcaacuuuguguuuaggccaccaugccguuccuaacgggacgcuggugaagaccaucacaaaugaucacauugagguaacuaacgcgaccgaacuugugcaaucuucaaguacaggaagaaucugcgacagcccacaucagauucucgauggugagaauuguacccugaucgacgcucuacugggcgauccgcacugcgacggguuucagaacaaagaaugggauuuguucgucgagagguccacugccuauucuaauuguuaccccuaugacgugccugauuacgcaucgcuccggucacugguugccagcaguggaacacuggaauuuaacaaugaguccuucaacuggaccggcguggcucagaaugguacgucuagcgcaugcaagcgccgauccauaaaaucauuuuucagucgucucaacugguuacaucaacugaaguauaaguacccagcccuuaaugucacuaugcccaacaaugagaaauuugacaaguuguauaucuggggagugcaccacccuagcaccgauucugaccagauuucccuguacgcucaggccucagggagaguaacaguuagcacuaaaaggagucagcaaaccgugaucccaaacauuggcucucggcccuggguccgcggcguguccagcagaaucucgauauacuggacaauugugaagccuggggauauccuacucauuaacucuaccggaaaucugaucgcgccaagggguuauuucaaaauccggaacggcaaguccucaauuaugcgcaguaaugcaccgauagggaaguguaacagcgaaugcaucacgcccaauggauccauuccuaacgacaaaccauuucagaaugucaaccgaaucacuuacggcgccugucccagauauguuaagcagaauacacuuaaacuggcuaccgguaugaggaacgugccugagaagcagacucgggggauauucggagccauugcaggcuuuaucgaaaauggcugggaggggaugguagacggaugguacgguuuccgucaucaaaacucugagggcacagggcaggcugccgauuugaaaagcacccaggcggccaucaaucaaauuaacggaaagcucaaucgccugaucgagaaaacgaacgaaaaguuucaccagauugaaaaggaguucucagaaguggagggcagaauacaggacuuagagaaauaugucgaagauaccaagaucgaccuguggaguuacaacgcagagcuccuuguggcucuggaaaaucagcauacaauugauuugacugacuccgagaugaacaaacuauucgaaaggacccggaagcaacugcgagagaaugccgaggauauggguaacgggugcuuuaaaaucuaucacaagugugacaaugcuugcaucggcagcauucgcaacggaacauacgaucacgacguuuacagagaugaagcccucaauaacagguuccagauaaagggcguggagcugaaaucuggguauaaggacuggauccuuuggauuucauuugcaaucaguugcuuccuguugugugucgugcuccugggauuuauuaugugggccugccagaaagguaauauccgguguaacauaugcaucuga

SEQ ID NO: 129867 - RNA, 1701 nt, Artificial Sequence; identical to SEQ ID NO: 128120
  derived and/or modified CDS sequence (opt3) from hemagglutinin__InfluenzaA__ABU92670

SEQ ID NO: 129868 - RNA, 1701 nt, Artificial Sequence
  derived and/or modified CDS sequence (opt3) from hemagglutinin__InfluenzaA__ABU92671
augaagaccaucauugcccugagccacauacucugccuuguguucgcucagaaacugcccgucaacgacaauuccacagcaacuuuguguuuaggccaucacgccguuccuaacgggacgcuggugaagaccaucacaaaugaucauauugagguaacuaacgcgaccgaacuugugcaaucuucaaguacaggaagaaucugcgacauuccacaccagauccucgauggugagaauuguacccugauagacgcucuacugggcgauccgcauugcgacggguuucagaacaaagaaugggauuuguucgucgagaggagcacugccuacuccaauuguuaucccuacgacgugccugauuaugcaucucuccggucgcugguugccucaagcggaacacuggaauuuaacaaugagaguuucaacuggaccggcguggcucagaaugguacguccucugcaugcaagcgccgaagcaucaaauccuuuuucucacgucucaacugguuacaccaacugaaguacaaguauccagcccuuaaugucacuaugcccaacaaugagaaauuugacaaguuguacauuuggggagugcaccauccuaguaccgauagcgaccagaucucucuguaugcucaggccccagggagaguaacaguuuccacuaaaaggucacagcaaaccgugauucccaacaucggcagccggccuuggguccgcggcgugaguucuagaauauccauuuacuggacaaucgugaagccaggggauauucuacucaucaacagcaccggaaaucugaucgcgccgagggguuacuucaaaauucggucgggcaagucuuccauaaugcgcucaaacgcacccaucgggaaguguaauagugaaugcauuacgccuaacggaagcaucccaaaugacaaacccuuucagaacgucaaucgaauaacuuauggcgccuguccuagauacguuaagcagaacacacuuaaacuggcuaccgguaugaggaaugugccagagaagcagacucgggggauuuucggagccaucgcaggcuuuaucgaaaacggcugggaggggaugguagacggaugguaugguuuccgucaccaaaauuccgagggcacagggcaggcugccgauuugaaaucuacccaggcggccauuaaccaaaucaauggaaagcucaaccgccugauugagaaaacgaaugaaaaguuucaucagauagaaaaggaguucagcgaagcagagggcagaauccaggacuuagagaaauacguggaagauaccaagauugaccuguggucauauaacgcugagcuccuugucgcccuggaaaaccagcacacaaucgauuugacugacagugagaugaauaaacuauucgaaaggacccggaagcaacugcgagagaacgcugaggauauggguaaugggugcuuuaaaaucuaccacaagugugacaacgccugcauuggcuccauacgcaauggaacauaugaucaugacguguacagagaugaagcacucaacaauagguuccagaucaagggcguugagcugaaaagcggguacaaggacuggauucuuuggaucucuuuugccauuucaugcuuccuguugugugugguccuccugggauuuaucaugugggcuugccagaaagguaacauacgguguaauaucugcauuuga

SEQ ID NO: 129869 - RNA, 1701 nt, Artificial Sequence; identical to SEQ ID NO: 128120
  derived and/or modified CDS sequence (opt3) from hemagglutinin__InfluenzaA__ABU92672

SEQ ID NO: 129870 - RNA, 1701 nt, Artificial Sequence; identical to SEQ ID NO: 128120
  derived and/or modified CDS sequence (opt3) from hemagglutinin__InfluenzaA__ABU92673

SEQ ID NO: 129871 - RNA, 1701 nt, Artificial Sequence
  derived and/or modified CDS sequence (opt3) from hemagglutinin__InfluenzaA__ABU92674
augaagaccaucauugcccugagcuacauacucugccuuguguucgcucagaaacugcccgucaacgacaauuccacagcaacuuuguguuuaggccaccaugccguuccuaacgggacgcuggugaagaccaucacaaaugaucacauugagguaacuaacgcgaccgaacuugugcaaucuucaaguacaggaagaaucugcgacagcccacaucagauucucgauggugagaauuguacccugaucgacgcucuacugggcgauccgcacugcgacggguuucagaacaaagaaugggauuuguucgucgagaggcggacugccuauuccaauuguuaccccuaugacgugccugauuacgcaucucuccgcucgcugguugccucaagcggaacacuggaauuuaacaaugagaguuucaacuggaccggcguggcucagaaugguacguccucugcaugcaagcgacguagcauaaaauccuuuuucucaagacucaacugguuacaucaacugaaguauaaguacccagcccuuaaugucacuaugcccaacaaugagaaauuugacaaguuguauaucuggggagugcaccacccuaguaccgauagcgaccagauuucucuguacgcucaggccuccgggaggguaacaguuucaacuaaacggagccagcaaaccgugaucccaaacauuggcagucgccccugggucagaggcgugucuuccaggaucagcauauacuggacaauugugaagccuggggauauccuacucauuaacucgaccggaaaucugaucgcgccacgggguuauuucaaaauccgcucuggcaaguccucaauuaugcgaaguaacgcaccgauagggaaguguaauagcgaaugcaucacgcccaacggauccauuccuaaugacaaaccauuucagaacgucaauagaaucacuuacggcgccugucccagguauguuaagcagaacacacuuaaacuggcuaccgguaugcggaaugugccugagaagcagacucgugggauauucggagccauugcaggcuuuaucgaaaacggcugggaggggaugguagacggaugguacgguuuccgccaucaaaauucugagggcacagggcaggcugccgauuugaaaagcacccaggcggccaucaaccaaauuaauggaaagcucaacagacugaucgagaaaacgaaugaaaaguuucaccagauugaaaaggaguucucagaaguggagggcaggauacaggacuuagagaaauaugucgaagauaccaagaucgaccuguggaguuacaacgcagagcuccuuguggcucuggaaaaccagcauacaauugauuugacugacuccgagaugaauaaacuauucgaacggacccgaaagcaacugcgcgagaacgccgaggauauggguaaugggugcuuuaaaaucuaucacaagugugacaacgcuugcaucggcagcauuagaaauggaacauacgaucacgacguuuacagggaugaagcccucaacaaucgguuccagauaaagggcguggagcugaaaucuggguauaaggacuggauccuuuggauuucauuugcaaucaguugcuuccuguugugugucgugcuccugggauuuauuaugugggccugccagaaagguaacauccgcuguaauauaugcaucuga

SEQ ID NO: 129872 - RNA, 1701 nt, Artificial Sequence
  derived and/or modified CDS sequence (opt3) from hemagglutinin__InfluenzaA__ABU92675
augaagaccaucauugcccugagcuacauacucugccuuguguucgcucagaaacugcccggcaacgacaauuccacagcaacuuuguguuuagggcaccaugccgucccuaacggaacgaucguuaagaccauuacaaaugaucaaaucgaggugacuaacgcgaccgaacugguacagucuucaaguacagguggcauuugcgacagcccacaccagauccuagauggggagaauuguacccucauagacgcucugcuuggagauccgcagugcgacggcuuucaaaacaaaaagugggaucuguucguggaaagauccaaagccuauucuaauuguuaccccuaugacgucccugauuacgcaucguugaggucacucaucgccagcagugguacucuggaguuuaacaaugaauccuucaacuggacaggggugacccagaauggaacgucuagcgcuugcaagcggcgcuccaacucaaguuucuucagccgacugaauuggcucacucauuuaaaguuuaaauauccagcacugaacguuaccaugcccaauaacgaggaguucgacaaacuuuacauuuggggcgugcaccauccuggcacagauaacgaccagaucucuuuguaugcccaggcuuccgggcguauuacugucucaaccaagagaagccaacagacagugaucccaaauauaggaaguaggccccggguacgcgauauuccuucuagaaucuccauuuacuggaccaucguuaagccaggugacauccugcuaauuaacagcacgggcaaucucauagccccgaggggguacuuuaaaauccggucgggaaagucuuccauuaugcgcucagacgcgcccaucggcaaguguaacagugaaugcauaacuccuaaugguagcauuccaaacgauaaacccuuccagaaugugaaccgaaucacauauggggcauguccuagauacgucaagcagaauacccugaaacuugccacuggaaugaggaacgugccagagaagcaaacacggggcaucuuuggcgcuauugccggguucaucgaaaauggaugggaggguaugguggacggcugguauggguuucgucaccagaacuccgagggaauuggccaggcagcugaucugaaaucuacccaagccgcgauagaccagaucaaugguaaguugaaccgccucauugggaaaacgaaugaaaaguuccaccagaucgagaaggaauuuagcgaggucgaaggcagaauccaggaucuggagaaauacguugaggacaccaagauugauuuauggucauauaacgccgaacugcucguggcacuugagaaccaacauacaauagaccugacugauagugaaaugaauaaauuguuugagaggaccaagaaacagcuacgggaaaacgcugaggacaugggaaauggcugcuucaagaucuaccacaagugugauaacgccugcaugggguccauucgaaauggaacauaugaccaugacguauaccgcgaugaggcucugaacaauagauuucagaucaaagguguggaacucaagagcggcuacaaagacuggauucuguggaucucuuucgccauaucaugcuuucuucugugugucgcauugcucggguucaucaugugggccugccagaagggaaacauuagguguaauaucugcauuuga

SEQ ID NO: 129873 - RNA, 1701 nt, Artificial Sequence; identical to SEQ ID NO: 128681
  derived and/or modified CDS sequence (opt3) from hemagglutinin__InfluenzaA__ABU92676

SEQ ID NO: 129874 - RNA, 1701 nt, Artificial Sequence; identical to SEQ ID NO: 129801
  derived and/or modified CDS sequence (opt3) from hemagglutinin__InfluenzaA__ABU92677

SEQ ID NO: 129875 - RNA, 1701 nt, Artificial Sequence
  derived and/or modified CDS sequence (opt3) from hemagglutinin__InfluenzaA__ABU92678
augaagaccaucauugcccugagcuacauacucugccuuguguucgcucagaaacugcccggcaacgacaauuccacagcaacuuuguguuuagggcaccaugccgucccuaacggaacgaucguuaagaccauuacaaaugaucaaaucgaggugacuaacgcgaccgaacugguacagucuucaaguacagguggcauuugcgacagcccacaccagauccuagauggggagaauuguacccucauagacgcucugcuuggagauccgcagugcgacggccugcaaaacaaaaagugggauuuguuuguggaaagauccaaagccuauucuaauuguuaccccuaugacgucccugauuacgcaucgcucaggucacugaucgccagcagugguacucuggaguucaacaaugaauccuuuaacuggacaggggugacccagaauggaacgucuagcgcuugcaagcggcgcuccaacaauucauucuuuagucgacucaacugguuaacucaucugaaguucaaauauccagcacuuaauguuaccaugcccaacaacgaggaguuugacaaguuguacauuuggggcgugcaccauccuggcacagauaaugaccagaucagccuguaugcccaggcuucugggcguauuacugucuccaccaaaagaucacaacagacagugaucccaaacauaggaagcaggccccggguacgcgauauuccuaguagaaucucuauuuacuggaccaucguuaagccaggugacauccuacucauuaauuccacgggcaaccugauagccccgaggggguacuucaaaauccggagcggaaagucgucuauuaugcgcuccgacgcgcccaucggcaauuguaacucagaaugcauaacuccuaaugguaguauuccaaacgauaagcccuuucagaaugugaaccgaaucacauauggggcauguccuagauacgucaaacagaauacccuuaagcuggccacuggaaugaggaacgugccagagaaacaaacacggggcaucuucggcgcuauugccggguuuaucgaaaauggaugggaggguaugguggacggcugguauggguuccgucaccagaacagcgagggaauuggccaggcagcugauuugaaguccacccaagccgcgauagaccagaucaaugguaaacucaaccgccugauugggaagacgaacgaaaaauuucaccagaucgagaaggaguucucugaagucgaaggcagaauccaggauuuagagaaguacguugaggacaccaaaauugaucuguggagcuauaaugccgaacuccuuguggcacuggagaaccaacauacaauagacuugacugauucagaaaugaauaagcuauucgagaggaccaaaaagcagcugcgggaaaacgcugaggacaugggaaauggcugcuuuaaaaucuaccacaagugugauaacgccugcauugggaguauccgaaauggaacauaugaccaugacguauaccgcgaugaggcucucaacaauagauuccagauuaaggguguggaacugaaauccggcuacaaggacuggauccuuuggaucagcuuugccauaucuugcuuccuguugugugucgcacuccugggguuuauuaugugggccugccagaaaggaaacaucagguguaauauuugcaucuga

SEQ ID NO: 129876 - RNA, 1701 nt, Artificial Sequence
  derived and/or modified CDS sequence (opt3) from hemagglutinin__InfluenzaA__ABU92680
augaagaccaucauugcccugagcuacauacucugccuuguguucgcucagaaacugcccggcaacgacaauuccacagcaacuuuguguuuagggcaccaugccgucccuaacggaacgaucguuaagaccauuacaaaugaucaaaucgaggugacuaacgcgaccgaacugguacagucuucaaguacagguggcauuugcgacagcccacaccagauccuagauggggagaauuguacccucauagacgcucugcuuggagauccgcagugcgacggcuuucaaaacaaaaagugggaucuguucguggaaagauccaaagccuauucuaauuguuaccccuaugacgucccugauuacgcaucguugaggucacucguggccagcagugguacucuggaguuuaacaaugaauccuucaacuggacagggguuacccagaauggaacgucuagcgcuugcaagcggcgcuccaacaauucauuuuucagucgacugaacuggcucacucauuuaaaguuuaaauauccagcacugaaugugaccaugcccaacaacgagaaguucgacaaacuuuacaucuggggcguccaccauccuggcacagauaaugaccagauuuuucuuuaugcccaggcuagcgggcguaucacugugucuaccaagagaucccaacagacaguaauuccaaacaucggaucaaggccccggguucgcaauauaccuagcagaauuaguaucuacuggaccauugugaaaccaggugauauccugcuaaucaacucuacgggcaaucucauugccccgaggggguacuucaagauacgguccggaaagagcucgaucaugcgcucugacgcgcccauuggcaaauguaacuccgagugcaucacuccuaaugguucaauaccaaacgacaagcccuuucagaaugucaaccgaauuacauauggggcauguccuagauacgugaaacagaauacccugaaguuggccacuggaaugaggaacgugccagaaaaacaaacacggggcaucuucggcgcuaucgccggguuuauugagaauggaugggaagguauggucgauggcugguauggguuccgucaccagaacagugagggaaucggccaggcagcugaccugaaaagcacccaagccgcgauugaucagauaaaugguaaauugaaccgccucaucgggaagacgaacgagaaguuccaccagauugaaaaagaguuuuccgaaguugagggcagaauccaggaccuggaaaaguacguggaggauaccaaaaucgacuuauggucuuauaaugccgagcugcucguagcacuugaaaaccaacauacaauugaucugacugacagcgagaugaauaaguuguucgaaaagaccaagaagcagcuaagggagaacgcugaagauaugggaaauggcugcuuuaaaauauaccacaagugugacaacgccugcaucgggucaauucggaauggaacauaugaucaugacguguaccgagacgaggcucugaacaaucgcuuccagaucaaaggugucgagcucaagaguggcuacaaagauuggauucuguggaucuccuuugccauaagcugcuuccuucuguguguggcauugcucggguuuaucaugugggccugccagaagggaaacauuagauguaauaucugcauuuga

SEQ ID NO: 129877 - RNA, 1701 nt, Artificial Sequence; identical to SEQ ID NO: 129805
  derived and/or modified CDS sequence (opt3) from hemagglutinin__InfluenzaA__ABU92681

SEQ ID NO: 129878 - RNA, 1701 nt, Artificial Sequence; identical to SEQ ID NO: 128121
  derived and/or modified CDS sequence (opt3) from hemagglutinin__InfluenzaA__ABU92682

SEQ ID NO: 129879 - RNA, 1701 nt, Artificial Sequence; identical to SEQ ID NO: 129810
  derived and/or modified CDS sequence (opt3) from hemagglutinin__InfluenzaA__ABU92683

SEQ ID NO: 129880 - RNA, 1701 nt, Artificial Sequence
  derived and/or modified CDS sequence (opt3) from hemagglutinin__InfluenzaA__ABU92684
augaagaccaucauugcccugagcuacauacucugccuuguguucgcucagaaacugcccggcaacgacaauuccacagcaacuuuguguuuagggcaccaugccgucccuaacggaacgaucguuaagaccauuacaaaugaucaaaucgaggugacuaacgcgaccgaacugguacagauuucuucaacagguggcaucugcgacaguccacaccagauacuagauggggagaauuguacccucaucgacgcucugcuuggagauccgcagugcgacggcuuucaaaacaaaaagugggaucuguucauugaaagaagcaaagccuauuccaauuguuaccccuaugacgugccugauuacgcaucuuugaggucgcucgucgccucaagcgguacucuggaguuuaacaaugaaaguuucgacuggacaggggugacccagaacggaacguccucugcuugcaagcggcgcagcaauaaguccuuuuucucacgacugaacuggcucacucauuuaaaauauaaguacccagcacugaauguuaccaugcccaacaaugagaaauuugauaaacuuuauaucuggggcgugcaccauccuggcacagacagugaucagauuagcuuguacgcccaggcuccagggcguaucacugucucuaccaagagaucccaacagacagugauacccaacauuggaucaaggccucggguacgcgacguuagcaguagaaucucuauuuacuggaccaucgugaagccaggugacauccugcuaauuaacuccacgggcaaucucauagccccgaggggguauuucaagauccggagcggaaaaucgucuauuaugcgcuccgaugcgcccaucggcaaguguaacucagagugcauaacuccuaaugguaguauuccaaacgacaaacccuuucagaaugucaaccgaaucacauacggggcauguccuagauaugugaagcagaauacccugaaacuugccacuggaaugaggaacgugccagaaaagcaaacacggggcaucuucggcgcuauugccggguuuaucgagaauggaugggaagguauggucgauggcugguacggguuccgucaccagaacagcgagggaaccggccaggcagcugaccugaaauccacgcaagccgcgauuaaucagauaaacgguaaguugaaucgccucaucgggaagaccaacgagaaauuucaccagauugaaaaggaguucucugaaguugagggcagaauccaggaucuggaaaaauauguggaggacacaaagaucgauuuauggagcuacaaugccgagcugcucguagcacuugaaaaccaacauacuauugaccugaccgauucagagaugaacaaauuguucgaaaggacaaagaagcagcuacgggagaaugcugaagacaugggaaacggcugcuuuaaaauauaucacaagugugauaaugccugcaucgggaguauucgaaacggaacuuacgaccaugacguguaccgcgaugaggcucugaauaacagauuccagaucaaaggugucgagcucaaguccggcuauaaagacuggauucuguggaucagcuuugccauaucuugcuuccuucuguguguggcauugcucggguuuaucaugugggccugccagaagggaaauauuagguguaacaucugcauuuga

SEQ ID NO: 129881 - RNA, 1701 nt, Artificial Sequence
  derived and/or modified CDS sequence (opt3) from hemagglutinin__InfluenzaA__ABU92685
augaagaccaucauugcccugagcuacauacucugccuuguguucgcucagaaacugcccggcaacgacaauuccacagcaacuuuguguuuagggcaccaugccgucccuaacggaacgaucguuaagaccauuacaaaugaucaaaucgaggugacuaacgcgaccgaacugguacagauuucuucaacagguggcaucugcgacaguccacaccagauacuagauggggagaauuguacccucaucgacgcucugcuuggagauccgcagugcgacggcuuucaaaacaaaaagugggaucuguucguggaaagaagcaaagccuauuccaauuguuaccccuaugacgucccugauuacgcaucuuugaggucgcucguggccucaagcgguacucuggaguuuaacaaugaaaguuucgacuggacagggguuacccagaacggaacguccucugcuugcaagcggcgcagcaauaaguccuuuuucucacgacugaacuggcucacucauuuaaaauauaaguacccagcacugaaugugaccaugcccaacaaugagaaauuugauaaacuuuauauuuggggcguccaccauccuggcacagacagugaucagaucagcuuguacgcccaggcuucugggcguauuacuguguccaccaagagaucacaacagacaguaaucccaaacauaggaagcaggccccggguucgcgacgugaguucuagaauuuccaucuacuggaccauugucaagccuggugacauccugcuaaucaacagcacgggcaaucucauugccccaaggggguauuucaagauacggucgggaaaaucuuccaucaugaagucagaugcgccgauuggcaaauguaacagugagugcaucacucccaaugguagcauaccuaacgacaagccauuucagaaugugaaccgcauuacauacggggcauguccccgauaugugaaacagaauacccugaaacuugccacuggaaugagaaacgucccugaaaagcaaacaaggggcaucuucggcgcuaucgccggguuuauugagaauggaugggaagguaugguugauggcugguacggguuccggcaccagaacuccgagggaaccggccaggcagcugaccugaagucuacgcaagccgcgaucaaucagauuaacgguaaguugaaucgucucauagggaaaaccaacgagaaguuucaccagaucgaaaaagaguucagcgaaguggagggccgcauucaggaucuggaaaaguauguagaggacacaaaaaucgauuuauggucauacaaugccgagcugcucguggcacuugaaaaccaacauacuaucgaccugaccgauagugagaugaacaaguuguucgaaagaacaaagaaacagcuaagggagaaugcugaagacaugggaaacggcugcuuuaagauuuaucacaaaugugauaaugccugcauaggguccauccggaacggaacuuacgaccaugacgucuaccgagaugaggcucugaauaaccgcuuccagauuaaggguguggagcucaaaagcggcuauaaggacuggauccuguggauuucuuuugccaucucaugcuuccuucuguguguugcauugcucggguuuauaaugugggccugccagaagggaaauaucagauguaacauuugcaucuga

SEQ ID NO: 129882 - RNA, 1701 nt, Artificial Sequence; identical to SEQ ID NO: 129810
  derived and/or modified CDS sequence (opt3) from hemagglutinin__InfluenzaA__ABU92686

SEQ ID NO: 129883 - RNA, 1701 nt, Artificial Sequence; identical to SEQ ID NO: 129810
  derived and/or modified CDS sequence (opt3) from hemagglutinin__InfluenzaA__ABU92687

SEQ ID NO: 129884 - RNA, 1701 nt, Artificial Sequence; identical to SEQ ID NO: 129843
  derived and/or modified CDS sequence (opt3) from hemagglutinin__InfluenzaA__ABU92688

SEQ ID NO: 129885 - RNA, 1701 nt, Artificial Sequence; identical to SEQ ID NO: 129810
  derived and/or modified CDS sequence (opt3) from hemagglutinin__InfluenzaA__ABU92689

SEQ ID NO: 129886 - RNA, 1701 nt, Artificial Sequence
  derived and/or modified CDS sequence (opt3) from hemagglutinin__InfluenzaA__ABU92691
augaagaccaucauugcccugagcuacauacucugccuuguguucgcucagaaacugcccggcaacgacaauuccacagcaacuuuguguuuagggcaccaugccgucccuaacggaacgaucguuaagaccauuacaaaugaucaaaucgaggugacuaacgcgaccgaacugguacagauuucuucaacagguggcaucugcgacaguccacaccagauacuagauggggagaauuguacccucaucgacgcucugcuuggagauccgcagugcgacggcuuucaaaacaaaaagugggaucuguucguggaaagaagcaaagccuauuccaauuguuaccccuaugacgucccugauuacgcaucuuugaggucgcucguggccucaagcgguacucuggaguuuaacaaugaaaguuucgacuggacagggguuacccagaacggaacguccucugcuugcaagcggcgcagcaauaaguccuuuuucucacgacugaacuggcucacucauuuaaaauauaaguacccagcacugaaugugaccaugcccaacaaugagaaauuugauaaacuuuauauuuggggcguccaccauccuggcacagacagugaucagaucagcuuguacgcccaggcuucugggcguauuacuguguccaccaagagaucacaacagacaguaaucccaaacauaggaagcaggccccggguucgcgacgugaguucuagaauuuccaucuacuggaccauugucaagccuggugacauccugcuaaucaacagcacgggcaaucucauugccccaaggggguauuucaagauacggucgggaaaaucuuccgugaugcgcucagaugcgccgaucggcaaguguaacagugagugcauuacucccaaugguagcaucccuaacgacaaaccauuucagaaugugaaccgaauaacauacggggcaugucccagauaugucaagcagaauacccugaaacuugccacuggaaugaggaacguuccugaaaagcaaacacggggcauuuucggcgcuaucgccggguuuaucgagaauggaugggaagguaugguggauggcugguacggguuccgucaccagaacuccgagggaaccggccaggcagcugaccugaaaucuacgcaagccgcgauuaaucagaucaacgguaaguugaaucgccucauugggaagaccaacgagaaauuucaccagauagaaaaggaguucagcgaaguagagggcagaauccaggaucuggaaaaauauguggaggacacaaagauugauuuauggucauacaaugccgagcugcucgucgcacuugaaaaccaacauacuaucgaccugaccgauagugagaugaacaaauuguucgaaaggacaaagaagcagcuacgggagaaugcugaagacaucggaaacggcugcuuuaaaauuuaucacaagugugauaaugccugcauaggguccauccgaaacggaacuuacgaccauaauguguaccgcgacgaggcucugaacaauagauuccagauuaaagguguugagcucaagagcggcuauaaagauuggauccuguggauuucuuuugccaucucaugcuuccuucuguguguggcauugcucggguuuauaaugugggccugccagaagggaaacaucagguguaauauuugcaucuga

SEQ ID NO: 129887 - RNA, 1701 nt, Artificial Sequence; identical to SEQ ID NO: 128738
  derived and/or modified CDS sequence (opt3) from hemagglutinin__InfluenzaA__ABU92692

SEQ ID NO: 129888 - RNA, 1701 nt, Artificial Sequence
  derived and/or modified CDS sequence (opt3) from hemagglutinin__InfluenzaA__ABU92693
augaaggccaucauugcucugagcuacauacucugccuuguguucgcacagaaacugcccggcaacgacaauuccaccgccacauuguguuuagggcaccaugcggucccuaacggaacuaucguuaagacgauuaccaaugaucaaaucgaggugacaaacgcuacugaacugguacagauuucuucaaccggugagaucugcgacaguccacaccagauacuagauggcgaaaauuguacacucaucgacgcccugcuuggggauccgcagugcgacggauuucaaaacaaaaagugggaucuguucguggagagaagcaaagcauauuccaauuguuaccccuaugacgucccugauuacgccucuuugaggucgcucguggcuucaagcggcacccuggaauuuaacaaugagaguuucgacuggacugguguuacacagaacgggaccuccucugcaugcaagcggcgcagcgauaaguccuuuuucucacgacugaauuggcucacgcauuuaaaauauaaguacccagcccugaacgugacuaugcccaauaacgagaaauuugacaaacuuuauauuuggggaguccaccauccuggcaccgauagugaccagaucagcuuguacgcucaggccucuggccguauuacaguguccacuaagagaucacaacagaccguaaucccaaauauagggagcaggccccggguucgcgacgugaguucuagaauuuccaucuacuggacaauugucaagccuggagauauccugcuaaucaacagcaccgguaaccucauugcgccaaggggcuauuucaagauacggucggggaaaucuuccaucaugcgcucagacgcaccgauuggaaaguguaauagugaaugcaucacgcccaacggcagcauaccuaaugauaaaccauuucagaacgugaaucgaauuacuuacggugccugucccagauaugugaagcagaacacacugaaacuugcuaccgggaugaggaaugucccugagaagcaaacucggggaaucuucggcgccaucgcaggcuuuauugaaaacgggugggagggaaugguugacgguugguacggcuuccgucaccaaaauuccgaggggacaggacaggcugccgaucugaaaucuacccaggcggccaucaaccagauuaauggcaaguugaaccgccucauagguaagacgaaugaaaaauuucaccagaucgagaaggaguucagcgaaguggaagggaggauucaggaccuggagaaauauguagaggauaccaagaucgacuuauggucauacaacgcagaacugcucguggcucuugagaaucaacauacaaucgaucugacugacagugaaaugaacaaauuguucgagagaaccaagaagcagcuacgggaaaacgccgaggauaugggcaauggaugcuuuaaaauuuaucacaagugugacaacgcuugcauaggcuccauccgaaaugggacauacgaccaugaugucuaccgcgacgaggcccugaacaauagauuccagauuaaaggaguggaacucaagagcgguuauaaagauuggauccuguggauuucuuuugcaaucucaugcuuccuucuguguguugccuugcucggcuuuauaaugugggcuugccagaaggggaacaucagguguaauauuugcaucuga

SEQ ID NO: 129889 - RNA, 1701 nt, Artificial Sequence
  derived and/or modified CDS sequence (opt3) from hemagglutinin__InfluenzaA__ABU92694
augaagaccaucauugcccugagcuacauacucugccuuguguucgcucagaaacugcccggcaacgacaauuccacagcaacuuuguguuuagggcaccaugccgucccuaacggaacgaucguuaagaccauuacaaaugaucaaaucgaggugacuaacgcgaccgaacugguacagucuucaaguacagguggcauuugcgacagcccacaccagauccuagauggggagaauuguacccucauagacgcucugcuuggagauccgcagugcgacggcuuucaaaacaaaaagugggaucuguucguggaaagauccaaagccuauucuaauuguuaccccuaugacgucccugauuacgcaucguugaggucacucguggccagcagugguacucuggaguuuaacaaugaauccuucaacuggacagggguuacccagaauggaacgucuagcgcuugcaagcggcgcuccaacaauucauuuuucagucgacugaacuggcucacucauuuaaaguuuaaauauccagcacugaaugugaccaugcccaacaacgagaaguucgacaaacuuuacaucuggggcguccaccauccuggcacagauaaugaccagauuagcuuguaugcccaggcuucugggcguaucacuguguccaccaagagaucacaacagacaguaauuccaaacaucggaagcaggccccggguucgcgauauaccuaguagaauuucuaucuacuggaccauugugaaaccaggugacauccugcuaaucaauuccacgggcaaccucauugccccgaggggguacuuuaagauacggagcggaaagucgucuaucaugcgcuccgacgcgcccauuggcaaauguaauucagagugcaucacuccuaacgguaguauaccaaaugauaagcccuuccagaacgucaaucgaauuacauauggggcauguccuagauacgugaaacagaacacccugaaacuugccacuggaaugaggaaugugccagaaaagcaaacacggggcaucuuuggcgcuaucgccggguucauugagaacggaugggaagguauggucgacggcugguauggguuucgucaccagaauagcgagggaaucggccaggcagcugaucugaaguccacccaagccgcgauuaaccagauaaaugguaaauugaaccgccucaucgggaagacgaacgagaaguuccaccagauugaaaaagaguucucugaaguugagggcagaauccaggaccuggaaaaguacguggaggauaccaaaguagacuuauggagcuauaaugccgagcugcucguggcacuugaaaaccaacauacaaucgaucugacugacucagagaugaauaaguuguuugaaaggaccaaaaagcagcuacgggagaacgcugaagauaugggaaauggcugcuucaagauuuaccacaaaugugacaacgccugcauagggaguauccgaaauggaacauaugaucaugacgucuaccgcgacgaggcucugaacaauagauuucagauuaaggguguggagcucaaauccggcuacaaggauuggauccuguggauuagcuucgccaucucuugcuuucuucuguguguugcauugcucggguucauaaugugggccugccagaaaggaaacaucagguguaauauuugcaucuga

SEQ ID NO: 129890 - RNA, 1701 nt, Artificial Sequence; identical to SEQ ID NO: 129801
  derived and/or modified CDS sequence (opt3) from hemagglutinin__InfluenzaA__ABU92695

SEQ ID NO: 129891 - RNA, 1701 nt, Artificial Sequence
  derived and/or modified CDS sequence (opt3) from hemagglutinin__InfluenzaA__ABU92696
augaagaccaucauugcccugggcuacauacucugccuuguguucgcucagaaacugcccgggaacgacaauagcacagcaacuuuguguuuaggacaccaugccgucccuaacgguacgaucguuaagaccauuacaaaugaucaaaucgaggugacuaacgcgaccgaacugguacaguccucuucaacaggcgggauuugcgacaguccacaccagauccuagauggagagaauuguacccucauagacgcucugcuuggcgauccgcagugcgacgguuuucaaaacaaaaagugggaucuguucguggaaagaagcaaagccuauuccaauuguuaccccuaugacgucccugauuacgcaucuuugaggucgcucaucgccucaagcgggacucuggaguuuaacaaugaaaguuucaacuggacaggagugacccagaauggcacguccucugcuugcaagcggcgcagcaacuccucauuuuucagucgacugaauuggcucacucauuuaaaguuuaaauauccagcacugaacguuaccaugcccaauaacgaggaguucgacaaacuuuacauuuggggcgugcaccauccugggacagauaacgaccagaucagcuuguaugcccaggcuucuggacguauuacugucuccaccaagagaucacaacagacagugaucccaaauauagguagcaggccccggguacgcgauauuccuaguagaaucucuauuuacuggaccaucguuaagccaggcgacauccugcuaauuaacuccacggggaaucucauagccccgaggggauacuuuaaaauccggagcggcaagucgucuauuaugcgcuccgacgcgcccaucgguaaguguaacucagaaugcauaacuccuaaugggaguauuccaaacgauaaacccuuccagaaugugaaccgaaucacauauggagcauguccuagauacgucaagcagaauacccugaaacuugccacuggcaugaggaacgugccagagaagcaaacacggggcaucuuuggggcuauugccggauucaucgaaaaugguugggagggcaugguggacgggugguauggauuucgucaccagaacagcgagggcauuggucaggcagcugaucugaaauccacccaagccgcgauagaccagaucaaugggaaguugaaccgccucauuggcaaaacgaaugaaaaguuccaccagaucgagaaggaguucucugaagucgaaggaagaauccaggaucuggagaaauacguugaggacaccaagauugauuuauggagcuauaacgccgaacugcucguggcacuugagaaccaacauacaauagaccugacugauucagaaaugaauaaauuguuugagaggaccaagaaacagcuacgggaaaacgcugaggacaugggcaaugggugcuucaagaucuaccacaagugugauaacgccugcauuggaaguauccgaaaugguacauaugaccaugacguauaccgcgaugaggcucugaacaauagauuucagauuaaaggcguggaacucaaguccggguacaaagacuggauccuguggaucagcuucgccauaucuugcuuucuucugugugucgcauugcucggauucauuaugugggccugccagaagggcaacaucagguguaauauuugcaucuga

SEQ ID NO: 129892 - RNA, 1701 nt, Artificial Sequence; identical to SEQ ID NO: 128681
  derived and/or modified CDS sequence (opt3) from hemagglutinin__InfluenzaA__ABU92697

SEQ ID NO: 129893 - RNA, 1701 nt, Artificial Sequence; identical to SEQ ID NO: 128291
  derived and/or modified CDS sequence (opt3) from hemagglutinin__InfluenzaA__ABU92698

SEQ ID NO: 129894 - RNA, 1701 nt, Artificial Sequence
  derived and/or modified CDS sequence (opt3) from hemagglutinin__InfluenzaA__ABU92699
augaagaccaucauugcccugagcuacauacucugccuuguguucgcucagaaacugcccggcaacgacaauuccacagcaacuuuguguuuagggcaccaugccgucccuaacggaacgaucguuaagaccauuacaaaugaucaaaucgaggugacuaacgcgaccgaacugguacagucuucaaguacagguggcauuugcgacagcccacaccagauccuagauggggagaauuguacccucauagacgcucugcuuggagauccgcagugcgacggcuuucaaaacaaaaagugggaucuguucguggaaagauccaaagccuauucuaauuguuaccccuaugacgucccugauuacgcaucguugaggucacucguggccagcagugguacucuggaguuuaacaaugaauccuucaacugggcugggguuacacagaauggaaccucuagcgcaugcaagcggcgcuccaacaauucauuuuucagucgacugaacuggcucacgcauuuaaaguuuaaauauccagcccugaaugugacuaugcccaacaacgagaaguucgacaaacuuuacaucuggggcguccaccauccuggcaccgauaaugaccagauuuuucuuuaugcucaggccagcgggcguaucacagugucuacuaagagaucccaacagaccguaauuccaaacaucggaucaaggccccggguucgcaauauaccuagcagaauuaguaucuacuggacaauugugaaaccaggugauauccugcuaaucaacucuaccggcaaucucauugcgccgaggggguacuucaagauacgguccggaaagagcucgaucaugcgcucugacgcacccauuggcaaauguaacuccgagugcaucacgccuaaugguucaauaccaaacgacaagcccuuucagaaugucaaccgaauuacuuauggggccuguccuagauacgugaaacagaauacacugaaguuggcuaccggaaugaggaacgugccagaaaaacaaacucggggcaucuucggcgccaucgcaggguuuauugagaauggaugggaagguauggucgauggcugguauggguuccgucaccagaacagugagggaaucggccaggcugccgaccugaaaagcacacaagcggccauugaucagauaaaugguaaauugaaccgccucaucgggaagaccaacgagaaguuccaccagauugaaaaagaguuuuccgaaguugagggcagaauccaggaccuggaaaaguacguggaggauacgaaaaucgacuuauggucuuauaaugcagagcugcucguagcucuugaaaaccaacauaccauugaucugacagacagcgagaugaauaaguuguucgaaaagacuaagaagcagcuaagggagaacgccgaagauaugggaaauggcugcuuuaaaauauaccacaagugugacaacgcuugcaucgggucaauucggaauggaaccuaugaucaugacguguaccgagacgaggcccugaacaaucgcuuccagaucaaaggugucgagcucaagaguggcuacaaagauuggauucuguggaucuccuuugcaauaagcugcuuccuucuguguguggccuugcucggguuuaucaugugggcuugccagaagggaaacauuagauguaauaucugcauuuga

SEQ ID NO: 129895 - RNA, 1701 nt, Artificial Sequence
  derived and/or modified CDS sequence (opt3) from hemagglutinin__InfluenzaA__ABU92700
augaagaccaucauugcccugagcuacauacucugccuuguguucgcucagaaacugcccgagaacgacaauuccacagcaacuuuguguuuaggccaccaugccgucccuaacgggacgaucguuaagaccauuacaaaugaucaaaucgaagugacuaacgcgaccgagcugguacagucuucaaguacaggagguauuugcgacagcccacaccagauccuagauggcgaaaauuguacccucauagacgcucugcuuggggauccgcagugcgacggauuucaaaacaaaaagugggaucuguucguggagagauccaaagccuauucuaauuguuaccccuaugacgucccugauuacgcaucguugaggucacucguggccagcaguggcacucuggaauuuaacaaugaguccuucaacuggacagguguuacccagaaugggacgucuagcgcuugcaagcggcgcuccaacaauucauuuuucagucgacugaacuggcucacucauuuaaaguuuaaauauccagcacugaaugugaccaugcccaacaacgagcguuucgacaaguuguacaucuggggaguccaccauccuggcacagauaaugaccagauuuuucuuuaugcccaggcuagcggcagaaucacugugucuaccaaaaggucccaacagacaguaauuccaaacaucgggucacggccccgcguuagaaauauaccuagcaggauuaguaucuacuggaccauugugaagccaggagauauccugcuaaucaacucuacggguaaucucauugccccgcggggcuacuucaaaauacgcuccggaaagagcucgaucaugcgaucugacgcgcccauugggaaguguaacuccgaaugcaucacuccuaauggcucaauaccaaacgacaaacccuuucagaaugucaacagaauuacauauggugcauguccuagguacgugaagcagaauacccugaaacuugccacugggaugcggaacgugccagagaagcaaacacguggaaucuucggcgcuaucgccggcuuuauugaaaaugggugggagggaauggucgaugguugguauggcuuccgccaccagaacagugaggggaucggacaggcagcugaccugaaaagcacccaagccgcgauugaucagauaaauggcaaguugaacagacucaucgguaaaacgaacgaaaaguuccaccagauugagaaggaauuuuccgagguugaagggaggauccaggaccuggagaaauacguggaggauaccaagaucgacuuauggucuuauaaugccgaacugcucguagcacuugagaaccaacauacaauugaucugacugacagcgaaaugaauaaauuguucgagaagaccaaaaagcagcuacgggaaaacgcugaggauaugggcaauggaugcuuuaagauauaccacaaaugugacaacgccugcaucggcucaauucgaaaugggacauaugaucaugacguguaccgcgacgaggcucugaacaauagauuccagaucaagggagucgaacucaaaagugguuacaaggauuggauucuguggaucuccuuugccauaagcugcuuccuucuguguguggcauugcucggcuuuaucaugugggccugccagaaagggaacauuagguguaauaucugcauuuga

SEQ ID NO: 129896 - RNA, 1701 nt, Artificial Sequence
  derived and/or modified CDS sequence (opt3) from hemagglutinin__InfluenzaA__ABU92701
augaagaccaucauugcccugagcuacauacucugccuuguguucgcucagaaacugcccgagaacgacaauuccacagcaacuuuguguuuaggccaccaugccgucccuaacgggacgaucguuaagaccauuacaaaugaucaaaucgaagugacuaacgcgaccgagcugguacagucuucaaguacaggagguauuugcgacagcccacaccagauccuagauggcgaaaauuguacccucauagacgcucugcuuggggauccgcagugcgacggauuucaaaacaaaaagugggaucuguucguggagagauccaaagccuauucuaauuguuaccccuaugacgucccugauuacgcaucguugaggucacucguggccagcaguggcacucuggaauuuaacaaugaguccuucaacuggacagguguuacccagaaugggacgucuagcgcuugcaagcggcgcuccaacaauucauuuuucagucgacugaacuggcucacucauuuaaaguuuaaauauccagcacugaaugugaccaugcccaacaacgagcguuucgacaaguuguacaucuggggaguccaccauccuggcacagauaaugaccagauuuuucuuuaugcccaggcuagcggcagaaucacugugucuaccaaaaggucccaacagacaguaauuccaaacaucgggucacggccccgcguuagaaauauaccuagcaggauuaguaucuacuggaccauugugaagccaggagauauccugcuaaucaacucuacggguaaucucauugccccgcggggcuacuucaaaauacgcuccggaaagagcucgaucaugcgaucugacgcgcccauugggaaguguaacuccgaaugcaucacuccuaauggcucaauaccaaacgacaaacccuuucagaaugucaacagaauuacauauggugcauguccuagguacgugaagcagaauacccugaaacuugccacugggaugcggaacgugccagagaagcaaacacguggaaucuucggcgcuaucgccggcuuuauugaaaaugggugggagggaauggucgaugguugguauggcuuccgccaccagaacagugaggggaucggacaggcagcugaccugaaaagcacccaagccgcgauugaucagauaaauggcaaguugaacagacucaucgguaaaacgaacgaaaaguuccaccagauugagaaggaauuuuccgagguugaagggaggauccaggaccuggagaaauacguggaggauaccaagaucgacuuauggucuuauaaugccgaacugcucguagcacuugagaaccaacauacaauugaucugacugacagcgaaaugaauaaauuguucgagaagaccaaaaagcagcuacgggaaaacgcugaggauaugggcaauggaugcuuuaagauauaccacaaaugugacaacgccugcaucggcucaauucgaaaugggacauaugaucaugacguguaccgcgacgaggcucugaacaauagacuccagaucaagggagucgaacugaaaagugguuacaaggauuggauucuuuggaucuccuucgccauaagcugcuuucuguuguguguggcacuccugggcuucaucaugugggccugccagaaagggaacauuagguguaauaucugcauuuga

SEQ ID NO: 129897 - RNA, 1701 nt, Artificial Sequence; identical to SEQ ID NO: 128660
  derived and/or modified CDS sequence (opt3) from hemagglutinin__InfluenzaA__ABU92702

SEQ ID NO: 129898 - RNA, 1701 nt, Artificial Sequence; identical to SEQ ID NO: 129876
  derived and/or modified CDS sequence (opt3) from hemagglutinin__InfluenzaA__ABU92703

SEQ ID NO: 129899 - RNA, 1701 nt, Artificial Sequence
  derived and/or modified CDS sequence (opt3) from hemagglutinin__InfluenzaA__ABU92704
augaagaccaucauugcccugagcuacauacucugccuuguguucgcucagaaacugcccggcaacgacaauuccacagcaacuuuguguuuagggcaccaugccgucccuaacggaacgaucguuaagaccauuacaaaugaucaaaucgaggugacuaacgcgaccgaacugguacagucuucaaguacagguggcauuugcgacagcccacaccagauccuagauggggagaauuguacccucauagacgcucugcuuggagauccgcagugcgacggcuuucaaaacaaaaagugggaucuguucguggaaagaaauaaagccuauuccaacuguuaccccuaugacgucccugauuacgcaucuuugaggucgcucguggccucaagcgguacucuggaguuuaauaacgaaaguuucaauuggacagggguuacccagaacggaacguccucugcuugcaagcggcgcagcaauaacuccuuuuucucacgacugaauuggcucacucauuuaaaguuuaaauauccagcacugaacgugaccaugcccaacaaugagaaguucgacaaacuuuacaucuggggcguccaccauccuggcacagauaacgaccagaucuuuuuguaugcccaggcuagugggcguauuacugugagcaccaagagaucucaacagacaguaauuccaaauaucggauccaggccccggguucgcaacauaccuucaagaauuagcaucuacuggaccauugugaaaccaggugauauccugcuaaucaauaguacgggcaaccucauugccccgaggggguacuucaagauacggucuggaaaguccagcaucaugcgcucggacgcgcccauuggcaaauguaauucugagugcaucacuccuaacgguuccauaccaaaugacaagcccuuucagaacgucaaucgaauuacauauggggcauguccuagauacgugaaacagaacacccugaaacuugccacuggaaugaggaaugugccagaaaaacaaacacggggcaucuucggcgcuaucgccggguuuauugagaacggaugggaagguauggucgauggcugguauggguuccgucaccaaaauucagagggaaucggccaggcagcugaccugaagaguacccaggccgcgauugaucagauaaacgguaaauugaaccgccucaucgggaagacgaaugagaaguuccaccagauugaaaaagaguuuagcgaaguugagggcagaauccaggaccuggaaaaguacguggaggauaccaaaaucgacuuaugguccuauaacgccgagcugcucguagcacuugaaaaucaacauacaauugaucugacugacucugagaugaacaaguuguucgaaaagaccaagaagcagcuaagggagaaugcugaagauaugggaaacggcugcuuuaaaauauaccacaagugugacaaugccugcaucgggagcauucggaacggaacauaugaucaugacguguaccgagacgaggcucugaauaaccgcuuccagaucaaaggugucgagcucaagucaggcuacaaagauuggauucuguggaucaguuuugccauauccugcuuccuucuguguguggcauugcucggguuuaucaugugggccugccagaagggaaauauuagauguaacaucugcauuuga

SEQ ID NO: 129900 - RNA, 1701 nt, Artificial Sequence
  derived and/or modified CDS sequence (opt3) from hemagglutinin__InfluenzaA__ABU92705
augaagaccaucauugcccugagcuacauacucugccuuguguucgcucagaaacugcccggcaacgacaauuccacagcaacuuuguguuuagggcaccaugccgucccuaacggaacgaucguuaagaccauuacaaaugaucaaaucgaggugacuaacgcgaccgaacugguacagucuucaaguacagguggcauuugcgacagcccacaccagauccuagauggggagaauuguacccucauagacgcucugcuuggagauccgcagugcgacggcuuucaaaacaaaaagugggaucuguucguggaaagauccaaagccuauucuaauuguuaccccuaugacgucccugauuacgcaucguugaggucacucaucgccagcagugguacucuggaguuuaacaaugaauccuucaacuggacaggggugacccagaauggaacgucuagcgcuugcaagcggcgcuccaacaauucauuuuucagucgacugaacuggcucacucauuuaaaguuuaaauauccagcacugaauguuaccaugcccaacaacgaggaguucgacaagcuguacauuuggggcgugcaccauccuggcacagauaaugaccagaucagcuuguaugcccaggcuccagggcguauuacugucucuaccaaaagaucccaacagacagugauccccaacauaggaucaaggccucggguacgcgauauuccaagcagaaucaguauuuacuggaccaucguuaagccgggugacauccugcuaauuaauucuacgggcaaccucauagcccccaggggguacuuuaaaauccgguccggaaagagcucgauuaugcgcucugacgcgccuaucggcaaguguaaauccgaaugcauaacuccaaaugguucaauucccaacgauaagccuuuccagaaugugaaccgaaucacauauggggcauguccaagauacgucaaacagaauacccugaaacuugccacuggaaugaggaacgugcccgagaagcaaacacggggcaucuuuggcgcuauugccggguucaucgaaaauggaugggaggguaugguggacggcugguauggguuucgucaccagaacagugagggaauuggccaggcagcugaucuuaagagcacccaagccgcgauagaccagaucaaugguaaauugaaccgccucauugggaagacgaaugaaaaguuccaccagaucgagaaagaguucuccgaagucgaaggcagaauccaggaucuggagaaguacguugaggacaccaaaauugauuuauggucuuauaacgccgaacugcucguggcacuugagaaccaacauacaauagaccugacugauagcgaaaugaauaaguuguuugagaggaccaaaaagcagcuacgggaaaacgcugaggacaugggaaauggcugcuucaagaucuaccacaaaugugauaacgccugcauugggucaauccgaaauggaacauaugaccaugacguauaccgcgaugaggcucugaacaauagauuuaggauuaagaguguggaacucaaauccgguuacaaggacuggauccuguggaucagcuucgccauaucuugcuuucuucugugugucgcauugcucggcuucauuaugugggccugccagaaagggaacauccgguguaauauuugcaucuga

SEQ ID NO: 129901 - RNA, 1701 nt, Artificial Sequence; identical to SEQ ID NO: 128121
  derived and/or modified CDS sequence (opt3) from hemagglutinin__InfluenzaA__ABU92706

SEQ ID NO: 129902 - RNA, 1701 nt, Artificial Sequence; identical to SEQ ID NO: 129810
  derived and/or modified CDS sequence (opt3) from hemagglutinin__InfluenzaA__ABU92707

SEQ ID NO: 129903 - RNA, 1701 nt, Artificial Sequence; identical to SEQ ID NO: 129810
  derived and/or modified CDS sequence (opt3) from hemagglutinin__InfluenzaA__ABU92708

SEQ ID NO: 129904 - RNA, 1701 nt, Artificial Sequence
  derived and/or modified CDS sequence (opt3) from hemagglutinin__InfluenzaA__ABU92709
augaagaccaucauugcccugagcuacauacucugccuuguguucgcucagaaacugcccggcaacgacaauuccacagcaacuuuguguuuagggcaccaugccgucccuaacggaacgaucguuaagaccauuacaaaugaucaaaucgaggugacuaacgcgaccgaacugguacagucuucaaguacagguggcauuugcgacagcccacaccagauccuagauggggagaauuguacccucauagacgcucugcuuggagauccgcagugcgacggcuuucaaaacaaaaagugggaucuguucguggaaagauccaaagccuauucuaauuguuaccccuaugacgucccugauuacgcaucguugaggucacucguggccagcagugguacucuggaguuuaacaaugaauccuucaacugggcugggguuacacagaauggaaccucuagcgcaugcaagcggcgcuccaacaagucauuuuucagucgacugaauuggcucacgcauuuaaaauauaaguacccagcccugaacgugacuaugcccaauaacgagaaauuugacaaacuuuauaucuggggcguccaccauccuggcaccgauagcgaccagauuucuuuguacgcucaggccuccgggcguaucacagugucaacuaagagaagccaacagaccguaauuccaaacaucggaaguaggccccggguucgcgaugugucuuccagaauaagcauuuacuggacaaucgucaagccuggugacauucugcuaaucaauucgaccggcaaccucaucgcgccaaggggguauuucaagauucggucuggaaaauccucaauaaugcgcagugacgcaccgaucggcaaguguaauagcgagugcauuacgcccaacgguuccaucccuaaugauaaaccauuucagaacgugaaucgaauaacuuacggggccugucccagauaugugaagcagaacacacugaaacuugcuaccggaaugaggaaugucccugaaaagcaaacucggggcauuuucggcgccaucgcaggguuuaucgagaacggaugggaagguaugguugacggcugguacggguuccgucaccaaaauucugagggaacaggccaggcugccgaucugaaaagcacccaggcggccauuaaccagaucaaugguaaguugaaccgccucauugggaagacgaaugagaaauuucaccagauagaaaaggaguucucagaaguggagggcagaauccaggaccuggaaaaauauguagaggauaccaagauugacuuauggaguuacaacgcagagcugcucguggcucuugaaaaccaacauacaaucgaucugacugacuccgagaugaauaaauuguucgaaaggaccaagaagcagcuacgggagaacgccgaagauaugggaaauggcugcuuuaaaaucuaucacaagugugacaacgcuugcauugagagcauacgaaaugggacauacgaucaugacgucuaccgcgacgaggcccugaacaauagauuccagaucaaaggaguggaacucaagucugguuauaaagauuggauucuguggaucucauuugcaauuaguugcuuccuucuguguguugccuugcucggcuuuaucaugugggcuugccagaaggggaacauaagguguaauaucugcauuuga

SEQ ID NO: 129905 - RNA, 1701 nt, Artificial Sequence; identical to SEQ ID NO: 128099
  derived and/or modified CDS sequence (opt3) from hemagglutinin__InfluenzaA__ABU92710

SEQ ID NO: 129906 - RNA, 1701 nt, Artificial Sequence; identical to SEQ ID NO: 128121
  derived and/or modified CDS sequence (opt3) from hemagglutinin__InfluenzaA__ABU92711

SEQ ID NO: 129907 - RNA, 1701 nt, Artificial Sequence; identical to SEQ ID NO: 128121
  derived and/or modified CDS sequence (opt3) from hemagglutinin__InfluenzaA__ABU92712

SEQ ID NO: 129908 - RNA, 1701 nt, Artificial Sequence; identical to SEQ ID NO: 129810
  derived and/or modified CDS sequence (opt3) from hemagglutinin__InfluenzaA__ABU92713

SEQ ID NO: 129909 - RNA, 1701 nt, Artificial Sequence; identical to SEQ ID NO: 129810
  derived and/or modified CDS sequence (opt3) from hemagglutinin__InfluenzaA__ABU92714

SEQ ID NO: 129910 - RNA, 1701 nt, Artificial Sequence
  derived and/or modified CDS sequence (opt3) from hemagglutinin__InfluenzaA__ABU92715
augaagaccaucauugcccugagcuacauacucugccuuguguucgcucagaaacugcccggcaacgacaauuccacagcaacuuuguguuuagggcaccaugccgucccuaacggaacgaucguuaagaccauuacaaaugaucaaaucgaggugacuaacgcgaccgaacugguacagauuucuucaacaggugagaucugcgacaguccacaccagauacuagauggcgaaaauuguacccucaucgacgcucugcuuggggauccgcagugcgacggauuucaaaacaaaaagugggaucuguucguggagagaagcaaagccuauuccaauuguuaccccuaugacgucccugauuacgcaucuuugaggucgcucguggccucaagcggcacucuggaauuuaacaaugagaguuucgacuggacagguguuacccagaacgggacguccucugcuugcaagcggcgcagcaauaaguccuuuuucucacgacugaacuggcucacucauuuaaaauauaaguacccagcacugaaugugaccaugcccaacaaugagaaauuugaaaaacuuuauauuuggggaguccaccauccuggcacagauagugaccagaucaacuuguacgcccaggcuagcggccguauuacugugucuaccaagagaucccaacagacaguaaucccaaacauagggucaaggccccggguucgcgaugugagcaguagaauuucuaucuacuggaccauugucaagccuggagacauccugcuaaucaauuccacggguaaccucauugccccaaggggcuauuucaagauacggagcgggaaaucgucuaucaugcgcuccgacgcgccgauuggaaaguguaauucagagugcaucacucccaacggcaguauaccuaaugauaaaccauuucagaacgugaaucgaauuacauacggugcaugucccagauaugugaagcagaacacccugaaacuugccacugggaugaggaaugucccugaaaagcaaacacggggaaucuucggcgcuaucgccggcuuuauugagaacgggugggagggaaugguugacgguugguacggcuuccgucaccagaauagcgaagggaccggacaggcagcugaucugaaauccacgcaagccgcgaucaaccagauuaauggcaaguugaaccgccucauagguaagaccaaugagaaauuucaccagaucgaaaaggaguucucugaaguggaggggaggauucaggaccuggagaaauauguagaagauacaaagaucgacuuauggagcuacaacgccgagcugcucguggcacuugaaaaccaacauacuaucgaucugaccgacucagagaugaauaaauuguucgaaagaacaaagaagcagcuacgggagaacgcugaggauaugggcaauggaugcuuuaaaauuuaucacaagugugacaacgccugcauaggcaguauccgaaaugggacuuacgaucaugacgucuaccgcgacgaagcucugaacaauagauuccagauuaaaggaguggagcucaaguccgguuauaaagauuggauccuguggauuagcuuugccaucucuugcuuccuucuguguguugcauugcucggcuuuauaaugugggccugccagaaggggaacaucagguguaauauuugcaucuga

SEQ ID NO: 129911 - RNA, 1701 nt, Artificial Sequence; identical to SEQ ID NO: 129810
  derived and/or modified CDS sequence (opt3) from hemagglutinin__InfluenzaA__ABU92716

SEQ ID NO: 129912 - RNA, 1701 nt, Artificial Sequence; identical to SEQ ID NO: 129810
  derived and/or modified CDS sequence (opt3) from hemagglutinin__InfluenzaA__ABU92717

SEQ ID NO: 129913 - RNA, 1701 nt, Artificial Sequence; identical to SEQ ID NO: 128121
  derived and/or modified CDS sequence (opt3) from hemagglutinin__InfluenzaA__ABU92718

SEQ ID NO: 129914 - RNA, 1701 nt, Artificial Sequence; identical to SEQ ID NO: 128121
  derived and/or modified CDS sequence (opt3) from hemagglutinin__InfluenzaA__ABU92719

SEQ ID NO: 129915 - RNA, 1701 nt, Artificial Sequence
  derived and/or modified CDS sequence (opt3) from hemagglutinin__InfluenzaA__ABU92720
augaagaccaucauugcccugagcuacauacucugccuuguguucgcucagaaacugcccggcaacgacaauuccacagcaacuuuguguuuagggcaccaugccgucccuaacggaacgaucguuaagaccauuacaaaugaucaaaucgaggugacuaacgcgaccgaacugguacagauuucuucaacaggugagaucugcgacaguccacaccagauacuagauggcgaaaauuguacccucaucgacgcucugcuuggggauccgcagugcgacggauuucaaaacaaaaagugggaucuguucguggagagaagcaaagccuauuccaauuguuaccccuaugacgucccugauuacucuucguugaggucacucguggcaagcaguggcacucuggaauuuaacaaugaguccuucgacuggacagguguuacccagaacgggacgucuagcgccugcaagcggcgcuccgauaagucauuuuucagucgacugaauuggcucacucauuuaaaauauaaguacccagcucugaacgugaccaugcccaauaacgagaaauuugacaaacuuuauauuuggggaguccaccauccuggcacagauagcgaccagaucucuuuguacgcacaggccuccggccguauuacugugucaaccaagagaagccaacagacaguaaucccaaauauagggaguaggccccggguucgcgacgugucuuccagaauuagcaucuacuggaccauugucaagccuggagauauccugcuaaucaacucgacggguaaccucauugcuccaaggggcuauuucaagauacggucugggaaauccucaaucaugcgcagugacgccccgauuggaaaguguaauagcgaaugcaucacucccaacggcuccauaccuaaugauaaaccauuucagaacgugaaucgaauuacauacggugcgugucccagauaugugaagcagaacacccugaaacuugcaacugggaugaggaaugucccugagaagcaaacacggggaaucuucggcgccaucgcuggcuuuauugaaaacgggugggagggaaugguugacgguugguacggcuuccgucaccaaaauucugaggggaccggacaggccgcagaucugaaaagcacgcaggcugccaucaaccagauuaauggcaaguugaaccgccucauagguaagaccaaugaaaaauuucaccagaucgagaaggaguucucagaaguggaagggaggauucaggaccuggagaaauauguagaggauacaaagaucgacuuauggaguuacaacgcggaacugcucguggcccuugagaaucaacauacuaucgaucugaccgacuccgaaaugaacaaauuguucgagagaacaaagaagcagcuacgggaaaacgcagaggauaugggcaauggaugcuuuaaaauuuaucacaagugugacaacgcuugcauaggcagcauccgaaaugggacuuacgaccaugaugucuaccgcgacgaggcccugaacaauagauuccagauuaaaggaguggaacucaagucugguuauaaagauuggauccuguggauuucauuugcuaucaguugcuuccuucuguguguugccuugcucggcuuuauaaugugggcaugccagaaggggaacaucagguguaauauuugcaucuga

SEQ ID NO: 129916 - RNA, 1701 nt, Artificial Sequence
  derived and/or modified CDS sequence (opt3) from hemagglutinin__InfluenzaA__ABU92721
augaagaccaucauugcccugagcuacauacucugccuuguguucgcucagaaacugcccggcaacgacaauuccacagcaacuuuguguuuagggcaccaugccgucccuaacggaacgaucguuaagaccauuacaaaugaucaaaucgaggugacuaacgcgaccgaacugguacagauuucuucaacaggugagaucugcgacaguccacaccagauacuagauggcgaaaauuguacccucaucgacgcucugcuuggggauccgcagugcgacggauuucaaaacaaaaagugggaucuguucguggagagaagcaaagccuauuccaauuguuaccccuaugacgucccugauuacgcaucuuugaggucgcucguggccucaagcggcacucuggaauuuaacaaugagaguuucgacuggacagguguuacccagaacgggacguccucugcuugcaagcggcgcagcgauaaguccuuuuucucacgacugaauuggcucacucauuuaaaauauaaguacccagcacugaacgugaccaugcccaauaacgagaaauuugacaaacuuuauauuuggggaguccaccauccuggcacagauagugaccagaucagcuuguacgcccaggcuucuggccguauuacuguguccaccaagagaucacaacagacaguaaccccaaauaucgggagcaggccccggguucgcgacgugaguucuagaauauccauuuacuggacgaucgucaagccuggagauauucugcuaaucaacagcacugguaaccucaucgccccaaggggcuauuucaagauucggucggggaaaucuuccauaaugcgcucagacgcgccgaucggaaaguguaauagugaaugcauuacacccaacggcagcaucccuaaugauaaaccauuucagaacgugaaucgaauaaccuacggugcaugucccagauaugugaagcagaacacucugaaacuugccacagggaugaggaaugucccugagaagcaaacccggggaauuuucggcgcuaucgccggcuuuaucgaaaacgggugggagggaaugguugacgguugguacggcuuccgucaccaaaauuccgaggggacgggacaggcagcugaucugaaaucuacccaggccgcgauuaaccagaucaauggcaaguugaaccgccucauugguaagacaaaugaaaaauuucaccagauagagaaggaguucagcgaaguggaagggagaauccaggaccuggagaaauauguagaggauacuaagauugacuuauggucauacaacgccgaacugcucguggcacuugagaaucaacauaccaucgaucugacagacagugaaaugaacaaauuguucgagaggacuaagaagcagcuacgggaaaacgcugaggauaugggcaauggaugcuuuaaaaucuaucacaagugugacaacgccugcauuggcuccauacgaaaugggaccuacgaccaugaugucuaccgcgacgaggcucugaacaauagauuccagaucaaaggaguggaacucaagagcgguuauaaagauuggauucuguggaucucuuuugccauuucaugcuuccuucuguguguugcauugcucggcuuuaucaugugggccugccagaaggggaacauaagguguaauaucugcauuuga

SEQ ID NO: 129917 - RNA, 1701 nt, Artificial Sequence; identical to SEQ ID NO: 129801
  derived and/or modified CDS sequence (opt3) from hemagglutinin__InfluenzaA__ABU92722

SEQ ID NO: 129918 - RNA, 1701 nt, Artificial Sequence; identical to SEQ ID NO: 128121
  derived and/or modified CDS sequence (opt3) from hemagglutinin__InfluenzaA__ABU92723

SEQ ID NO: 129919 - RNA, 1701 nt, Artificial Sequence; identical to SEQ ID NO: 129904
  derived and/or modified CDS sequence (opt3) from hemagglutinin__InfluenzaA__ABU92724

SEQ ID NO: 129920 - RNA, 1701 nt, Artificial Sequence
  derived and/or modified CDS sequence (opt3) from hemagglutinin__InfluenzaA__ABU92725
augaagaccaucauugcccugagcuacauacucugccuuguguucgcucagaaacugcccggcaacgacaauuccacagcaacuuuguguuuagggcaccaugccgucccuaacggaacgaucguuaagaccauuacaaaugaucaaaucgaggugacuaacgcgaccgaacugguacagucuucaaguacagguggcauuugcgacagcccacaccagauccuagauggggagaauuguacccucauagacgcucugcuuggagauccgcagugcgacggcuuucaaaacaaaaagugggaucuguucguggaaagauccaaagccuauucuaauuguuaccccuaugacgucccugauuacgcaucguugaggucacucguggccagcagugguacucuggaguuuaacaaugaauccuucaacuggacagggguuacccagaauggaacgucuagcgcuugcaagcggcgcuccaacaagucauuuuucagucgacugaauuggcucacucauuuaaaauauaaguacccagcacugaacgugaccaugcccaauaacgagaaauuugacaaacuuuauaucuggggcguccaccauccuggcacagauagcgaccagauuaacuuguacgcccaggcuucugggcguaucacuguguccaccaagagaucacaacagacaguaauuccaaauaucggaagcaggccccggguucgcgaugugccuaguagaauaucuauuuacuggaccaucgucaagccaggugaccugcuacucauuaacuccacgggcaaucugaucgccccgaggggguauuucaagauccggagcggaaaaucgucuauuaugcgcuccgacgcgcccauaggcaaguguaacucagagugcaucacuccuaaugguaguauuccaaacgauaaacccuuucagaaugugaaccgaaucacauacggggcauguccuagauaugugaagcagaauacccuuaaacuggccacuggaaugaggaacgucccagaaaagcaaacacggggcauauucggcgcuauugccggguuuaucgagaauggaugggaagguaugguugacggcugguacggguuccgucaccagaacagcgagggaaccggccaggcagcugauuugaaauccacgcaagccgcgaucaaucagauuaacgguaagcucaaucgccugaucgggaagaccaacgagaaauuucaccagauugaaaaggaguucucugaaguggagggcagaauacaggacuuagaaaaauauguagaggauacaaagaucgaccuguggagcuacaacgccgagcuccuuguggcacuggaaaaucaacauacuauugauuugaccgacucagagaugaacaaacuauucgaaaggacaaagaagcagcugcgggagaaugcugaagauaugggaaacggcugcuuuaaaaucuaucacaagugugacaaugccugcaucgggaguauucgaaacggaacuuacgaucaugacgucuaccgcgacgaggcucucaauaacagauuccagauaaaagguguggagcugaaguccggcuauaaagauuggauccuuuggauuagcuuugccaucucuugcuuccuguuguguguugcacuccugggguuuauuaugugggccugccagaagggaaauaucagguguaacauaugcaucuga

SEQ ID NO: 129921 - RNA, 1701 nt, Artificial Sequence; identical to SEQ ID NO: 129904
  derived and/or modified CDS sequence (opt3) from hemagglutinin__InfluenzaA__ABU92726

SEQ ID NO: 129922 - RNA, 1701 nt, Artificial Sequence
  derived and/or modified CDS sequence (opt3) from hemagglutinin__InfluenzaA__ABU92727
augaagaccaucauugcccugagcuacauacucugccuuguguucgcucagaaacugcccggcaacgacaauuccacagcaacuuuguguuuagggcaccaugccgucccuaacggaacgaucguuaagaccauuacaaaugaucaaaucgaggugacuaacgcgaccgaacugguacagucuucaaguacagguggcauuugcgacagcccacaccagauccuagauggggagaauuguacccucauagacgcucugcuuggagauccgcagugcgacggcuuucaaaacaaaaagugggaucuguucguggaaagauccaaagccuauucuaauuguuaccccuaugacgucccugauuacgcaucguugaggucacucaucgccagcagugguacucuggaguuuaacaaugaauccuucaacuggacaggggugacccagaauggaacgucuagcgcuugcaagcggcgcuccaacucaaguuucuuuagccgacugaauuggcucacucauuuaaaguuuaaauauccagcacugaacguuaccaugcccaauaacgaggacuucgauaaacuuuacauuuggggcgugcaccauccuggcacagacaacgaucagaucucuuuguaugcccaggcuuccgggcguauuacugucucaaccaagagaagccaacagacagugaucccaaauauaggaaguaggccccggguacgcgacauuccuucuagaaucuccauuuacuggaccaucguuaagccaggugacauccugcuaauuaacagcacgggcaaucucauagccccgaggggguacuuuaaaauccggucgggaaagucuuccauuaugcgcucagaugcgcccaucggcaaguguaacagugagugcauaacuccuaaugguagcauuccaaacgacaaacccuuccagaaugugaaccgaaucacauauggggcauguccuagauacgucaagcagaauacccugaaacuugccacuggaaugaggaacgugccagaaaagcaaacacggggcaucuuuggcgcuauugccggguucaucgagaauggaugggaagguaugguggauggcugguauggguuucgucaccagaacuccgagggaauuggccaggcagcugaccugaaaucuacccaagccgcgauagaucagaucaaugguaaguugaaccgccucauugggaaaacgaaugagaaguuccaccagaucgaaaaggaguucagcgaagucgagggcagaauccaggaccuggaaaaauacguugaggauaccaagauugacuuauggucauauaacgccgagcugcucguggcacuugaaaaccaacauacaauagaucugacugacagugagaugaauaaauuguuugaaaggaccaagaaacagcuacgggagaacgcugaagauaugggaaauggcugcuucaagaucuaccacaagugugacaacgccugcauuggguccauccgaaauggaacauaugaccaugauguauaccgcgacgaggcucugaacaauagauuucagauuaaagguguggagcucaagagcggcuacaaagauuggauccuguggauaucuuucgccaucucaugcuuucuucugugugucgcauugcucggguucauuaugugggccugccagaagggaaacaucagguguaauauuugcaucuga

SEQ ID NO: 129923 - RNA, 1701 nt, Artificial Sequence
  derived and/or modified CDS sequence (opt3) from hemagglutinin__InfluenzaA__ABU92728
augaagaccaucauugcccugagcuacauacucugccagguguucgcucaaaaacuucccggcaacgacaauuccacagcaacucuguguuuggggcaccaugccgucccuaacggaacgaucguuaagaccauuacaaaugaucagaucgaggugacuaacgcgaccgaauuaguacagauuucuucaacaggugagaucugcgacaguccacaccagauacuggauggcgaaaauuguacccuaaucgacgcucuccugggggauccgcaaugcgacggauuucagaacaaaaagugggaucuuuucguggagagaagcaaagccuauuccaauuguuaccccuaugacgucccugauuacgcaucucugaggucguugguggccucaagcggcacucucgaauuuaacaaugagaguuucgacuggacagguguuacccagaacgggacguccucugcuugcaagcggcgcagcgauaaguccuuuuucucacgacugaauuggcugacucaucucaaauauaaguacccagcauuaaacgugaccaugcccaauaacgagaaauuugacaagcuguauauuuggggaguccaccauccuggcacagauaaugaccagaucagucuuuacgcccaagcuagcggccguauuacugugucuaccaaaagaucccagcagacaguaaucccaaacauagggucaaggccccggguucgcgacgugagcaguagaauuucuaucuacuggaccauugucaagccuggagauaucuugcugaucaacuccacggguaaucuaauugccccaaggggcuauuucaagauacggagcgggaaaucgucuaucaugcgcuccgacgcgccgauuggaaaguguaacucagaaugcaucacucccaauggcaguauaccuaacgauaaaccauuucagaaugugaaccgaauuacauacggugcaugucccagauaugugaagcaaaauacccucaaacuggccacugggaugaggaacgucccugagaagcagacacggggaaucuucggcgcuaucgccggcuuuauugaaaaugggugggagggaaugguugacgguugguacggcuuccgucaccagaacagcgaggggaccggacaagcagcugaucuuaaauccacgcaggccgcgaucaaucagauuaacggcaagcugaaucgcuugauagguaagaccaacgaaaaauuucaccagaucgagaaggaguucucugaaguggaagggaggauucaagaccucgagaaauauguagaggauacaaagaucgaccuguggagcuacaaugccgaauuacugguggcacucgagaaccagcauacuaucgaucuuaccgacucagaaaugaacaaacuguucgagagaacaaagaagcaguugcgggaaaaugcugaggauaugggcaacggaugcuuuaaaauuuaucacaagugugacaaugccugcauaggcaguauccgaaacgggacuuacgaccaugaugucuaccgcgacgaggcucuaaauaacagauuccagauuaaaggaguggaacugaaguccgguuauaaagauuggauccucuggauuagcuuugccaucucuugcuuccugcuuuguguugcacuguugggcuuuauaaugugggccugccaaaaggggaauaucagguguaacauuugcaucuga

SEQ ID NO: 129924 - RNA, 1701 nt, Artificial Sequence; identical to SEQ ID NO: 129923
  derived and/or modified CDS sequence (opt3) from hemagglutinin__InfluenzaA__ABU92729

SEQ ID NO: 129925 - RNA, 1701 nt, Artificial Sequence; identical to SEQ ID NO: 129801
  derived and/or modified CDS sequence (opt3) from hemagglutinin__InfluenzaA__ABU92730

SEQ ID NO: 129926 - RNA, 1701 nt, Artificial Sequence
  derived and/or modified CDS sequence (opt3) from hemagglutinin__InfluenzaA__ABU92731
augaagaccaucauugcccugagcuacauacucugccuuguguucgcucagaaacugcccggcaacgacaauuccacagcaacuuuguguuuagggcaccaugccgucccuaacggaacgaucguuaagaccauuacaaaugaucaaaucgaggugacuaacgcgaccgaacugguacagucuucaaguacagguggcauuugcgacagcccacaccagauccuagauggggagaauuguacccucauagacgcucugcuuggagauccgcagugcgacggcuuucaaaacaaaaagugggaucuguucguggaaagauccaaagccuauucuaauuguuaccccuaugacgucccugauuacgcaucguugaggucacucaucgccagcagugguacucuggaguuuaacaaugaauccuucaacuggacaggggugacccagaauggaacgucuagcgcuugcaagcggcgcuccaacucaaguuucuucagccgacugaauuggcucacucauuuaaaguuuaaauauccagcacugaacguuaccaugcccaauaacgaggaguucgacaaacuuuacguguggggcguccaccauccuggcacauauaacgaucagauuucuuuguacgcccaggcuuccgggcguaucacugugucaaccaagagaagccaacagacaguaauuccaaauaucggaaguaggccccggguucgcgacauaccuucuagaauuuccaucuacuggaccauugugaagccaggugauauccugcuaaucaacagcacgggcaaucucauugccccgaggggguauuuuaaaauacggucgggaaagucuuccaucaugcgcucagacgcgcccauuggcaaguguaacagugaaugcaucacuccuaaugguagcauaccaaacgacaaacccuuccagaaugucaaccgaauuacauacggggcauguccuagauaugugaagcagaauacccugaaacuugccacuggaaugaggaacgugccagagaagcaaacacggggcaucuuuggcgcuaucgccggguucauugaaaauggaugggaggguauggucgauggcugguacggguuucgucaccagaacuccgagggaaucggccaggcagcugaccugaaaucuacccaagccgcgauugaucagauaaaugguaaguugaaccgccucaucgggaaaacgaaugaaaaguuccaccagauugagaaggaauuuagcgagguugaaggcagaauccaggaccuggagaaauauguggaggauaccaagaucgacuuauggucauacaacgccgaacugcucguagcacuugagaaccaacauacaauugaucugacugacagugaaaugaauaaauuguuugagaggaccaagaaacagcuacgggaaaacgcugaggauaugggaaauggcugcuucaagauauaucacaagugugacaacgccugcaucggguccauucgaaauggaacauacgaucaugacguguaccgcgacgaggcucugaacaauagauuucagaucaaaggugucgaacucaagagcggcuauaaagauuggauucuguggaucucuuucgccauaucaugcuuucuucuguguguggcauugcucggguucaucaugugggccugccagaagggaaacauuagguguaauaucugcauuuga

SEQ ID NO: 129927 - RNA, 1701 nt, Artificial Sequence
  derived and/or modified CDS sequence (opt3) from hemagglutinin__InfluenzaA__ABU92732
augaagaccaucauugcccugagcuacauacucugccuuguguucgcucagaaacugcccggcaacgacaauuccacagcaacuuuguguuuagggcaccaugccgucccuaacggaacgaucguuaagaccauuacaaaugaucaaaucgaggugacuaacgcgaccgaacugguacagucuucaaguacagguggcauuugcgacagcccacaccagauccuagauggggagaauuguacccucauagacgcucugcuuggagauccgcagugcgacggcuuucaaaacaaaaagugggaucuguucguggaaagauccaaagccuauucuaauuguuaccccuaugacgucccugauuacgcaucguugaggucacucaucgccagcagugguacucuggaguuuaacaaugaauccuucaacuggacaggggugacccagaauggaacgucuagcgcuugcaagcggcgcuccaacucaaguuucuucagccgacugaauuggcucacucauuuaaaguuuaaauauccagcacugaacguuaccaugcccaauaacgaggaguucgacaaacuuuacauuuggggcgugcaccauccuggcacauauaacgaucagaucucuuuguacgcccaggcuuccgggcguauuacugucucaaccaagagaagccaacagacagugaucccaaauauaggaaguaggccccggguacgcgacauuccuucuagaaucuccauuuacuggaccaucguuaagccaggugauauccugcuaauuaacagcacgggcaaucucauagccccgaggggguauuuuaaaauccggucgggaaagucuuccauuaugcgcucagacgcgcccaucggcaaguguaacagugaaugcauaacuccuaaugguagcauuccaaacgacaaacccuuccagaaugugaaccgaaucacauacggggcauguccuagauaugucaagcagaauacccugaaacuugccacuggaaugaggaacgugccagagaagcaaacacggggcaucuuuggcgcuauugccggguucaucgaaaauggaugggaggguaugguggauggcugguacggguuucgucaccagaacuccgagggaauuggccaggcagcugaccugaaaucuacccaagccgcgauagaucagaucaaugguaaguugaaccgccucauugggaaaacgaaugaaaaguuccaccagaucgagaaggaauuuagcgaggucgaaggcagaauccaggaccuggagaaauauguugaggauaccaagauugacuuauggucauacaacgccgaacugcucguggcacuugagaaccaacauacaauagaucugacugacagugaaaugaauaaauuguuugagaggaccaagaaacagcuacgggaaaacgcugaggauaugggaaauggcugcuucaagaucuaucacaagugugacaacgccugcauuggguccauccgaaauggaacauacgaucaugacguauaccgcgacgaggcucugaacaauagauuucagauuaaagguguggaacucaagagcggcuauaaagauuggauccuguggauaucuuucgccaucucaugcuuucuucugugugucguguugcucggguucauuaugugggcaugccagaagggaaacaucagguguaauauuugcaucuga

SEQ ID NO: 129928 - RNA, 1701 nt, Artificial Sequence
  derived and/or modified CDS sequence (opt3) from hemagglutinin__InfluenzaA__ABU92733
augaagaccaucauugcccugagcuacauacucugccuuguguucgcucagaaacugcccggcaacgacaauuccacagcaacuuuguguuuagggcaccaugccgucccuaacggaacgaucguuaagaccauuacaaaugaucaaaucgaggugacuaacgcgaccgaacugguacagucuucaaguacagguggcauuugcgacagcccacaccagauccuagauggggagaauuguacccucauagacgcucugcuuggagauccgcagugcgacggcuuucaaaacaaaaagugggaucuguucaucgaaagauccaaagccuauucuaauuguuaccccuaugacgugccugauuacgcaucguugaggucacucgucgccagcagugguacucuggaguuuaacaaugaauccuucaacuggacaggggugacccagaauggaacgucuagcgcuugcaagcggcgcuccaacaauucauuuuucagucgacugaacuggcucacucauuuaaaguuuaaauauccagcacugaauguuaccaugcccaacaacgagaaguucgacaaacuuuacauuuggggcgugcaccauccuggcacagauaaugaccagaucagcuuguaugcccaggcuucugggcguauuacugucuccaccaagagaucacaacagacagugaucccaaacauaggaagcaggccccggguacgcgauauuccuaguagaaucucuauuuacuggaccaucguuaaaccaggugacauccugcuaauuaauuccacgggcaaccucauagccccgaggggguacuuuaagauccggagcggaaagucgucuauuaugcgcuccgacgcgcccaucggcaaauguaauucagagugcauaacuccuaacgguaguauuccaaaugauaagcccuuccagaacgugaaucgaaucacauauggggcauguccuagauacgucaaacagaacacccugaaacuugccacuggaaugaggaaugugccagaaaagcaaacacggggcaucuuuggcgcuauugccggguucaucgagaacggaugggaagguaugguggacggcugguauggguuucgucaccagaauagcgagggaauuggccaggcagcugaucugaaguccacccaagccgcgauaaaccagaucaaugguaaauugaaccgccucauugggaagacgaacgagaaguuccaccagaucgaaaaagaguucucugaagucgagggcagaauccaggaccuggaaaaguacguugaggauaccaaaguggacuuauggagcuauaaugccgagcugcucguagcacuugaaaaccaacauacaauugaucugacugacucagagaugaauaaguuguuugaaaggaccaaaaagcagcuacgggagaacgcugaagauaugggaaauggcugcuucaagauauaccacaaaugugacaacgccugcaucgggaguauucgaaauggaacauauaaccaugauguguaccgcgacgaggcucugaauaacagauuucagaucaagggugucgagcucaaauccggcuacaaggacuggauucuguggaucagcuucgccauaucuugcuuucuucuguguguggcauugcucggguucaucaugugggccugccagaaaggaaauauuagguguaacaucugcauuuga

SEQ ID NO: 129929 - RNA, 1701 nt, Artificial Sequence; identical to SEQ ID NO: 129801
  derived and/or modified CDS sequence (opt3) from hemagglutinin__InfluenzaA__ABU92734

SEQ ID NO: 129930 - RNA, 1701 nt, Artificial Sequence
  derived and/or modified CDS sequence (opt3) from hemagglutinin__InfluenzaA__ABU92735
augaagaccaucauugcccugagcuacauacucugccuuguguucgcucagaaacugcccggcaacgacaauuccacagcaacuuuguguuuagggcaccaugccgucccuaacggaacgaucguuaagaccauuacaaaugaucaaaucgaggugacuaacgcgaccgaacugguacagucuucaaguacagguggcauuugcgggagcccacaccagauccuagacggagagaauuguacccucauagaugcucugcuuggcgacccgcagugcgaugguuuucaaaacaaaaagugggaccuguucguggaaagauccaaagccuauucuaauuguuaccccuaugaugucccugacuacgcaucguugaggucacucguggccagcagugggacucuggaguuuaacaaugaauccuucaacuggacaggaguuacccagaauggcacgucuagcgcuugcaagcggcgcuccaacaauucauuuuucagucgacugaacuggcucacucauuuaaaguuuaaauauccagcacugaaugugaccaugcccaacaacgagaaguucgauaaacuuuacaucuggggcguccaccauccugggacagacaaugaucagauuagcuuguaugcccaggcuccagcccguaucacugugucuaccaagagaucccaacagacaguaauucccaacaucggaucaaggccucggguucgcgacauaccaagcagaauuaguaucuacuggaccauugugaaaccgggugauauccugcuaaucaauucuacgggcaaccucauugcgcccaggggguacuuuaagauacuguccggaaagagcucgaucaugcggucugacgcaccuauuggcaaauguaauuccgagugcaucacuccaaacgguucaauacccaaugacaagccuuuccagaacgucaaucgcauuacauauggggccuguccacgauacgugaaacagaacacccuuaagcuggcuacuggaaugagaaaugugcccgaaaaacaaacaaggggcaucuuuggcgccaucgcaggguucauugagaacggaugggaagguauggucgauggcugguauggguuucggcaccagaauagugagggaaucggccaggcugccgaccucaagagcacccaagcggccauuaaccagauaaaugguaaauugaaccgucugaucgggaagacgaacgagaaguuccaccagauugaaaaagaguucuccgaaguugagggccgcauccaggauuuagaaaaguacguggaggacaccaaaaucgaucuguggucuuauaaugcagagcuccuuguagcucuggaaaaccaacauacaauugacuugacugauagcgagaugaauaagcuauuugaaagaaccaaaaagcagcugagggagaacgccgaagacaugggaaauggcugcuucaagauauaccacaaaugugauaacgcuugcaucgggucaauucggaauggaacauaugaccaugauguguaccgagacgaggcccucaacaaucgcuuucagaucaagggugucgagcugaaaaguggcuacaaggacuggauucuuuggaucuccuucgcaaugagcugcuuucuguuguguguggcccuccugggguucauaaugugggcuugccagaaaggaaacaucagauguaauauuugcaucuga

SEQ ID NO: 129931 - RNA, 1701 nt, Artificial Sequence; identical to SEQ ID NO: 129876
  derived and/or modified CDS sequence (opt3) from hemagglutinin__InfluenzaA__ABU92737

SEQ ID NO: 129932 - RNA, 1701 nt, Artificial Sequence
  derived and/or modified CDS sequence (opt3) from hemagglutinin__InfluenzaA__ABU92738
augaagaccaucauugcccugagcuacauacucugccuuguguucgcucagaaacugcccggcaacgacaauuccacagcaacuuuguguuuagggcaccaugccgucccuaacggaacgaucguuaagaccauuacaaaugaucaaaucgaggugacuaacgcgaccgaacugguacagucuucaaguacagguggcauuugcgacagcccacaccagauccuagauggggagaauuguacccucauagacgcucugcuuggagauccgcagugcgacggcuuucaaaacaaaaagugggaucuguucguggaaagauccaaagccuauucuaauuguuaccccuaugacgucccugauuacgcaucguugaggucacucaucgccagcagugguacucuggaguuuaacaaugaauccuucaacuggacaggggugacccagaauggaacgucuagcgcuugcaagcggcgcuccaacaauucauuuuucagucgacugaacuggcucacucauuuaaaguuuaaauauccagcacugaauguuaccaugcccaacaacgagaaguucgacaaacuuuacauuuggggcgugcaccauccuggcacagauaaugaccagaucagcuuguaugcccaggcuccagggcguauuacugucucuaccaagagaucccaacagacagugauccccaacauaggaucaaggccucggguacgcgauauuccaagcagaaucaguauuuacuggaccaucguuaaaccgggugacauccugcuaauuaauucuacgggcaaccucauagcccccaggggguacuuuaagauccgguccggaaagagcucgauuaugcgcucugacgcgccuaucggcaaauguaauuccgagugcauaacuccaaacgguucaauucccaaugauaagccuuuccagaacgugaaucgaaucacauauggggcauguccaagauacgucaaacagaacacccugaagcuggccacuggaaugaggaaugugcccgaaaaacaaacacggggcaucuuuggcgcuauugccggguucaucgagaacggaugggaagguaugguggacggcugguauggguuucgucaccagaauagugagggaauuggccaggcagcugaucuuaagagcacccaagccgcgauagaccagaucaacgguaaauugaaucgccucauugggaagacgaacgagaaguuccaccagaucgaaaaagaguucuccgaagucgagggcagaauccaggaucuggaaaaguacguugaggacaccaaaauugauuuauggucuuauaacgccgagcugcucguggcacuugaaaaucaacauacaauagaccugacugauagcgagaugaacaaguuguuugaaaggaccaaaaagcagcuacgggagaaugcugaagacaugggaaacggcugcuucaagaucuaccacaaaugugauaaugccugcauugggucaauccgaaacggaacauaugaccaugacguauaccgcgaugaggcucugaauaacagauuucagauuaaggguguggagcucaaaaguggcuacaaggacuggauccuguggauauccuucgccaucagcugcuuucuucugugugucguguugcucggguucauuaugugggcaugccagaaaggaaauaucagguguaacauuugcaucuga

SEQ ID NO: 129933 - RNA, 1701 nt, Artificial Sequence; identical to SEQ ID NO: 129810
  derived and/or modified CDS sequence (opt3) from hemagglutinin__InfluenzaA__ABU92739

SEQ ID NO: 129934 - RNA, 1701 nt, Artificial Sequence
  derived and/or modified CDS sequence (opt3) from hemagglutinin__InfluenzaA__ABU92740
augaagaccaucauugcccugagcuacauacucugccuuguguucgcucagaaacugcccggcaacgacaauuccacagcaacuuuguguuuagggcaccaugccgucccuaacggaacgaucguuaagaccauuacaaaugaucaaaucgaggugacuaacgcgaccgaacugguacagucuucaaguacaggugagauuugcgacagcccacaccagauccuagauggcgaaaauuguacccucauagacacucugcuuggggauccgcagugcgacggauuucaaaacaaaaagugggaucuguucguggagagauccaaggcuuauucuaauuguuaccccuaugacgucccugauuacgccucguugaggucacucguggcaagcaguggcacacuggaauuuaacaaugaguccuucaacuggaccgguguuacgcagaaugggacuucuagcgccugcaagcggcgcuccaacaauucauuuuucagucgacugaacuggcucacccauuuaaaguuuaaauauccagcucugaaugugacaaugcccaacaacgagaaguucgacaaacuuuacaucuggggaguccaccauccuggcacugauaaugaccagauuuuucuuuaugcacaggccagcggccguaucaccgugucuacaaagagaucccaacagaccguaauuccaaacaucgggucaaggccccggguucgcaauauaccuagcagaauuaguaucuacuggacgauugugaaaccaggagauauccugcuaaucaacucuacugguaaucucauugcuccgaggggcuacuucaagauacgguccgggaaaagcucgaucaugcgcucugacgcccccauuggaaaauguaacuccgaaugcaucacaccuaauggcucaauaccaaacgacaagcccuuucagaaugucaaccgaauuaccuauggugcguguccuagauacgugaaacagaauacucugaaguuggcaacagggaugaggaacgugccagagaaacaaacccggggaaucuucggcgccaucgcuggcuuuauugaaaaugggugggagggaauggucgaugguugguauggcuuccgucaccagaacagugaggggaucggacaggccgcagaccugaaaagcacgcaagcugccauuaaucagauaaacggcaaauugaaccgccucaucgguaagaccaaugaaaaguuccaccagauugagaaagaauuuuccgagguugaagggagaauccaggaucuggagaaguacguggaggacacaaaaaucgauuuauggucuuauaacgcggaacugcucguagcccuugagaaucaacauacuauugaccugaccgauagcgaaaugaacaaguuguucgagaggacaaagaagcagcuacgggaaaaugcagaggacaugggcaacggaugcuuuaagauauaccacaaaugugauaaugcuugcaucggcucaauucgaaacgggacuuaugaccaugauguguaccgcgacgaggcccugaauaacagauuccagaucaagggagucgaacucaaaagugguuacaaggacuggauucuguggaucuccuuugcuauaagcugcuuccuucuguguguggccuugcucggcuuuaucaugugggcaugccagaaagggaauauuagguguaacaucugcauuuga

SEQ ID NO: 129935 - RNA, 1701 nt, Artificial Sequence
  derived and/or modified CDS sequence (opt3) from hemagglutinin__InfluenzaA__ABU92741
augaagaccaucauugcccugagcuacauacucugccuuguguucgcucagaaacugcccggcaacgacaauuccacagcaacuuuguguuuagggcaccaugccgucccuaacggaacgaucguuaagaccauuacaaaugaucaaaucgaggugacuaacgcgaccgaacugguacagucuucaaguacagguggcauuugcgacagcccacaccagauccuagauggggagaauuguacccucauagacgcucugcuuggagauccgcagugcgacggcuuucaaaacaaaaagugggaucuguucguggaaagauccaaagccuauucuaauuguuaccccuaugacgucccugauuacgcaucguugaggucacucaucgccagcagugguacucuggaguuuaacaaugaauccuucaacuggacaggggugacccagaauggaacgucuagcgcuugcaagcggcgcuccaacaauucauuuuucagucgacugaacuggcucacucauuuaaaguuuaaauauccagcacugaauguuaccaugcccaacaacgaggaguucgacaaacuuuacauuuggggcgugcaccauccuggcacagauaaugaccagaucagcuuguaugcccaggcuccagggcguauuacugucucuaccaagagaucccaacagacagugauccccaacauaggaucaaggccucggguacgcgauauuccaagcagaaucaguauuuacuggaccaucguuaagccgggugacauccugcuaauuaauucuacgggcaaccucauagcccccaggggguacuuuaaaauccgguccggaaagagcucgauuaugcgcucugacgcgccuaucggcaaguguaauuccgaaugcauaacuccaaacgguucaauucccaaugauaaaccuuuccagaacgugaaucgaaucacauauggggcauguccaagauacgucaagcagaacacccugaaacuugccacuggaaugaggaaugugcccgagaagcaaacacggggcaucuuuggcgcuauugccggguucaucgaaaacggaugggaggguaugguggacggcugguauggguuucgucaccagaauagugagggaauuggccaggcagcugaucugaaaagcacccaagccgcgauagaccagaucaacgguaaguugaaucgccucauugggaaaacgaacgaaaaguuccaccagaucgagaaggaguucuccgaagucgaaggcagaauccaggaucuggagaaauacguugaggacaccaagauugauuuauggucuuauaacgccgaacugcucguggcacuugagaaucaacauacaauagaccugacugauagcgaaaugaacaaauuguuugagaggaccaagaaacagcuacgggaaaaugcugaggacaugggaaacggcugcuucaagaucuaccacaagugugauaaugccugcauugggucaauccgaaacggaacauaugaccaugacauuuaccgcgaugaggcucugaauaacagauuucagaucaaagguguagaacucaagaguggcuacaaagacuggauacuguggaucuccuucgccauuagcugcuuucuucuguguguggucuugcucggguucaucaugugggcaugccagaagggaaauauuagguguaacaucugcauauga

SEQ ID NO: 129936 - RNA, 1701 nt, Artificial Sequence; identical to SEQ ID NO: 129876
  derived and/or modified CDS sequence (opt3) from hemagglutinin__InfluenzaA__ABU92742

SEQ ID NO: 129937 - RNA, 1701 nt, Artificial Sequence
  derived and/or modified CDS sequence (opt3) from hemagglutinin__InfluenzaA__ABU92743
augaagaccaucauugcccugagcuacauacucuaucuuguguucgcucagaaacugcccgagaacgacaauuccacagcaacuuugugcuuaggccaccaugccgucccuaacgggacgaucguuaagaccauuacaaaugaucaaaucgaagugacuaacgcgaccgagcugguacagucuucaaguacaggagguauuugugacagcccacaccagauccuagauggcgaaaauugcacccucauagacgcucugcuuggggauccgcagugugacggauuucaaaacaaaaagugggaucuguucguggagagauccaaagccuacucuaauugcuaucccuacgacgucccugauuaugcaucguugaggucacucguggccagcaguggcacucuggaauuuaacaaugaguccuucaacuggacagguguuacccagaaugggacgucuagcgcuuguaagcggcgcuccaacaauucauuuuucagucgacugaacuggcucacucauuuaaaguuuaaauacccagcacugaaugugaccaugcccaacaacgagaaguucgacaaacuuuauaucuggggaguccaccauccuggcacagauaaugaccagaucuuuuuguacgcccaggcuagcggccguauuacugugucuaccaagagaucccaacagacaguaauuccaaacaucgggucaaggccccggguucgcaauauaccuagcagaauuaguaucuacuggaccauugugaaaccaggagauauccugcuaaucaacucuacggguaaucucauugccccgaggggcuauuucaagauacgguccggaaagagcucgaucaugcgcucugacgcgcccauugggaaaugcaacuccgaauguaucacuccuaauggcucaauaccaaacgacaagcccuuucagaaugucaaccgaauuacauacggugcaugcccuagauaugugaaacagaauacccugaagcuggccacugggaugaggaacgugccagagaaacaaacacggggaaucuucggcgcuaucgccggcuuuauugaaaaugggugggagggaauggucgaugguugguacggcuuccgucaccagaacagugaggggaucggacaggcagcugaccuuaagagcacccaagccgcgauugaucagauaaauggcaaauugaaccgccucaucgguaagacgaacgaaaaguuccaccagauugagaaagaauuuuccgagguugaagggagaauccaggaccuggagaaguauguggaggauaccaaaaucgacuuauggucuuacaaugccgaacugcucguagcacuugagaaccaacauacaauugaucugacugacagcgaaaugaauaaguuguucgagaaaaccaagaagcagcuaagggaaaacgcugaggauaugggcaauggauguuuuaaaauauaucacaagugcgacaacgccuguaucggcucaauucggaaugggacauacgaucaugacguguaccgagacgaggcucugaacaaucgcuuccagaucaaaggagucgaacucaagagugguuauaaagauuggauucuguggaucuccuuugccauaagcugcuuccuucugugcguggcauugcucggcuuuaucaugugggccugucagaaggggaacauuagaugcaauaucuguauuuga

SEQ ID NO: 129938 - RNA, 1701 nt, Artificial Sequence; identical to SEQ ID NO: 129876
  derived and/or modified CDS sequence (opt3) from hemagglutinin__InfluenzaA__ABU92744

SEQ ID NO: 129939 - RNA, 1701 nt, Artificial Sequence
  derived and/or modified CDS sequence (opt3) from hemagglutinin__InfluenzaA__ABU92745
augaagaccaucauugcccugagcuacauacucugccuuguguucgcucagaaacugcccggcaacgacaauuccacagcaacuuuguguuuagggcaccaugccgucccuaacggaacgaucguuaagaccauuacaaaugaucaaaucgaggugacuaacgcgaccgaacugguacagucuucaaguacagguggcauuugcgacagcccacaccagauccuagauggggagaauuguacccucauagacgcucugcuuggagauccgcagugcgacggcuuucaaaacaaaaagugggaucuguucguggaaagauccaaagccuauucuaauuguuaccccuaugacgucccugauuacgcaucguugaggucacucaucgccagcagugguacucuggaguuuaacaaugaauccuucaacuggacaggggugacccagaauggaacgucuagcgcuugcaagcggcgcuccaacaauucauuuuucagucgacugaacuggcucacucauuuaaaguuuaaauauccagcacugaauguuaccaugcccaacaacgaggaguucgacaaacuuuacauuuggggcgugcaccauccuggcacagauaaugaccagaucagcuuguaugcccaggcuccagggcguauuacugucucuaccaagagaucccaacagacagugauccccaacauaggaucaaggccucggguacgcgauauuccaagcagaaucaguauuuacuggaccaucguuaagccgggugacauccugcuaauuaauucuacgggcaaccucauagcccccaggggguacuuuaaaauccggauuggaaaguccagcaucaugcgcucggacgcgccuauaggcaaguguaauucugaaugcauuacuccaaacgguuccauccccaaugauaaaccuuuccagaacgugaaucgaaucacauauggggcauguccaagauacgucaagcagaacacccugaaacuugccacuggaaugaggaaugugcccgagaagcaaacacggggcauuuuuggcgcuaucgccggguucauugaaaacggaugggaggguaugguggacggcugguauggguuucgucaccaaaauucagagggaauaggccaggcagcugaucugaaaaguacccaggccgcgaucgaccagauuaacgguaaguugaaucgccucaucgggaaaacgaacgaaaaguuccaccagaucgagaaggaguucagcgaagucgaaggcaggauucaggaucuggagaaauacguugaggacaccaagauagauuuaugguccuauaacgccgaacugcucguggcacuugagaaucaacauacaaucgaccugacugauucugaaaugaacaaauuguuugagagaaccaagaaacagcuacgggaaaaugcugaggacaugggaaacggcugcuucaagauuuaccacaagugugauaaugccugcaucgggagcauucgaaacggaacauaugaccaugacguauaccgcgaugaggcucugaauaacagauuucagaucaaagguguggaacucaagucaggcuacaaagacuggauacuguggaucaguuucgccauuuccugcuuucuucugugugucguguugcucggguucaucaugugggcaugccagaagggaaauauuagguguaacaucugcauauga

SEQ ID NO: 129940 - RNA, 1701 nt, Artificial Sequence; identical to SEQ ID NO: 129876
  derived and/or modified CDS sequence (opt3) from hemagglutinin__InfluenzaA__ABU92746

SEQ ID NO: 129941 - RNA, 1701 nt, Artificial Sequence; identical to SEQ ID NO: 128121
  derived and/or modified CDS sequence (opt3) from hemagglutinin__InfluenzaA__ABU92747

SEQ ID NO: 129942 - RNA, 1701 nt, Artificial Sequence
  derived and/or modified CDS sequence (opt3) from hemagglutinin__InfluenzaA__ABU92748
augaagaccaucauugcccugagcuacauacucugccuuguguucgcucagaaacugcccggcaacgacaauuccacagcaacuuuguguuuagggcaccaugccgucccuaacggaacgaucguuaagaccauuacaaaugaucaaaucgaggugacuaacgcgaccgaacugguacagucuucaaguacaggugagauuugcgacagcccacaccagauccuagauggcgaaaauuguacccucauagacgcucugcuuggggauccgcagugcgacggauuucaaaacaaaaagugggaucuguucguggagagauccaaagccuauucuaauuguuaccccuaugacgucccugauuacgcaucguugaggucacucguggccagcaguggcacucuggaauuuaacaaugaguccuucaacuggacagguguuacccagaaugggacgucuagcgcuugcaagcggcgcuccaacaauucauuuuucagucgacugaacuggcucacucauagcaaguuuaaauauccagcauuaaaugugaccaugcccaacaacgagaaguucgacaaacuguacaucuggggaguccaccauccuggcacagauaaugaccagacuuuucuuuaugcccaggcuucuggccguauuaccguguccacaaagagaucacaacagaccguaaucccaaacauugggagcaggccccggguucgcaauaucccuaguagaauaucuauuuacuggacgaucgugaaaccaggagauauuuugcugaucaacuccacugguaaucuaaucgccccgaggggcuacuucaagauucggagcgggaagucgucuauaaugcgcuccgacgcgcccaucggaaaauguaacucagaaugcauuacaccuaauggcaguaucccaaacgacaagcccuuucagaaugucaaccgaauaaccuauggugcauguccuagauacgugaaacagaauacucucaagcuggccacagggaugaggaacgugccagagaaacaaacccggggaauuuucggcgcuaucgccggcuuuaucgaaaaugggugggagggaauggucgaugguugguauggcuuccgucaccagaacagcgaggggauuggacaggcagcugaccuuaaguccacgcaagccgcgaucaaucagauuaacggcaaacugaaccgcuugauagguaagaccaaugaaaaguuccaccagaucgagaaagaauuuucugagguugaagggaggauucaggaucucgagaaguacguggaggacacaaaaaucgaucuguggagcuauaacgccgaauuacugguagcacucgagaaucaacauacuaucgaccuuaccgauucagaaaugaacaagcuguucgagagaacuaaaaagcaguugcgggaaaaugcugaggacaugggcaacggaugcuuuaagauuuaccacaaaugugauaaugccugcauaggcaguauccgaaacgggacauaugaccaugauguguaccgcgacgaggcucuaaauaacagauuccagauuaagggagucgaacugaaauccgguuacaaggacuggauccucuggauuagcuuugccaucucuugcuuccugcuuugugugguucuguugggcuuuauaaugugggcaugccagaaagggaauaucagguguaacauuugcaucuga

SEQ ID NO: 129943 - RNA, 1701 nt, Artificial Sequence; identical to SEQ ID NO: 128121
  derived and/or modified CDS sequence (opt3) from hemagglutinin__InfluenzaA__ABU92749

SEQ ID NO: 129944 - RNA, 1701 nt, Artificial Sequence
  derived and/or modified CDS sequence (opt3) from hemagglutinin__InfluenzaA__ABU92750
augaagaccaucauugcccugagcuacauacucugccuuguguucgcucagaaacugcccggcaacgacaauagaacagcaacuuuguguuuagggcaccaugccgucccuaacggaacgaucguuaagaccauuacaaaugaucaaaucgaggugacuaacgcgaccgaacugguacagauuuccucuacagguggcaucugcgacucaccacaccagauacuagauggggagaauuguacccucaucgacgcucugcuuggagauccgcagugcgacggcuuucaaaacaaaaagugggaucuguucguggaaaggaguaaagccuauagcaauuguuaccccuaugacgucccugauuacgcauccuugcggucucucguggccucgucagguacucuggaguuuaacaaugagagcuucgacuggacagggguuacccagaacggaacgaguuccgcuugcaagcgccgaucuaauaagagcuuuuucucccgucugaacuggcucacucauuuaaaauauaaguacccagcacugaaugugaccaugcccaacaaugaaaaauuugauaaacuuuauauuuggggcguccaccauccuggcacagacucagaucagaucaguuuguacgcccaggcuagcgggagaauuacugugucuaccaagaggucccaacagacaguaaucccaaacauaggaucacggccccgcguuagagacgugagcaguaggauuucuaucuacuggaccauugucaagccuggugacauccugcuaaucaacuccacgggcaaucucauugccccacggggguauuucaagauacgcagcggaaaaucgucuaucaugcgauccgaugcgccgauuggcaaguguaacucagagugcaucacucccaaugguaguauaccuaacgacaaaccauuucagaaugugaacagaauuacauacggggcaugucccagguaugugaagcagaauacccugaaacuugccacuggaaugcggaacgucccugaaaagcaaacacguggcaucuucggcgcuaucgccggguuuauugagaauggaugggaagguaugguugauggcugguacggguuccgccaccagaacagcgagggaaccggccaggcagcugaccugaaauccacgcaagccgcgaucaaucagauuaacgguaaguugaauagacucauagggaagaccaacgagaaauuucaccagaucgaaaaggaguucucugaaguggagggcaggauucaggaucuggaaaaauauguagaggacacaaagaucgauuuauggagcuacaaugccgagcugcucguggcacuugaaaaccaacauacuaucgaccugaccgauucagagaugaacaaauuguucgaacggacaaagaagcagcuacgagagaaugcugaagacaugggaaacggcugcuuuaaaauuuaucacaagugugauaaugccugcauagggaguauccgcaacggaacuuacgaccaugacgucuacagagaugaggcucugaauaacagguuccagauuaaagguguggagcucaaguccggcuauaaagacuggauccuguggauuagcuuugccaucucuugcuuccuucuguguguugcauugcucggguuuauaaugugggccugccagaagggaaauauccgguguaacauuugcaucuga

SEQ ID NO: 129945 - RNA, 1701 nt, Artificial Sequence
  derived and/or modified CDS sequence (opt3) from hemagglutinin__InfluenzaA__ABU92751
augaagaccaucauugcccugagcuacauacucugccuuguguucgcucagaaacugcccggcaacgacaauuccacagcaacuuuguguuuagggcaccaugccgucccuaacggaacgaucguuaagaccauuacaaaugaucaaaucgaggugacuaacgcgaccgaacugguacagucuucaaguacagguggcauuugcgacagcccacaccagauccuagauggggagaauuguacccucauagacgcucugcuuggagauccgcagugcgacggcuuucaaaacaaaaagugggaucuguucguggaaagauccaaagccuauucuaauuguuaccccuaugacgucccugauuacgcaucguugaggucacucguggccagcagugguacucuggaguuuaacaaugaauccuucaacuggacagggguuacccagaauggaacgucuagcgcuugcaagcggcgcuccaacaagucauuuuucagucgacugaauuggcucacucauuuaaaauauaaguacccagcacugaacgugaccaugcccaauaacgagaaauuugacaaacuuuauaucuggggcguccaccauccuggcacagauagcgaccagauuucuuuguacgcccaggcuuccgggcguaucacugugucaaccaagagaagccaacagacaguaauuccaaacaucggaaguaggccccggguucgcgaugugucuuccagaauaagcauuuacuggaccaucgucaagccuggugacauucugcuaaucaauucgacgggcaaccucaucgccccaaggggguauuucaagauucggucuggaaaauccucaauaaugcgcagugacgcgccgaucggcaaguguaauagcgagugcauuacucccaacgguuccaucccuaaugauaaaccauuucagaacgugaaucgaauaacauacggggcaugucccagauaugugaagcagaacacccugaaacuugccacuggaaugaggaaugucccugaaaagcaaacacggggcauuuucggcgcuaucgccggguuuaucgagaacggaugggaagguaugguugacggcugguacggguuccgucaccaaaauucugagggaaccggccaggcagcugaucugaaaagcacgcaggccgcgauuaaccagaucaaugguaaguugaaccgccucauugggaagaccaaugagaaauuucaccagauagaaaaggaguucucagaaguggagggcagaauccaggaccuggaaaaauauguagaggauacaaagauugacuuauggaguuacaacgccgagcugcucguggcacuugaaaaccaacauacuaucgaucugaccgacuccgagaugaauaaauuguucgaaaggacaaagaagcagcuacgggagaacgcugaagauaugggaaauggcugcuuuaaaaucuaucacaagugugacaacgccugcauugggagcauacgaaauggaacuuacgaucaugacgucuaccgcgacgaggcucugaacaauagauuccagaucaaagguguggagcucaagucuggcuauaaagauuggauucuguggaucucauuugccauuaguugcuuccuucuguguguugcauugcucggguuuaucaugugggccugccagaagggaaacauaagguguaauaucugcauuuga

SEQ ID NO: 129946 - RNA, 1701 nt, Artificial Sequence; identical to SEQ ID NO: 129810
  derived and/or modified CDS sequence (opt3) from hemagglutinin__InfluenzaA__ABU92752

SEQ ID NO: 129947 - RNA, 1701 nt, Artificial Sequence; identical to SEQ ID NO: 128121
  derived and/or modified CDS sequence (opt3) from hemagglutinin__InfluenzaA__ABU92753

SEQ ID NO: 129948 - RNA, 1701 nt, Artificial Sequence; identical to SEQ ID NO: 129810
  derived and/or modified CDS sequence (opt3) from hemagglutinin__InfluenzaA__ABU92754

SEQ ID NO: 129949 - RNA, 1701 nt, Artificial Sequence
  derived and/or modified CDS sequence (opt3) from hemagglutinin__InfluenzaA__ABU92755
augaagaccaucauugcccugagcuacauacucugccuuguguucgcucagaaacugcccggcaacgacaaugggacagcaacuuuguguuuaggacaccaugccgucccuaacgguacgaucguuaagaccauuacaaaugaucaaaucgaggugacuaacgcgaccgaacugguacaguccucuucaacaggcgggauuugcgacaguccacaccagauccuagauggagagaauuguacccucauagacgcucugcuuggcgauccgcagugcgacgguuuucaaaacaaaaagugggaucuguucguggaaagaagcaaagccuauuccaauuguuaccccuaugacgucccugauuacgcaucuuugaggucgcucguggccucaagcgggacucuggaguuuaacaaugaaaguuucaacuggacaggaguuacccagaauggcacguccucugcuugcaagcggcgcagcaacaaguccuuuuucucacgacugaauuggcucacucauuuaaaauuuaaguauccagcacugaacgugaccaugcccaauaacgagaaauucgacaaacuuuacaucuggggcguccaccauccugggacagauaacgaccagauuaguuuguaugcccaggcuagcggacguaucacugugucuaccaagagaucccaacagacaguaauuccaaauaucgguucaaggccccggguucgcgaugugccuagcagaauaaguauuuacuggaccaucgucaagccaggcgacauucugcuaaucaacucuacggggaaucucaucgccccgaggggauacuuuaagauucgguccggcaaaagcucgauaaugcgcucugacgcgcccaucgguaaguguaacuccgagugcauuacuccuaaugggucaaucccaaacgauaaacccuuccagaaugugaaccgaauaacauauggagcauguccuagauacgugaagcagaauacccugaaacuugccacuggcaugaggaacgucccagaaaagcaaacacggggcauuuuuggggcuaucgccggauucaucgagaaugguugggaaggcaugguugacgggugguauggauuucgucaccagaacgcagagggcaccggucaggcugccgaucugaaaaguacgcaagcggccauuaaucagaucaacgggaaguugaaucgccucauuggcaagaccaacgagaaauuccaccagauagaaaaggaguucagcgaaguggagggaagaauccaggaccuggaaaaauacguagaggauacaaagauugacuuaugguccuauaacgcagagcugcucguggcucuugaaaaucaacauacuaucgaucugaccgacucugagaugaacaaauuguuugaaaggacaaagaagcagcuacgggagaaugccgaagauaugggcaacgggugcuucaaaaucuaccacaagugugacaaugcuugcauuggaagcauacgaaacgguacuuaugaucauaaugucuaccgcgacgaggcccugaacaauagauuucagaucaaaggcguggagcucaagucaggguacaaagacuggauucuguggaucaguuucgcaauuuccugcuuucuucuguguguuguguugcucggauucaucaugugggccugccagaagggcaacauaagguguaauaucugcauuuga

SEQ ID NO: 129950 - RNA, 1701 nt, Artificial Sequence
  derived and/or modified CDS sequence (opt3) from hemagglutinin__InfluenzaA__ABU92756
augaagaccaucauugcccugagcuacauacucugccuuguguucgcucagaaacugcccggcaacgacaauuccacagcaacuuuguguuuagggcaccaugccgucccuaacggaacgaucguuaagaccauuacaaaugaucaaaucgaggugacuaacgcgaccgaacugguacagauuucuucaacagguggcaucugcgacaguccacaccagauacuagauggggagaauuguacccucaucgacgcucugcuuggagauccgcagugcgacggcuuucaaaacaaaaagugggaucuguucguggaaagaagcaaagcccauuccaauuguuaucccuacgacgucccugauuaugcaucuuugaggucgcucguggccucaagcgguacucuggaguuuaacaaugaaaguuucgacuggacagggguuacccagaacggaacguccucugcuugcaagcggcgcagcaauaaguccuuuuucucacgacugaacuggcucacucacuuaaaauacaaguauccagcacugaaugugaccaugcccaacaaugagaaauuugauaaacuuuacauuuggggcguccaucacccuggcacagacagugaucagaucagcuuguaugcccaggcuucugggcguauuacuguguccaccaagagaucacaacagacaguaaucccaaacauaggaagcaggccccggguucgcgacgugaguucuagaauuuccaucuacuggaccauugucaagccuggugacauccugcuaaucaacagcacgggcaaucucauugccccaaggggguacuucaagauacggucgggaaaaucuuccaucaugcgcucagaugcgccgauuggcaaguguaacagugagugcaucacucccaaugguagcauaccuaacgacaaaccauuucagaaugugaaccgaauuacauauggggcaugucccagauacgugaagcagaauacccugaaacuugccacuggaaugaggaacgucccugaaaagcaaacacggggcaucuucggcgcuaucgccggguuuauugagaauggaugggaagguaugguugauggcugguauggguuccgucaccagaacuccgagggaaccggccaggcagcugaccugaaaucuacgcaagccgcgaucaaucagauuaacgguaaguugaaucgccucauagggaagaccaacgagaaauuucaucagaucgaaaaggaguucagcgaaguggagggcaggauucaggaucuggaaaaauacguagaggacacaaagaucgauuuauggucauauaaugccgagcugcucguggcacuugaaaaccaacacacuaucgaccugaccgauagugagaugaacaaauuguucgaaagaacaaagaagcagcuacgggagaaugcugaagacaugggaaacggcugcuuuaaaauuuaccauaagugugauaaugccugcauaggguccauccgaaacggaacuuaugaccacgacgucuaccgcgaugaggcucugaauaacagauuccagauuaaagguguggagcucaagagcggcuacaaagacuggauccuguggauuucuuuugccaucucaugcuuccuucuguguguugcauugcucggguuuauaaugugggccugccagaagggaaauaucagguguaacauuugcaucuga

SEQ ID NO: 129951 - RNA, 1701 nt, Artificial Sequence
  derived and/or modified CDS sequence (opt3) from hemagglutinin__InfluenzaA__ABU92757
augaagaccaucauugcccugagcuacauacucugccuuguguucgcucagaaacugcccggcaacgacaauuccacagcaacuuuguguuuagggcaccaugccgucccuaacggaacgaucguuaagaccauuacaaaugaucaaaucgaggugacuaacgcgaccgaacugguacagauuucuucaacaggugagaucugcgacaguccacaccagauacuagauggcgaaaauuguacccucaucgacgcucugcuuggggauccgcagugcgacggauuucaaaacaaaaagugggaucuguucguggagagaagcaaagccuauuccaauuguuaccccuaugacgucccugauuacgcaucuuugaggucgcucguggccucaagcggcacucuggaauuuaacaaugagaguuucgacuggacagguguuacccagaacgggacguccucugcuugcaagcggcgcagcgauaaguccuuuuucucacgacugaauuggcucacucauuuaaaauauaaguacccagcacugaacgugaccaugcccaauaacgagaaauuugacaaacuuuauauuuggggaguccaccauccuggcacagauagugaccagaucagcuuguacgcccaggcuucuggccguauuacuguguccaccaagagaucacaacagacaguaaucccaaauauagggagcaggccccggguucgcgacgugaguucuagaauuuccaucuacuggaccauugucaagccuggagauauccugcuaaucaacagcacggguaaccucauugccccaaggggcuauuucaagauacggcgcgggaaaucgucuaucaugcgauccgacgcgccgauuggaaaguguaauucagaaugcaucacucccaacggcaguauaccuaaugauaaaccauuucagaacgugaauagaauuacauacggugcaugucccagguaugugaagcagaacacccugaaacuugccacugggaugcggaaugucccugagaagcaaacacguggaaucuucggcgcuaucgccggcuuuauugaaaacgggugggagggaaugguugacgguugguacggcuuccgccaccagaauagcgaggggaccggacaggcagcugaucugaaauccacgcaagccgcgaucaaccagauuaauggcaaguugaacagacucauagguaagaccaaugaaaaauuucaccagaucgagaaggaguucucugaaguggaagggaggauucaggaccuggagaaauauguagaggauacaaagaucgacuuauggagcuacaacgccgaacugcucguggcacuugagaaucaacauacuaucgaucugaccgacucagaaaugaacaaauuguucgagcggacaaagaagcagcuacgagaaaacgcugaggauaugggcaauggaugcuuuaaaauuuaucacaagugugacaacgccugcauaggcaguauccgcaaugggacuuacgaccaugaugucuacagagacgaggcucugaacaauagguuccagauuaaaggaguggaacucaaguccgguuauaaagauuggauccuguggauuagcuuugccaucucuugcuuccuucuguguguugcauugcucggcuuuauaaugugggccugccagaaggggaacauccgguguaauauuugcaucuga

SEQ ID NO: 129952 - RNA, 1701 nt, Artificial Sequence; identical to SEQ ID NO: 129810
  derived and/or modified CDS sequence (opt3) from hemagglutinin__InfluenzaA__ABU92758

SEQ ID NO: 129953 - RNA, 1701 nt, Artificial Sequence; identical to SEQ ID NO: 129810
  derived and/or modified CDS sequence (opt3) from hemagglutinin__InfluenzaA__ABU92759

SEQ ID NO: 129954 - RNA, 1701 nt, Artificial Sequence
  derived and/or modified CDS sequence (opt3) from hemagglutinin__InfluenzaA__ABU92760
augaagaccaucauugcccugagcuacauacucugccuuguguucgcucagaaacugcccggcaacgacaauuccacagcaacuuuguguuuagggcaccaugccgucccuaacggaacgaucguuaagaccauuacaaaugaucaaaucgaggugacuaacgcgaccgaacugguacagauuucuucaacaggugagaucugcaauaguccacaccagauacuagacggcgaaaacuguacccucaucgaugcucugcuuggggacccgcagugcgauggauuucaaaauaaaaagugggaccuguucguggagagaagcaaagccuauuccaacuguuaccccuaugaugucccugacuacgcaucuuugaggucgcucguggccucaagcggcacucuggaauuuaauaacgagaguuucgauuggacagguguuacccagaaugggacguccucugcuugcaagcggcgcagcgacaaguccuuuuucucacgacugaacuggcucacucauuuaaaauauaaguacccagcacugaaugugaccaugcccaacaaugagaaauuugauaaacuuuauauuuggggaguccaccauccuggcacagacagugaucagaucagcuuguacgcccaggcuucuggccguauuacuguguccaccaagagaucacaacagacaguaaucccaaacauagggagcaggccccggguucgcgacgugaguucuagaauuuccaucuacuggaccauugucaagccuggagacauccugcuaaucaacagcacggguaaucucauugccccaaggggcuauuucaagauacggucggggaaaucuuccaucaugcgcucagaugcgccgauuggaaaguguaacagugaaugcaucacucccaauggcagcauaccuaacgacaaaccauuucagaaugugaaccgaauuacauacggugcaugucccagauaugugaagcagaauacccugaaacuugccacugggaugaggaacgucccugagaagcaaacacggggaaucuucggcgcuaucgccggcuuuauugaaaaugggugggagggaaugguugaugguugguacggcuuccgucaccagaacuccgaggggaccggacaggcagcugaccugaaaucuacgcaagccgcgaucaaucagauuaacggcaaguugaaucgccucauagguaagaccaacgaaaaauuucaccagaucgagaaggaguucagcgaaguggaagggaggauucaggaucuggagaaauauguagaggacacaaagaucgauuuauggucauacaaugccgaacugcucguggcacuugagaaccaacauacuaucgaccugaccgauagugaaaugaacaaauuguucgagagaacaaagaagcagcuacgggaaaaugcugaggacaugggcaacggaugcuuuaaaauuuaucacaagugugauaaugccugcauaggcuccauccgaaacgggacuuacgaccaugacgucuaccgcgaugaggcucugaauaacagauuccagauuaaaggaguggaacucaagagcgguuauaaagacuggauccuguggauuucuuuugccaucucaugcuuccuucuguguguugcauugcucggcuuuauaaugugggccugccagaaggggaauaucagguguaacauuugcaucuga

SEQ ID NO: 129955 - RNA, 1698 nt, Artificial Sequence
  derived and/or modified CDS sequence (opt3) from hemagglutinin__InfluenzaA__ABV29579
augaaggugaaacugcucguccuucugugcaccuucacagccacuuacgcugacacgaucuguauuggcuaucacgcaaacaauagcaccgauacaguugacacuguguuggagaagaacguaaccgugacacauuccgucaauuuacuggaagauucucacaacgggaaacuaugccuccugaagggaauagcgccccuucagcuggguaauuguucaguggccggcuggaucuuggggaacccugagugcgaacuccugauuaguaaagagagcugguccuacaucguugaaaccccaaauccggagaacggaacuuguuaucccggcuacuuugcugacuaugaggaacugagagagcaacucucuucggugagcucauucgaaagguuugagauuuucccuaaggagaguuccuggccaaaucauacagucaccggugugucugccagcugcucccacaacgggaagucaaguuuuuaccggaauuuacuguggcuuacgggcaaaaacggauuguaucccaaucugagcaagucuuacgcaaacaauaaagaaaaggagguucuaguacucuggggcgugcaucacccuccaaacaucggggaucagcgcgcccuguaccacacugaaaacgcuuaugucuccguggugucaagccauuacagucgacguuucacccccgagauagcaaaaagaccuaaggucagggaccaggaaggacggaucaauuauuacuggacacuucuggagccaggugauacuauuaucuuugaggccaacggcaauuugauugcuccgcgcuucgccuuugcgcucucuagaggguucggauccggcaucauaaccagcaacgcacccauggacgaaugugaugccaagugccagacaccucaaggugcuauuaauucgucucugccauuucagaacguucaccccgugaccaucggggaguguccuaaauauguaagguccacgaaguuacggauggugacuggacugcgcaauauuccaucaauccagagucgaggccucuucggcgccaucgcaggguuuauugaaggagguuggacaggcauggucgacgggugguacggauaucaucaccagaacgagcaaggcagcgguuacgcugccgaucagaaauccacccagaaugcgauaaacgggaucacuaauaaggugaacucuguuauugaaaagaugaauacacaguucaccgccgugggcaaagaguucaacaaacuugagaagagaauggaaaaucugaacaagaaagucgacgauggauuuuuggacaucuggacguacaacgcagagcuacuggugcuccuggaaaaugagaggacccuugacuuccacgauagcaacguaaagaaucuguaugaaaaaguuaagucacaauugaaaaacaaugcuaaggagauaggcaacgggugcuuugaguucuaccauaaguguaaugacgaaugcauggagagugugaaaaacggaacauaugauuaccccaaguauuccgaagagagcaaacucaaucgggagaagauugacggugucaaacuggaaucuaugggcguguaccagaucuuagccaucuauucaacugucgcuaguagccuggugcuacucguuucccugggggccauuucuuuuuggaugugcucgaacggaagccuucagugucguaucugcauuuga

SEQ ID NO: 129956 - RNA, 1698 nt, Artificial Sequence
  derived and/or modified CDS sequence (opt3) from hemagglutinin__InfluenzaA__ABV29612
augaaggugaaacugcucauccuucugugcaccuucacagccacuuacgcugacacgauuuguauaggcuaucacgcaaacaauagcaccgauacagucgacacuguuuuggagaagaacgugaccguaacacauuccgugaauuuacuggaagauucucacaacgggaaacuaugccuccugaagggaaucgcgccccuucagcuggguaauuguucagucgccggcuggauuuuggggaacccugagugcgaacuccugaucaguaaagagagcugguccuacauuguggaaaccccaaauccggagaacggaacuuguuaucccggcuacuuugcugacuaugaggaacugagagagcaacucucuucgguuagcucauucgaaagguuugagaucuucccuaaggagaguuccuggccaaaucauacagugaccggugucucugccagcugcucccacaacgggaagucaaguuuuuaccggaauuuacuguggcuuacgggcaaaaacggauuguaucccaaucugagcaagucuuacgcaaacaauaaagaaaaggaggugcuaguacucuggggcguucaucacccuccaaacauaggggaucagcgcgcccuguaccacacugaaaacgcuuauguguccgucgugucaagccauuacagucgacguuucacccccgagguggcaaaaagaccuaaggucagggaccaggaaggacggaucaauuauuacuggacacuucuggagccaggugauacuauuaucuuugaggccaacggcaauuugauugcuccgcgcuucgccuuugcgcucucuagaggguucggauccggcaucauaaccagcaacgcacccauggacgaaugugaugccaagugccagacaccucaaggugcuauuaauucgucucugccauuucagaacguucaccccgugaccaucggggaguguccuaaauauguaagguccacgaaguuacggauggugacuggacugcgcaauauuccaucaauccagagucgaggccucuucggcgccaucgcaggguuuauugaaggagguuggacaggcauggucgacgggugguacggauaucaucaccagaacgagcaaggcagcgguuacgcugccgaucagaaauccacccagaaugcgauaaacgggaucacuaauaaggugaacucuguuauugaaaagaugaauacacaguucaccgccgugggcaaagaguucaacaaacuugagagaaggauggaaaaucugaacaagaaggucgacgauggauuuuuggacaucuggacguacaacgcagagcuacuggugcuccuggaaaaugagcggacccuugacuuccacgauagcaacguuaaaaaucuguaugaaaagguaaaaucacaauugaagaacaaugcuaaagagauaggcaacgggugcuuugaguucuaccauaaguguaaugacgaaugcauggagagugugaagaacggaacauaugauuaccccaaauauuccgaagagagcaagcucaaucgugagaaaauugacggugucaagcuggaaucuaugggcguguaccagaucuuagccaucuauucaacugucgcuaguagccuggugcuacucguuucccugggggccauuucuuuuuggaugugcucgaacggaagccuucagugucgcaucugcauuuga

SEQ ID NO: 129957 - RNA, 1698 nt, Artificial Sequence
  derived and/or modified CDS sequence (opt3) from hemagglutinin__InfluenzaA__ABV29634
augaaggugaaacugcucguccuucugugcaccuucacagccacuuacgcugacacgaucuguauuggcuaucacgcaaacaauagcaccgauacaguugacacuguguuggagaagaacguaaccgugacacauuccgucaauuuacuggaagauucucacaacgggaaacuaugccuccugaagggaauagcgccccuucagcuggguaauuguucaguggccggcuggaucuuggggaacccugagugcgaacuccugauuaguaaagagagcugguccuacaucguugaagcuccaucuccggagaauggaaccuguuaucccggcuacuuugccgacuaugaggaacugagagagcaacucucgucagugagcaguuucgaaagguuugagauuuucccuaaggaguccucuuggccaaaccauacugucacaggugugagcgcauccugcucacacaaugggaagaguagcuuuuaccggaacuuacuguggcuuaccggcaaaaauggauuguaucccaaccugucuaaguccuacgccaauaacaaagaaaaggagguucuaguacucuggggcgugcaucacccuccaaauaucggggaucagcgcgcucuguaccacacggaaaacgcauaugucucaguggugagcagucauuacucucgacguuucacucccgagauagccaaaagaccuaaggucagggaccaggaaggacggaucaacuauuacuggacccuucuggagccaggugauacaauuaucuuugaggcuaauggcaacuugauugccccgcgcuucgcguuugcacucuccagaggguucggaagcggcaucauaacuucgaaugcccccaugggugaaugugacgcuaagugccagaccccucaaggggccauuaacucuucccugccauuucagaauguucaccccgugacaaucggagaguguccuaaauauguaaggucagcaaaguuacggauggugaccggccugcgcaacauuccaaguauccagagccgaggccucuucggggcuaucgccggauuuauugaagguggcuggacggggauggucgauggaugguacggcuaucaucaccagaaugagcaagguuccggguacgcggccgaccagaaaucuacucagaacgcaauaaauggcaucacaaacaaggugaauagcguuauugaaaagaugaacacccaguucacugcugugggaaaagaguucaauaaacuugagagaaggauggaaaaccugaauaagaaggucgaugacggcuuuuuggauaucuggacauacaacgccgagcuacuggugcuccuggaaaacgagcggacccuugacuuccacgacucaaauguuaaaaaccuguaugaaaagguaaaaagucaauugaagaauaacgcuaaagagauagggaauggaugcuuugaguucuaccauaaguguaacgaugaaugcauggaguccgugaagaaugguacguaugacuaccccaaauauagcgaagagucuaagcucaaccgugagaaaauugauggcgucaagcuggaaucaauggggguguaccagaucuuagccaucuauaguaccgucgcaagcucccuggugcuacucguuucucugggagccauuucguuuuggaugugcagcaauggcucccuucagugucgcaucugcauuuga

SEQ ID NO: 129958 - RNA, 1698 nt, Artificial Sequence
  derived and/or modified CDS sequence (opt3) from hemagglutinin__InfluenzaA__ABV29645
augaaggugaaacugcucauccuucugugcaccuucacagccacuuacgcugacacgauuuguauaggcuaucacgcaaacaauagcaccgauacagucgacacuguuuuggagaagaacgugaccguaacacauuccgugaauuuacuggaagauucucacaacgggaaacuaugccuccugaagggaaucgcgccccuucagcuggguaauuguucagucgccggcuggauuuuggggaacccugagugcgaacuccugaucaguaaagagagcugguccuacauuguggaaaccccaaauccggagaacggaacuuguuaucccggcuacuuugcugacuaugaggaacugagagagcaacucucuucgguuagcucauucgaaagguuugagaucuucccuaaggagaguuccuggccaaaucauacagugaccggugucucugccagcugcucccacaacgggaagucaaguuuuuaccggaauuuacuguggcuuacgggcaaaaacggauuguaucccaaucugagcaagucuuacgcaaacaauaaagaaaaggaggugcuaguacucuggggcguucaucacccuccaaacauaggggaucagcgcgcccuguaccacacugaaaacgcuuauguguccgucgugucaagccauuacagucgacguuucacccccgagaucgcaaaaagaccuaaggugagggaccaggaaggacggauuaauuauuacuggacacuucuggagccaggugauacuaucauuuuugaggccaacggcaauuugaucgcuccgcgcuucgccuuugcgcucucuagaggguucggauccggcauaauuaccagcaacgcacccauggacgaaugugaugccaagugccagacaccucaaggugcuaucaauucgucucugccauuucagaacguccaccccguuaccauuggggaguguccuaaauaugugagguccacgaaguuacggaugguaacuggacugcgcaauaucccaucaauccagagucgaggccucuucggcgccauugcaggguuuauagaaggagguuggacaggcaugguggacgggugguacggauaucaucaccagaacgagcaaggcagcgguuacgcugccgaucagaaauccacccagaaugcgaucaacgggauuacuaauaaggucaacucugugaucgaaaagaugaauacacaguucaccgccguuggcaaagaguucaacaaacuugagagaaggauggaaaaucugaacaagaagguggacgauggauuuuuggacauauggacguacaacgcagagcuacugguccuccuggaaaaugagcggacccuugacuuccacgauagcaacgugaaaaaucuguaugaaaagguaaaaucacaauugaagaacaaugcuaaagagauuggcaacgggugcuuugaguucuaccauaaguguaaugacgaaugcauggagaguguuaagaacggaacauaugauuaccccaaauauuccgaagagagcaagcucaaucgugagaaaaucgacggugugaagcuggaaucuaugggcgucuaccagaucuuagccauuuauucaacuguggcuaguagccugguccuacucgugucccugggggccaucucuuuuuggaugugcucgaacggaagccuucagugucgcauuugcauauga

SEQ ID NO: 129959 - RNA, 1698 nt, Artificial Sequence; identical to SEQ ID NO: 129958
  derived and/or modified CDS sequence (opt3) from hemagglutinin__InfluenzaA__ABV29667
